United States Patent Application Publication US 2008/0114160 A1 - sequence listing, part 65

SEQ ID NO: 23460 - DNA, 5340 bp, Oryza sativa
cgcgacggcctatccagagttctgcttctacttctccgacctcccgagcaatgacttcaacaccctcttcagcctcctcccgccgcacgccgcttcctccggtgacggcagtgggcggcgctacttcgccgccgccgtgcctggctcgttccacgaccgtctgttcccggagcgatctatcgacgtgttcacctccaccttctccttgcactggctctctcatttacctacgcatcaatatagatttcaaggtgtgtaattcacctactccctccgtctcaaaatataaaaagttttagagttggacacggtcattaagaaaaatattagaagtgaatgataggattgtgactggatgagtagtgaaggtaggtgggaaaagtaaatggttgggaagagaaagttggtgaagaagttgttatattttaggataaatcctaaagtttaaaatttgttatattttgggacgaatggagtaattgaaaggatgggctttgattacacaggtgctggacgaagtcgccgatacgcggtcaccggcttacaacaaggggaaggtgttcgtgcagggaagctcggaggagatcggcgcggcgttccggcggcaattccagtccgacatggcgcgcttcctgcgctgccgcgccgccgagctgaaacccggtggcgccatgttcctggtcttcgtcggctgcccgtcgtccgccggccccaccgaccaaggccgcagcttcaacctgctcggcaccatgttcgaggagtcgtggcgcgacctcgtcgacgaggggttgatcgacggtgggagtatggacagcttcaacatcccgtcgtacgccgcgacgctggaggagttcagggaggccgtcgacgccgacggctcgttcgccgtcaaccggctggagcacgtgatgggaagtcgtctcgccgtggccgacgacccccacgaccgctgcgtggttgggcgcagggtggcgaacaaccaacgatcgatctttgggccgctcgtcgaagcgcacatcagcagggcgctcgccgacaagctatttgtccggatggagaggcgcacaagagagctcgccgatgagctcggggacgagatgggggtccacttccacatcgtgtgctcgctttcactcgtctgacgatatctacatcgtacactgtcctaataatgaaaaaatatattcaaattttgggcacaataatttaaatataataattgtatttgctaaataagtctgttgaaaatatgatcataaatcggcatattttaattcagaaaaacaagataataaacatggcatgcgagtaggaaatgatccagtgctagtgctaaacataaatatgctttgagcaagaaaaaacatcatctacaaacatgtttgacactagaaatagaaatcctatatactcgaagaacactccagagtatgttgaggaattagtattatctctgttgacgttgacattctctccggtcaggggcggatccaggaaaaaatagtaggtggggctgaacagactctaccctagacctctttagcggacttatattctcgtggttgcgtggaggatcactggtatctgtgttgtttgaactagaataatacataagcattattctttttggcatgttgacaaactaaaaatgtagaaacaattataaattttaatcactacctcacttgagacacaaatttagactgtctattagtattagaggtaaataggttaccaatttggcaattgcaacttcaaatattcaatcaccggctgctggctgctgctgctgcaagctgcgtccagcggaccagcgtccttgcgccctcgcggcctcgctggcttgcgggtcaccacctccccgtcggcgcgagcgcgcagcggcactggagctggaccgtcgcctagccgcctcccgtcggcgcgtcggcgcaggaccgccgcctggcggctggcgccctggcccgtcttgccacctccccggcgggcgcgccggcgctggaccgccgcttggccgcgggccgcctcccttcccggcttcccgccctccgggcccctcgtccgctcatggctcgccagccgccgccgccgcctgcttgccgctcgccgcacgcccacggggccacgggccacgctgcctcctagctcccgccctcgtcagccggtgtcgccaccgggcgtcgggcgcctcgccaccacggccgcctcccgtcgccggttgcccatcggcccgcgtccacggccggtcgaacgctactacgctagtgttagggatttggtagacagggagagagaacgccggctgggcggctggggaattcagagaagggagagggagagggaaccctggccgtgtgccgcgcttgagctacaggttggaggagtgggccgggccaaaattggaagattaagctcatgggctgctcttcatagccggcccaagtcgccaaaacatcgtcttcaacctccagtttctcctccagccgatcttaactcccacaaacggcgcatccatggaagaaatttttagtgggggcttaagggggtttccatggtcccaaggatggtagtggggtctcaagacccccccgcccccgcggtaaatccgcccctgtctccggtaccaccgttccatcctctgtggcgccgtcattcactccagtagcgccggtgccggtgtcagccttcatgatgtagaggaagaagatgaagcagaccgtcgatgcagaggaagtagacgtgttgcaaaggatgtaaccgatgcagagccgtcgcatcgcaggatgctccccccacccgcctacccttgcaggtacacaattagatagagtttcggaggcctactcatcccgagtacctatgcgcacaggtggtcagaaccggggaaacagtagctagcgcaaggacaaagattaatgttatgagattgttggaataaatgggctaggcccaatttattcccaataaattctattggcccataattaatgttacgagattcgaatttaactggagagatctcaacttaaatagagagctattagagagcacctgttgaatcgtttaggtggtggtgggactaccacacgcgcgccgagccgggctgatgccgaggcaaggcgtcattggctgctgttgctgctactgctctctctctcacattattttgcaactgacagaaattgaatttgtaacggttgagaatcaacaccattaccgctacaacaaatgacagtcaatcctgatttaattatcagattaactctattggttgctctggtaacaggcctattgattactccagcatcgggcagattcccctctcgcacactgtataaacccatcagacctgttgattactccgataacgagcacatttccctttcgcgcactatataaacccatcacaattactctgacaatgtgagtagattcccctctcgcgcactacataaacccattagacctgttgagtactccgacaaagggtagattcccctctcgcgcactacataaacccattagaccagttgagtactccgacaacgggtagattcccctctcgtgcactataaaacccatcacctagaaagacacatctcttggctttgtaacaaccctccctctagaaccgcatagccagcccatccgacgggcggacccacttacacatacgacttctgttacactttcgttctcgcttcatgtaaaagggttaaccgggagtggtatggttggagggatgatgccttgtaagttggttccacccttactaaactagcaaggtggtattaaacatgtgtacacagctctatgggccatacaagccatatcctaattcggctaggatgtcagaggctctgtcttctctagcacactgtttttgctctgtggttctcttttttcctttgttcgtatgctagcttctgtttctccggttctgatcaccaacgtacatgggtgctcgggacaagcatgcctttgaaactccatctgcttgtgtacctgcacgggtaggcgggtaatcaagtttttggggagaatcctcctacgcgactgctctgcatcggctacgtcttctgctgttctgcattggctacgtcctctggtatgtctacttcctctgcatcagctgtctgcaccgtatacttcctctccatcgcaatatcttccactggcaccggcgctattggagcaggagataacggttacgcaccaggaggagggaacaacaacataggagagaacgtcaacatcaatggaggcaatactaatgcctcatcatccattcagtggagcgttctctgggtatatctctattcttatttttgtgttaaatatattgctagacgtttaattttgtacctgctagcatattcatgtttagtgctagcactagatcatttcttacagcaatcgtcacgattacaatcttgtttttctggattaaaatatgccgatttataaccaaatttccaacactctttattagtagtagaaattaatccgaaccgttaatcttatttaatcgaagggttcggatctatttatactaccacatcagttagcggtactacaaacgtggaggggtactattgtgagaaaaaaattaggggcagagtatataatcgtcattaatttagcagtgattgaacttttttccttgttttttgattttttcatgaaatatgagcaatgccagcacaatggataatcatatatcgatttagccggggaaaaaaataaatgataaagtaacttctaatcattatattatattagtaaattactaatttactcctaataattctgatagtataaaatattatcagtagaaagcaccggagtattgttttttttttcttcttttttagatgaaagcctcgtcttgtttggctgcgtgacttttcgcaccacgctcgagaggaacccattgtcttgttccgcggtcaaacaatggattatccaacttggacagtagcaatctgctgtacctacagggttgttgcgtggagctacctttagttattccaaacaatacgcctctttggtaaacttcgaaaggaatgatgtgaccaacaattagcaatttgccactaccaatttatcgccagcggtaacgtggaaatcaccatccggacgtggtcgctactccatctgatttcacaaacatctgctgcactaaaaggatttttttcgtgtggtcaaaaatatttttccgtgcggaggtcttgcccgtctgcactaggtgtctgggaaaataaatatttgcgtgctggtgggtcaaccgtacggaaaaatgcatcttcctgtgcggtcaggttaagcgaaccgcacaga

SEQ ID NO: 23461 - DNA, 21596 bp, Oryza sativa
gcaacgtggcgtagcgttggacagtgactggttaatattgcttaattactacaactgtttttactattttcaactactggttttaaatgcctgctttatgcaaatgaaccccgtagcctccgttggttatatcctgcatcatacctcctcttccggtatgacttgctgagtacagtgggtagtactcagtcttgctcttttcccccacaccagagttgaagttcttctcagttggagatgtcttgaagaggttggtttcgtcgctgccgtcaagggttgcctgtggaatggaatcgcctgctgcaggagtcaagtcttcaggcttagctcgcttttaccttttttgctgcatttgtaatcttttatatttttgtaagacgtggatctgtatgtcaacaattgtcatttgtgtaccctggctggtcctggacaggggtttaatacacattcagcttagaaattctggttcgtgaatttctgggcgtgacaagttggtatcagagccgaccttgaccgtaggacaagccaactggaaaacctaagagccctctgaaccccttttcatatgcacatgcctttttcacttggatttgtttcgggaaactttggggtttgatcttttgattttgggagaaaatcttggtcgcctatttaatcggatctcttgactagggacagtccagggttttagcaaaactttatttggaatttatttggcagtcagtcgggaattgttaggtggaatgtattaagttgtgtctagattcgatgggatgcagtctttatgcgcatcattattatcatgcatttatttcatgcattaagttattgtttagtcagttgcattagtgtcttttgtctgggttcatgaaaaatgttccatgcataaaaatcatcatgcttggctagttgtttgggccatttgttgcgttgtttaaatttggatttgagcatgtattgattcctatcccttgtctaccttagaagtcagacctgttcttcgattgcaagcgccgctccgagcttccgagtcgtcgcccttagctttatcgtcttcttagtctgtttgcgtgctagtttttgtgtttaggtttgttgcttgtgggttagtcggcggtcgatatcatgtgtgagtggtatgacagccttaattaggaattgcgtgcctctttttcagagttttaatcaagattaagataattgcacttaattttataagaaagattagtttctgagccatctgttttcttcctttctcttatttctacctatcctcgtccagatggtgaagacaaggaatgatccccgtgactccaacgacgccagtggcagcgaagagcagacagatgaagctcatactagtggtgcacctggcagcagttcatctccgccgcccgagaacccaacagtcactcagatgatgacaatgatgatgcaacagatgcagcaacattaccatcagatgttgcagcaggcgcaacagaaccagcagtttggtcctccaccatcacacgtgtccaaactgttagactttcttcgtatctagccacccactttctcaagcaccaccaacccaatggaggccaacgactggctccgtgctattgagaagaagctgaacctactgcaatgcaacgaccaagagaaagttgcttttgctacacaccagttgcaaggtcccgcttctgcctggtgggataactacgtggtgacccgtccagatgcaacgaaggttacttgggtagagttttgtcaaaactttaggaaggcacagattcctgaagggattgtggcacaacagaagagagagttccgtgcattgcaacaaggaaccagaacggttacagagtacctgcacgagttcaaccgcctcgcgcgctacgctcctgaggacgtgcgcaccgatgctgagaagcaggagaagtttttgtttgggctcgacgatgaattgaccaaccagctaatctccggagtctatgaggactttgagaagcttgtggacaaggctatccgccaggaagagcaacgcaacaaaatggaccgaaaaagaaaggcagctcagatcagctttcctcaggggaacaatcagaagcctcgcttcatgacgggacagctaggtgggccttccaccctgatcgtctgtcagcaccgtccctatcacccgagtaacttcaacaacgattacaacggtggcagtcacaacaatagtaagcagcacaaccacaactcgactccacccctactaatggcaccagctcagtcagatctgccagctgtgtcagctcagtcagaacaacccaagaagggggctgtaggaaagccaagaccctgcttcaactgtggcaagcacggccactttgctggcaagtgtccgaagctgaatcgcactggacccaggttcatccaggcccacgccaatcatgtgtctgcagaggaagcacaggcagcaccagaggtcgtgttgggcacgtttccagtgaactcatatccagcaacagttctctttgattcaggtgcctcgcattctttcatttccaaaagatttgctgggacacatggattatcggtagtggaacttaaaataccgatgcaggttcatacccctggaaatgatatgaggacagcacactactacccctcggtgactatagagatcaaaagatcaccgtttctatccaacctcatccttctcgaatctaaagacctagatgtcattctcggaatggattggttgaccagaaacaagggagtgattgactgcgcaagccgcaccatcaccctaaccaacgacaaaggggagaagatcaccttccgttccccagcgtcgcagaagtccgtagcgagtctgaatcaggctgctattgagggtcagacagaaacagtggagaaaagtcccaggaagttggaggatattcctatagtacaagagtatcctgaggtgttcccagaagacctcactacaatgccaccgaagagagaaatcgagttccggatcgatttggcacccgggactgctccaatttacaagaggccgtacagaatgacagctaatgagctagcagaggtcaagaagcaggttgacgaacagctgcagaaagggtacatccgaccgagtacttcaccttggggtgctccggttatctttgtggagaagaaagacaagactaagaggatgtgcgttgattatcgcgcccttaatgaggtcacaatcaagaacaaatatccgttgcccagaattgatgacctgtttgatcagctaaaaggagctaaggtgttttccaagatagacctgcgatcaggctatcatcagttgagaattcgggaagaggatattcccaagacagccttcaccactcggtatgggttgtttgagtgcacggttatgtcctttggactcaccaatgaaccggctttcttcatgaacttgatgaacaaagtgtttatggagtttcttgacaagtttgtcgtggtattcattgacgacatacttatttattcaaaatcagaagaggaacatgagcagcatctccgtctggtactcgagaaattgaaggagcaccagctatatgccaagtttagcaagtgtgacttctggttatcagaggtcaaatttctgggtcacatcatttctgctcaaggcgtggcagtggatccatcaaatgtggagtcagttacaaagtggaccccactaaagacagtttctcagatccggagttttcttggacttgcgggctattaccgtcggttcatcgaaaatttctccaagattgccaggcccatgacacagttgctaaagaaagatgaaaaattcaagtggtcagctgagtgcaaccaaagttttgaagaactcaagaagaggttagtctctgcaccagttctaattctgccagatcagacaaaagacttccaagtctactatgatgcatctcgccaagggttgggatgtgtgttgatgcaagaaggcagagtggtcgcatacgcttcgcgacagttgcgtccacacgagaccaattatcccactcatgaccttgagttggcagcagtggttcatgctctgaaaatctggcggcactatcttattggcaaccgctgtgaagtatacactgatcacaagagtctgaagtacatcttcactcagcctgacttgaatctccgacagcgaagatggctggagttaattaaagattatgacatggggatacattatcatccagacaaagcaaatgtggtagcagatgctttgagcagaaaaagctattgcaatgccttatgcactgaagacatgtgtggcaaattgcagcaagatcttgagcacctaaatttgggcatcgtcgaacacgggtacgtagctgccctagaggcacggcctacgctcgtggatcaactcagagcagctcaggtaaatgatcctgaaatagctgagctaaaaaaagaatatgagggtcggaaaagcccgagatttccatgaggatgagcatggcacaatctggttgggagaaagattgtgtatgcctgacgacaaagaactgaaggatctcatactcacagaagctcatcaaactcagtattcaattcatcccggcagtactaaaatgtaccaggacctcaaagagaaattctggtgggccagcatgagaagagagatagccggattcgtcgcactctgcgatgtttgtcggcgagtcaaagcagaacatcagaggcccgcaggactgctacaaccccttcagatcccggaatggaaatgggaagaaatcggaatggatttcatcactggtttgcccaggacatcgtcagggcatgattcaatttgggtagtcgtggatcgcctcacgaaagttgctcatttcattccggtgcacactacctatacggggaaaaggttggcagagctgtacttagcaaggatcatgtgtctgcatggggtacctaagaagatagtatctgatcgagggagtcagttcacttcaaaattttggcagaaactgcaagaagaattggggactcgtttgaatttcagcacggcttatcatccgcaaactgatggtcaaaccgaaagggtcaatcagatcttggaagatatgctgcgagcgcgtgcgctcgattttggtggagcataggataaaagtctgccttatgcggtattctcttacaacaacagttatcaagccagtttgcaaatggcaccgtttaaagcgttgtacggacggaaatgccgcactccgatcttctgggatcaaattggagaacgtcagttgtttgggacggaagtattaactgaagcagaggagaaagtcagaaccgtcagagaaaggctaagaattgcgcaatctcgacagaagagttatgctgacaaccgccgaagagagcttactttcgaagcaggggattatgtgtaccttcgtgtcactccgcttcggggagtacaccgcttccaaaccaaaggcaagttggcaccacgctttgtgggaccatacaggatcttggaacgcagaggtgaagtcgcttaccagcttgagctcccatctaatatggttggtatccacgatgtgtttcatgtatctcaattgaagaagtgtttgagggtacctgaggaacaagctagctcagagcacattgacatccaggaagatctgacttatgtggagaagccgatttgtatccttgagaccagtgagagatggaccagaaacaaggtgatcaggttttgcaaagttcagtggagccaccactcagaagaagaggccacctgggaaagagaagatgaattgaaggccgctcatccgcacctcttcgccagctcttccgaatctcggggtcgagattccgtttaagggggtaggtttgtcacgccctgaggttcccctcccttgctctaaattcataaaataaatcgtccgaagaaattgtttaatttaacctagagatgaatccctaattaataaatacaaataataatcggaatcgacatgtggaatttttcttggattctacatgtcaaaatatgctaacaggatttttagtggaattttcagagcattggaaataattttaaccaattaaaatgagcaaagggcaatgttaaatctctggaaaaatcctttcttctttttctttttctttttcctcctttttcctctctccttgggccgtcggcccagtccattcacctcccgcgccggccttccctcggctgggctggcccaagccggttcctccctcctccctaacccctccgggtcaccgacaggtggggcccacctgtcggccccttcttccacctcccgccgccgctccccaagccggcaaccgccgagccgcccacgccgcccgcctcccccgccttccgcgccccactccgcgccgcgcgcccacgtcgccgcccaccgtccctactcctcccactcgcgcgtgcaccccgcaacggagggattcgaattcgaatctctctctctctctctttctctccattccccacgtcggcgagaaatccggccacctcccggcctcgtccgtctctcacgagccccaataaagcttccccgcactcccctccacctttttcctctttccgccgctctctcccgtgccctccatcactcccgcaccgctacacccgccgccgccgccttttccactcctctggtcgccgctcgccgccgctggagccgccgccgagccaatctgccgccgccattagcttcgccgccgccaaagctaccccggccgccgcatcccccatccaatcccgccgtcggggcccgcttctctccgcgcgccggtgagtaccaccatagccgccgccgtcggccatggctctcgctcgtcgtgggcaccctctctccctctaacctctcacacttcctctcttagggtgtcccggagctcggccgccgttcgctgtcgcccttcggtcgctcaccgtcgccatttgccgtcgtctcctcccgcgccggccgaaccccggtgagaactccctctctcttcctcccgcgcgcgccgccgctccccgcatgcgcgtcgccgcgatgtaccgtcgcccgcgtcgccggccgccgccgtcggtggccgcttgccgccgccgccctcgccctaaccggccggccggcttgaagccgagccaagccaggccgccttcctcctttccccatgagccgccgcccggtgggccccgcctgccagtacccctccctcccccttgagctgctgaccagtggggcccgcatgtcggcgccgccccaccccttgctgacgtcagccctggggcaatattgcgcaataaatacattaaggcttttttctttattagtaaaaacacagataatcttctaaaaatcataagtaattcatccgagctccgattaagtccattcaagtctcagtaaattcataaaaatgtatagaatccattaaaaatggttttgtttcctgtttcagtagacttatagcatgttttgcttgtgtgctttgtttgtcgcgtagatttcgcccgtttcgtcgattcgtggtttctcaaagaagttgctgtggttccatcagtgcgagagcaaggcaagtcatacattgcaattgatcatattgtacccaatttacaaatgtcccgcatttctattaaatattgcattgttttacaatatcatatgggatgggtcctattactcagctatatgttgtttcccttacgccattgataacttgggtattaaaatgactagatgttggtttaggagatgcttagccatgcttagttcaactagtgcacaaaaggggatcacactaaagcatagactttgattattggcaatagctttggattagtgccaccgcaatggtgttggttaattaaaatacactacatggtgggctgtgggtgcatggttttgctagtcgtgcccatggcgattaaggacctgttcgcgggatgccctggaagaacttatcgtacttaccacaagccagcgtgggcaacggctgggcttgcagtgtagcttttatctagccgacgtacccaggcgagggtgggcgtgatggagttgggtcggccggggtgtccggttgatcggcttccggattcaccgcggcacgaacggggggctgcccgttgcctgctggggacgggggcgaacgctaaggtgtggtgcgatcggttagagagggttatgcgaagggtcctgtcacggcctctttccggtatgtcgtggtggcatgtcggcgcacgggaacgtgtcgtggggctgtgtcttgtgggtacagttgtacacctctgatcagagtaaaactattcgaatagccatgctcgcggttatgggcggtcgaccagattcaccgtgattagtctcacccctagtttagcttaatgaactggtgtagttcaggtggttggttgggcctgttgcaacgtggcgtagcgttggacagtgactggttaatattgcttaattactacaactgtttttactgttttcaactactggttttaaatgcctgctttatgcaaatgaaccccgtagcctctgttggttatatcctgcatcatacctcctcttctggtatgacttgctgagtacagtgggtagtactcagtcttgctcttttcctccacaccagaattgaagttcttctcagttggagatgtcttgaagaggttggtttcatcgctgccgtgaagggttgcctgtggaatggaatcgcccgctgcaggagtcaagtcttcaggcttagctcgcttttacttttttcgctgcatttgtaatcttttatatttttgtaagacgtggatctgtatgtcaacaattgtcgttttttaccctggctggtcctggacaggggtttaatacacgttcagcttagaaattctggttcgtgaatttctgggcgtgacacctaggtgagaagctccttgccttccacctaccatcggtcgctgctttcgccttcttgctaacgagctggcgagctcactagccgccaccgttgatgtttgtggtaggagaaatcgggggaggagagagagggttgagaaggaaaaaggatgcatgtttcactgactcgtgggtccatcagtatttttattactatttttttctaatttgtgtgccacgtaggcaccatttcacggcttagtagtgtcttggaacctcgatttcagtggtattgcaatatgagagatacattatacatgattgcgtggccaagggacgggactataactcgatctataatgagagacgcaaaatgaacatattattcccatccctgatggcggccgctgtcgccagaaaaggccaatagtgctggctggagcatcgacggacgtgatgggacgtccgttcgtttgcgagcggaataagttcacttgtcgtccctcaactttacaccgagattgtttgacatcccttatttgcaatatcagaaatcttcactcctatactatgtaaaaccgtgcattttaggtcctatagcagtatatatacctggttttgctgatgtggtatactagtcagcaaaaaattaaaaaaaagtatgtggggccacatgtaagtgagagaaaatcatatgggtccacctctcttcttttttttccttttctcttctcttctcgggcggcggcagatgtgggagaggcggccggcggcgaagcaggggcggcggcggcagtgggcggagcaggcgccgtggcgggcgagctcgcgggaagaagctgggcggcggcaccagcgccggaagaagctctcgttggcatcgtgcccgcttcgcctaccgccgccccgtagcagtggctcgctctcgaggcgaagcagcggcgatcttgccttgagacagagcaacggtgcgccggctgggcggctcggacgtgtgcggcggcctggccggcctcgtggtggagcgacggcgcggcctcgagcgaagcggtggtagccctggaggtagagcgacagcccggcgctagcccgctcgtcgcggcatgcacgatacttgtccacatataccatcagttgcaacttgcacgaatgcacgcaagaaaaccaatctaaccatctaagacgatcctaataaaatcagcaagctaattggttgttaatttgggccccagttgctgaggtacatgaccgtcgtcagctcctcgtcttgctgcttggctttcctccgtcgcggtcgcggcaggctgcagcgtgcgcgcgccgccgctcccgggcgcggcctacagcatgcatgcagtgctgctgggtcttctagctagctgctgtccccggacgtggagcgccgcatccgcgaagagcccggagttggacggcgacggggtgccagcagcagcagcacccggccgcgtctcccctcccctctctggccggcggtagggatccttgcggagccgggcgcggcggaaggcgatggcgacggggttatcgtcgtgggcgaggaagcagccagctgacgccggctgaggagccactcggtgtcgaagcggcggcggatgaaggcgagggaataaaagaaaagaaaaaattgttgtgtgttctacatacttttttaatttttttgggtatctatactgctatgggatttaaaatgcatgattttgtatagtttagaggtgaatttctgatattgaggataaaggatatcaaataaactcgatgcaaagttaacggacaacaggtgaacttatttctttgcgagcgcctaggctatcacccggctgggctgctatcgcctggctgggcttgctaataggccatgctcaggctgtactaacaggtggtttacccaacttttacgactggcctttctaatttttgttttgtcagttttttctgtaactttttatttgttgtcattatctttttgcgtgtttgtcatggctccaaaatttttcatcttcaatctttaaaaatcatgcccgtccgttgcaagaaaaaaaataaaaatatggtaatcattagatgattaggatttaattttcatgatgtcagtcctttagaaaaataaagaatgcaagcagtgggttatgttaaagtcagatcaccaattgtatgtaaataaaattgcatgcgaatagtaacctgtgcatccttttcagttttcaaccacttaattttctttatcagaatctgtatcaccaatacatttatctatggcgttctgacactactacgaaacactatattagtagtgctctcataggtaccgattcatttaaaaccggcacctatgactatgagtgcttttccataccaatgagcatgtttaactcgatcaaattaagaaccaccacctatatcacttataggtgttggtttataataaaaattgacacaaatagtgataggtattagttcttaaaaaatcggcagtcggttatttttttcaacaacacctatgtaacaagccgacctgataagcaacattgacgaaaatatcacgaatgagttgtgcctgcttggtacttatcttcaaactactccaccctatcctcttctccctctagccacttttctcttctccccttatcctcatcccctctccacctggctagtagcgagggcgacccagcgatggttagggcgcagcctccacgacggcagggcgcgggtggcctccacggatgtgtgtggcctcccttatgtcacgggcatcctagcccactacgaggtacggttggtggtctccacagcggcgagcggcgggcaacctcccttctgtcacgagcatcctccatggtggtgggcagcctccacagcagcgctgagtatgacctcccaatggcggctcattggtcacccagatccgcgcttcgtccccatcagtgtcgttctcttatttctagatccgtgtgttcttggatgttgatctatgcatgttttgatgcctctgtgttgttggatggatgggtggtggtacgtggatgttgataaatgtgttcttggatgtgggatgctcaggatgctctagggtgatggggagctgcttgatgagctagatttttttgattcatggacactcacaggtgttggttactaaacaggcatatatgacatcttctcattagttcccccttttgctggttgggaaaccagcacctatttagggttcccaaccggcacatatagggttttctgtgctagtatgatcaagtcctggaaactataaatgtattcagtacagctattacaccccacatgctcatagcaaggaatagaaaggcataacaaaggagcaacatctctagtgacttaaaactccatcgtggaacatgaaggccggggatcatagcacctaatccagtccgcgactacacttgctgcacttgcaattagcggaacatagctgcagattcgtaccaatggcttgctggctgagggggttggatggatcgaactggtaccagcggtttgctggagtaggaaaaatgatacggagtaaatctcagtagcagaaaatggcatggtggtgctgaagcatcggacaacagacaaaaatttagtacttgaggatgaacccaatcatggcgcatgggtccaagtgtccaacagttggtgccgatgcgtgcggtgcaggttggccttagtggcacctcatcgaaagaggcaatggccgttgccaccactgaggagaggagaaacttgaagacgtgtggcaagccccaattggaatagaataggaatggaaggaagtcgcagatgtgtagagttatctacgcaataagatgggcagccaaactcctgcttggctcactatgttgagatttgcgaacaatacagaaataggcaaaaacatcgatggtgctggtggtggaaaacaaaacaaaacacggatgcacacagacattgcacgtgaatcggtacgcccaatgcacacatgggacatcgcgctcttgcatggctatcagacgatgtagcaaaatagagaaatgcgggtgagcagaattggaaggacacgatgcaggtaggcgggcaggtgcacaaagcgcgaggcggacgtgaacgtgcacacgggggtaatgccaagtggacgatgtacgaaactataggcagaaatagttcgaacttttataatagtagagatatatcacgctaataatctaaattcttaaagggagtaccaccaccaccaccaccaccaccaccaacttttttctttaaaaaagaaagaacaatgtagaaccagaaggcctacatatcaaccatcccactacccacatgtctagcctgaacataaatcttatgcccatgcaagtgcaaacctctagtaggacatgcgacacagttacaggcaaagagatagaggtagtggaagtggaaaggctttcaattgacagaagatagaaaccctaaatcggatttgtgtaggctggcgatggctgatgcagcagggaggtcgactgatgacatgtgagataggcaaggctcttctatgaggacgccaattatgagggcactggatttgcatcctatgtgggccgagtgtaggaggagacgtggatgagggagatgatgagaggatgcctttctctctccacacctctgagagttagtggcgttgcttactcgcccaaagagacgacaagatgttttggttatatgggagttagaaagactaggactaggagttaagttgtgtgagagattatagttgggttgcatgggtgattgaagtgcggctgtgtgggagtcaggttatttcggtcaatatgtagtcacttcgactagcaaggtaggacgattgggttggtcaaacttagtttggtctttcagattgtaggcccaaactaatggccagagacgactgagatcaacttcggtcttttggggtccatcttagtttgttggggtctgattttgatctaccatttgtatgcacatccctacttgtattgttccttagcggatgagtgtgtgtccttggggcaggaagcataagactatagaatttttgacgttatactattcaccgtctcgataaatcattatttggatggtgttcatataggttgttcaatgtacatgtgtttttttccttaaacaaattgcataagacaatgtgagatttcatattaatatagtagaaaaaaaacaagataatagctctggaatgctataactagaaaacagaagaaaaacagccacgtcaaacacctacgatataaacacccacccatgaaaacaaataggagcatcacatccaaatacactcaactttatccacatcaatatacaggtttgggtactcaacaactaacacaaggtagacttgcatgggtattaatataatataactagttggcaccccgcgtctttgccgcaggttttgtagttttatcgtcaaacaaaatcatagttttaaatgcttaggtacaactctatgtatatataaaatatatgataatgtggatttatatatgtcttatgttattacaatacaattcagattttatttttccaagcgtcattgtgtattattataatatatgaatattattttcatccgcaatatgggtttcgttataattggacaatttgcatttctctactccacttaagttttttctaaaaatagattcaggtaacgatacctaataattatatgctatcttatcatgcataataaaacaaaacacatatattaaacaataatcatataataaacaataatttgagttgtattcagaaaacatagtgttattgtcgaaacatgaattcggcaataataaaagggggtagcgcacgagacctaaaagtggatggatgcagagacaaaggatttagacaggttcaggccctctcgatgagaggtaataccctactcctgtttggggatttgaatccgccgagtgtgtattgatctgacgatcaggttgtctcatgcccctagaggggctccctgccctccttatataggttgggggcagggttacaagatagaaaccttaaccaatacggtatcggtttcctaaatctactttacaatcttatcaaaccaggactttaggccgttccataatatacagggaaacgtaatacccaagtcatgatctgttacatatttcatatatataagttatcccctataactagtcggataaccatgccgtgtgggtatggggtacccataatctccatagtagcccctgagaccttcacagtgtaaaatataatcttctctcgaactagattactccaaagcggagtgcttcaatcatattcgccatggtctcccgggtacttttaccaaatttgaagactgtggagggctgaaaaataaagtcaggtgcatcgaatagatgcacctaataggtgtagcccccgactatgtggttaattgaaccaaccaaacatatagtcaaggaataaataatctaaccaaccgagtggttttgataattgtaatcaaccaagtgacttgatatcaacatatagcatatgcggtgtgaatccccgaataatatgatccaagtgatataccgactgcttggcaaaatataatgcgtacaacctaaagttgacaacatttttgaaagttcacatagcaaaacaactataaagaagcttgaatgctgtgaataaagaaatttccaaagtattgggcatacgccatgcgcacactgctttaacacatgtgcttaagtccctaaaagacacatggtttcaccacacccggaaatatatggcatatgtggtgtaaaatccgagtaaataaactcataaaggatttaccaaccgcctggaaaatgaccataatatataatcagcctaagccataatattggtcaataaaaatacacacttacgtggcaaaaagcaatgatattgtatccaatcaattgcttaaaaacccaaacagcaccttgacttatataaaaaagtcagcgggacagctatataaagctttactgtttgacaccttttaagatgcattgtaccaactcctaaaaagttgagtaactgcggtataaaaggattttaaggtattgggcacttgatcacgcgcactttggcctaagcaaaaagtgcctaagtccctaaaagaacgtgacaggccacacctgaaaatatgggctgcagacatattaggcctaggccaaaaaatatgccttcgacaccctttaaaggatgacgcatataacatgctcccgagtaataaatcttccgggtaatatagaccaagcgtaactcatatgaatagcttctgatctgagtgattatcccttatgggatactccaaaatggatgtaacaattgaatcccgactggcgcaagtattcagttgataacccttacggggaataataaatagtccagtctttgagcatataaaatagacccatgatcatgaattcatgttgcatgtatccggagcaagtccaaattgaagatataatacttgtgtttgaactagtaagcccctgagcatatagcttgtccttctgtcgtagtcacaattgtccattgatggtagctgacgcagttggcatagagacaagacgaccaacatagagataatattgcccaccagaggtggcaaaaatattggtagtagtgaagatagtgattccaatcaaaagtgataaagttgcatagccgtggaggcgaagaaaccagttggcaacagtcaggtcagccagcaatgaatatgaaggcgcccagcaataaagttgtgtagccatggcagtgaaataatcagtcggtgacagacgatgcagctggtgaagaagatgaagatgcccattagtggcgacataataagccatccatgaaggcgaggataccggtcggtggtgacaaaagcaagccgacggtgaagatgtagacacgcatcaaaggtgatgacgaaatccaccaatcatgaagataaagaaaatagtcggcgacgacaaacgcaaccgacagtaatgatgataagcagcaatcatagatgatcaaatataatgacgaagttgcccatcaatagcagtagagtgggctatgttgaagaggcttgacaggatgttgatgaagataacaatgtcggtgatccagtcaatagcaaccgtgaaagtgaaataataagtcggcgaagacatagtcatccattagcaacagagttgatgtcagggccgatgaagcagaggtgctggtgaggatgtcagtgacaataatccatcaaattggtgttatagctgttgcagatgcttcacttggaggaaagtagatgatgttgtccatcttgtcgaaactgaggtgattggttgataactctgctctaaagcaaagacgaagataatgactcctggaattgactcgttggctgattaattgattgcttcagcttgtcgaattttaagagtcttgtatttgtgtagcccccgactctttggttagttgggaaacaactgaacatagagtcgagaactgtagcttcttgtcgtcgaatagtcattgcttgattgaagatatgtgttgaagatgtccaagtagaaatcatgaatgttggagagccacttgttgtagtaaaataacacgacattgcatgccgagatgttgaggttcacaaagacgtcgtggttggtgaagtagcaaaacttgcgaagtagcagcaatagagtttgccggtgccgaagataataaatatgaagtcgctctaccatgatgacaaagttgcatcgccgtgatgaagtgaacacgagtcggcggcaacagaagcaaactggtagtgaagacgcgcagttgtgaagataaaagcaccagtcgacggcggcataacacgagtcggcggcagaaaacgatgatgtccatcagtagtggtagctgtataaaccagacgtagaggcgagggcactagtcaacagcagacgagatgaccggcggtgaagaagataaggctaatcaacactggtagaatcatgtagccatggaagtgaagaaaccagtcggcagccatggcaaacgtaggcagcttgtgttgaagatactgatgcctattagtagtgacagcgatgtagccagccgtgaagaagatagcatcagttggcgttataacaggccagccgtgcaggcggtgacaccagtcagcggcggatgcggtggccggtcggtgaagacgtagacgcccaccaacggcagcataataggccagccgtgcaggcggaaacaccagtcggaggcggcgaaggcaagccggtcggtgaagacgtagacgcccaacaacggcggcataataggccagccgtgcaggcgaaaacaccagtcggcggcggacgaggcggccggtcggtgaagacgtagacgcccaacaacggcggcataataggccagccgtgctggcggaaacaccagtcggcggcggcgaaggcaagccggtcggtgaagacgtggacgcccaacaacagcggcataaaggccagccgtgcaggcggaaacaccagtcggcggcggcgaaggcaagccggtcggtgaagacgtagacgcccaacaacggcggcataaaaggccagccgtgtaggcggaaacaccagtcggcggcagcgaaggcaagccggtcggtgaagacgtagacgcccaacaacggcggcataataggccaaccgtgcaggcgaaaacaccagtcggcggcggacgaggcggccggtggtgatgttctgactgatccattcctagagcgtaagagataagcttaaagccatgaatcccttttatgcatatctggatctggatcctgcagaacaaacatataggatgagtagtatctgatataaatataatactcgagaaaaaatcaagtattttaaaatatttataaatatgtatttctcctcttgtcaattttgatttccccgagcagatgactcattacgtttaaacgctctgcccaactagtcatagccaccaagcactgggagtcagcctaagcacttcccaaacatgcatatgagtgacatgagttcgtcattaatggaacaaagtttcacggatcggagtttactactcgggtacttttgcaattattaagagcagaaaataaatttatctcatctctatgcttttgatttattccgaataatacttagcaccttgcgttactcggtccatccaacgagcccccgggtgctaggaatcggcccaaaggcaaccatccattggcaaaccaaacggaaagcataggaagatagaactccataactcgataggtacttttgtactcagattatgtcgcaagcaatcaagataaatattataaaaaatatgatataacatctgtagcccccgactcactactcaatggaagaccaattggtgtagtgaggcagaggaaaaggaaaaatatcatataaagaataaaataaatgatgacttagctttgtaatattccccttggtgatggcggaagtggccaatgtgggaacaaagtcgtccatcaataacaatgaagacaccagtcggcggcgacgaaggcggtcgacggtgaaagcgaagatgcccactaatggcggcataataggtcagccgtgtaagcggaaacaccagtcgacggcagcgaaggtgagccaacggtgacgatgtagacatccaacaacggcggcataataggccagccgtgtaggcggaggcaccactcggcggcgacggaggcaagccggcggtgaagtcgtagacgcccaacagcggcggcataataggccagccgtgtaggcggaggcaccaatcggcggcgacggaggcaggccggtggtgaagtcgtagacgcccaacagcggcggcataataggccagctgtgtaggcggaggcaccactcggcggcgacggaggcaggccggcggtgaagtcgtagacgcccaacagcggcggcataataggccagccgtgtaggcggaggcaccactcagcggcgacggaggtaggccggcggtgaagtcgtagacgcccaacagcggcggcataataggccagccgtgtaggcagaggcaccactcggcggcgacggaggcaggccggcggtgaagtcgtaggcggaggcaccactcggcggcgacggaggcaggccggcggtgtagatgacgatgcccatcaacggtggtgtgaccaaccgaccgtataggcggggacaccagtcggcggcgacggaggcaggccggcggtgtagatgacgatgcccatcaacggtggtgtgaccaaccgaccgtataggcgaggacaccagtcggcggcgacggaggcaggccggtggtgaagtcgtagacgcccaacagcggcggcataataggccagccgtgcaggcggaaacaccagtcggcggcggcgaaggccagccggtcggtgaagacatggacgcccatgaacggtggtgtgaccgaccaaccgtataggcgatgacaccagtcggcggcgacggaggcaggccggcggtgaagtcgttgttgcgatcagcaatggcggtggcgaggacaagccggcggagtggactcgcggccgatcgaccggaaagctgagacgcctcgagtccatgaccagcatcaatcgcctcaatagtgccgcgtagttatatgcgaacaacaacaaaaaatagcaagaaattaatctgagattaaaaatcaatatgataaataatgataaaaatcagattgagtttccccctgactgatttggatcaagtcagagaagaggagcttgaagaagtggtcgacggaaaggaagtgaaaactcccaaagcgaaagcgaagtcggcgactcatgaaattgattccatcgcgctcgttgataggaaactcgacgcaacccctacctggcgcgccaactgtcgaaacatgaattcggcaataataaaagggggtagcgcacgagacctaaaagtggatggatgcagagacaaaggatttagacaggttcaggccctctcgatgagaggtaataccctactcctgtttggggatttgaatccgccgagtgtgtattgatctgacgatcaggttgtctcatgcccctagaggggctccctgccctccttatataggttgggggcagggttacaagatagaaaccttaaccaatacggtatcggtttcctaaatctactttacaatcttatcaaaccaggactttaggccgttccataatatacagggaaacgtaatacccaagtcatgatctgttacatatttcatatatataagttatcccctataactagtcggataaccatgccgtgtgggtatggggtacccataatctccatagttatgcacaaaatatgtaacagtgatatgtgtgacaataagtagagcaaagggaggtgaatagataactaataaatgattaaattggatgaataagtagcttcttgatccaattattattatctttatactaatatcatctaatggcttaaaattatcgatgatgtggcttgttgcatgtcttgctttattataggagaaaatgccccttagtgggtaccaattatatagaaaaagataggattaggaataatttttttcttaaaaataaagatgcgctagctaggttgtctcgccgtccatttgttgtagttccaggttcattgaatatgactgttcaataatagctcatttatggccagaaaaaaacacacatcagtaacctaagaa

SEQ ID NO: 23462 - DNA, 1035 bp, Oryza sativa
acaacagcggtcataaaggccagccgtgcaggcggaaacaccagtcggcggcggcaaaggcaagccggtcggtgaagacgtagacgcccaacaacagcggcataaaggccagccgtgcaggcgaaaacaccagtcggcggcggacgaggcggccggtcggtgaagacgtagacgcccaacaacggcggcataataggccagccgtgcaggcggaaacaccagtcggcggcggacgaggcggccggtcggtgaagacgtagacgcccaacaacggcggcataaaggccagccgtgcaggcggaaacaccagtcggtggcggcgaaggcaagccggtcggtgaagacgtagacgcccaacaacggcggcataaaggccagccgtgcaggcggaaacaccagtcggcggcggcgaaggcaagccggtcggtgaagacgtagacgcccaacaacagcggcataaaggccagccgtgcaggcgaaaacaccagtcggcggcggacgaggcggccggtcggtgaagacgtagacgcccaacaacggcggcataataggccagccgtgctggcggaaacaccagtcggcggcggcgaaggcaagccggtcggtgaagacgtggacgcccaacaacagcggcataaaggccagccgtgcaggcggaaacaccagtcggcggcggcgaaggcaagccggtcggtgaagacgtagacgcccaacaacagcggcataaaaggccagccgtgtaggcggaaacaccagtcggcggcagcgaaggcaagccggtcggtgaagacgtagacgcccaacaacggcggcataataggccaaccgtgcaggcgaaaacaccagtcggcggcggacgaggcggccggtggtgatgttctgactgatccattcctagagcgtaagagataagcttaaagccatgaatcccttttatgcatatctggatctggatcctgcagaacaaacatataggatgagtagtatctgatataaatataatactcgagaaaaaatcaatcatgaagtactgta

SEQ ID NO: 23463 - DNA, 767 bp, Oryza sativa
aataggacccatcccatatgatattgtaaaacaatgcaatatttaatagaaatgcgggacatttgtaaattgggtacaatatgatcaattgcaatgtatgacttgccttgctctcgcactgatggaaccacagcaacttcttcgagaaaccacgaatcgacgaaacgggcgaaatctacgcgaccaacaaagcacacaagcaaaacatgctataagtctactgaaacaggaaacaaaaccatttttaatggattctatacatttttatgaatttactgagacttaaatggacttaatcggagctcggatgaattacttatgatttttagaagattatctgtgtttttactaataaagaaaaagccttaatgtatttattgcgcaatattgccctagggctgacgtcagcaaggggtggggcggcgccgacatgcggaccccactggtcagcagctcaagggggagggaggggtactggcaggcggggcccaccgggcggcggctcatggggaaaggaggaaggcggcctggctcggctcggcttcaagccggccggccggttagggcgagggcggtggcggcaagcggccaccgacggcggtggccggcgagaagacggcggcggccggcgacgcgggcgacggtgcatcgcggcgacgcgtatgcggggagcggcggcgcgcgcgggaggaagagagagggagttctcaccggggttcggccggcgcgggaagagacgacggcaacggcgacggtgagcgaccgaa

SEQ ID NO: 23464 - DNA, 799 bp, Oryza sativa
aggccagccgtgtaggcggaggcaccactcggcggcgacggaggcaggccggcggtgaagtcgtagacgcccaacagcggcggcataataggccagccgtgtaggcggaggcaccactcggcggcgacggaggcaggccggcggtgaagtcgtagacgcccaacagcggcggcataataggccagccgtgtaggcggaggcaccactcggcggcgacggaggcaggccggcggtgaagtcgtagacgcccaacagcggcggcataataggccagccgtgtaggcggaggcaccactcggcggcgacggaggcaggccggcggtgaagtcgtagacgcccaacagcggcggcataataggccagccgtgtaggcggaggcaccactcggcggcgacggaggcaggccggcggtgaagtcgtagacgcccaacagcggcggcataataggccagccgtgtaggcggaggacaccagtcggcggcgacggaggcaggccggcggtgaagtcgtagacgcccaacagcggcggcataataggccagccgtgtaggcggaggcaccactcggcggcgacggaggcaggccggtggtgaagtcgtagacgcccaacagcggcggcataataggccagccgtgtaggcggaggcaccactcggcggcgacggaggcaggccggcggtgaagacgtagacgcccatgaacggtggtgtgaccgaccaaccgtataggcgatgacaccagtcggcggcgacggaggcaggccggcggtgaagtcgttgttgcgatcagcaatggcggt

SEQ ID NO: 23465 - DNA, 1633 bp, Oryza sativa
catggattcaaaggttaaagctatgatcaaacttctcaatgaagatgctgattcttttgcacgaagagcagagatgtactacaagaaacgcccagagctaatgaaactggtggaggagttctaccgagcttaccgtgcattggcagaaaggtatgatcaggccaccggtgcacttcgacaggcccataaatcaatttctgaagcatttcccaatcagatgccaccaatgtctgatgagtcacccgcttcttcgggccaagaagtggaaccacatactccagacctgtttactttcacccgtctcccttttgatttggatgacctgcagaaggatggagtaggtgtgtcaccacaacaattcacctccaagaggaatggtacacaccctgaggaagccagtgcactgccaaatcgaaaaggttttgatgtgaaagtgcgtaaaggcctaagctttggaagcccagaagttaaaggcagtgatgccatcagcaatgagatggtaaatttgcaacaagagatttcaagattattagctgagagcaacagcatgaaacaacagatattatcagaatctgagagggcaaacaaagctgaaaatgaaatccaggttctaaaggataccatcttgaaattgaattctgacaaagacacgttctgctgcaatataatcagtccactgagcggttatctactctggagtctgagctctctaaggcccaggatgacctcaagaagctaactgatgaaatggctacagaagttcagaagctgagtagcgctgaagcacgcaatagtgaaatacagtctgagcttgaggctttggatcaaaaggtgaagagcagcaagaagaacttgaacaaaagcagaaagaactgaaaagcttcaacttaaccttccaggaagaacaagataagcgcatgcaggctgaaagtgctctgctttcagaggggaaagaacttgctcaatgtcaagaagaagtacaaaggttgactaaggaaatccagatggcaaatgaaaagttgaatgagctcaagcagaccaaagtaaatcttgagaatgctgtttctgagttgaagaaagaagtcgagaatcttactgaacaaaaccgctcctccgagctgcttatacaagaacttcgcgatgaaattaattctctgaaggattcaaagaacgaacttcaaaatgaaatccaaagccttcggagcaccatttcacagttaaacaccgagaaggatgcaaccctatttcaacaccagcagtctgttgaaagagtatctgatctggaatctcaactcttgaagctacagcctgagctggaagaaattgaacagaaggttcagatgctgatgcaagatcttgaacagaagagacaggaagcagatagtgcccatgcccagctgcaagatgaatgcaataggcacacacaaactgaagcagatcttcacaggtttaagaatctgcattctcagttggaagaggaagtgataaagctgacagaaaatcttgacagatcaacaaaggaactggaagagttggaaaatgcaaagttagacctggaaaacacatcaagagagttaaaaagcacaatcttagatttaaactctgagaaggatgcagtacttctgcaacaaca

SEQ ID NO: 23466 - DNA, 4306 bp, Oryza sativa
ctgaatattcaagtgatagacttagcatctatactgcaagtagaaccttacagtgaaaaaacagtgcgtgtttactctgctgttgacactcgtgactatggtacacttatctagcttgtagagagagcttccagagctagttaatcaaaatttgggtttaggacactagcctagcacacaaatttgtagttgcagcattgccaaatgttttggacaaaacaatctcagttacttggaccaagaggcccatgcattaaaagaatcggactgggcctagcagttgggcatttggatgccatctcggcccttttcagcaaaatctatggcccagtcatgtactacctccgttccatattacttatcttttttagtttttgtttgtcaatgtttgatcattcgtcttattcaaaaaaatttagaattattatttattttgtttgtcatttgctttattatcaaaagtaatttacatatgacttatctttttttatatttgcactaatttttcaaataaaacgaatggtcaaacgttgcaaataaaaagtcaaaaacgtcatctattatgggacgaagggagtacaattgtatgcttaagattggtcttttttcttcggataagttcactctgggtccctctatttgtcacgctgtctgattttcatccctccgacacaaaaccgggtacgacgggtccccgaacttacagacccagttcaaagtaggtcctaaggcagtattgtgagcagtattgctgacgtggcgtccgacgtggagcgttgactcggttcacatgccgactcggacggccaccacgccaccatgagcaaggaagaggagcaagaggagatgggactcacgacggcggcgagggagatggagagcgtctgagcgtgcaggagatgcacggggaggcagaggcggagacggtggaggaggagaggacgccgcggacgagggcagagtaggtgccatggagctccacgggagccgggaggggtgcgccgacaccaaggccctggaagaagcgctgcgtccaatcgcgggactccaccaatgaaggcttccacggcaggaagggcgacggcggagagggagcggaatcaggccgagcaggcggagtggagcggctgcaacgtgggagaggatgaagacagagcaaccgcgccggggtcggatgtctggggcgaagacagtgccccggtggccggaggatcaccctctcctctagtcctcttaaggagcacgaccggcaaggaaggactactggcgcggcggccgcgccggcggttggcgaggaggagggtcggtgcagcgggacacggcggagaggaggggccgtagcacacggcaggcggaagactcctcgcgcccttctcttgccccgcacgcgctccatggactctcctccaagacaccgttcgccggcgacgtgtttgtcggatcgtcggcgggcggagcgaaccgacgacggcgaccccggttggaatcgacgaccgagggaggtggaggcagacgaattattgtaacagaaataacggaagcggttgagacttgagagttgagaccgtttggcggctgcggttggttgacgacgaagtgcagccggccgttgtcatggcgctgccatgtgcggcacgactcgcagccacagtccgaccaccttgggctctgccccttgcgccactccgtctccggcgacccgctcctaccctgaggagccccatctgcgcgtgtcggcaagcgctccgccagtggtaccttgtcgtcctccagtgccgcgcgttgtggctcccgtggcagtagcagctggctgggttgtcctcgaagacggagtagaggaagccatacacgaagcagaggagcacgtcaacaacgtccaggaaggcgaagacgaccatgtcttgtgcgggttgttcacctgcgcacgcgcctctcatcgcgcagtgttcgtcgcctccgccgccagcgtgtgaggggaggcagagggtaggggaagggttacggcgctccctttcgcgtacggatcgccccgccgccgagcttacgcgccgatccctcgccgcgcggtggtcgtcgtcggctgctttggttggcggtggcggccttgctagaagtgggcgcaaacaaagaaggccgttgcgcgtccgcggtggctggctagtcgatggcggccacgagcgttgtcggagaggggagagagatgaagagagggcgatagggagagaggaggaagaagagaagggggtgagaatgacatgtggggcccacgtgggcccaccatttttttaatttgtgaatgaaactcacatgtgggtcccacggggtttattatttttggatggaattgccacgtaagcgccacgtcaacgccacataggcactacgtcaaccaaaaccgctgtcaatactgccgagtgaccttgtttgcatggttttgtaagttgggggatgcgttgtacctggttttgtgctcaagggacgaatttcgaactcggtgacaaattgagggacctcaagtgaacttaatcctttttcttcttccccttccaagtaggcaaaaactagaaaggagtaaattcctgatgttaccatgtaaaattcagcttcagcattgctgttttttcatatacaagtacattgctcttactagttttatttctttactaggaaccaaaactgtagcccaacacaggccaggagttactccatggcacaaaagtaggaaggaagctatgtgatttagagtagttgacatgcaggacaaatgcatgtggtgttcatgtggagcatcaatcagtgtaagctagaacctcctgggctagcttcttgtaagaacactctcagtggtggtagggaatggaataataattgaggtggttgcccttgcccatggtctcaagacaaattcataatgagaagggaataaaccaggcattgttaatcattcagtaggggctttcagggggaaaccagccttggattggggtcacctttctcactcttctgtttcttggtttctttgggtcacctctttgctttgctcctttgttcttcagttgcaggtgtagtggctttcacttcaacctgatctccaacttattgctagtacatgtgtacagctactgtagaatcataaagtttcagaattagatgaaaaaaaatgcacaagagtggatggatctctgaaattgtcagtagcaacaaatgcaattacagttttgtagagtcagttctcttgctatagatgaaggtttagcaataggcgttataggtggtattctaagtagttttcttgagctgtgatttcgtagtttgcagatattcgtccagtaacctctgtaataattggttgtaactttttaaagcaaatgttggaatgaattccatattaaaaaaaaggcaaattatcttgctgtaacttgtaaggtctacattctaatatggatacagttgctcatcatactagaaactgacaacctaaacctacgaaaaaaaaactaaaaaacatgatcggttgatcatcttttgtcgctttctactacttcgtcgcggtgcaaccataaattcataccaaaataccctaatatgattaaggtattaagcaggaatcattggacagccaatccattgttctaatctatccagccagtacagttaatctgatcaaactagctgtacagtttgacaatacaaaaatggcccatccgacgtggaacaatcgagtagtgcagctgctagcagctatagcaagcggcaacaactttttggggccaataaataagtataggaatccatttgtcacatacacaatttaaaaatgcaattgcaattgcaattgcttttggttaattagtgttcatgcagttaggtcacacggccggagcaactgcccccaaaatttatgtattgcagcacttggcacggatggtagggtccaaacattaatattaatttttgggatctatgttaatgaagcactgacaagctggtcctctatgacctgttaataacaagatcattaggatgctggagatgttgctacagttggagcacataatcaagggtttatgcctaactgaaagcgtcgaaaatcacgccgcgggcttggcttagttcttttcaaattatttactgaattgttaaaatagattattcaatccacgcttcgaaaaattcattttgctcgaaattttttattctgttgtattgcttagactatctgttttaaattatttattaagtttatttatcaaaatatttactctgttcatacaaccaagtagatattcgcagcaacaatcagctc

SEQ ID NO: 23467 - DNA, 3279 bp, Oryza sativa
catctgagcttcagatttgaatggccagtactatcttgctcatcatatgagcaatgcttctcttgatgttagtcttgtagttgttttcctttttcttttgtggagtcagtggaaaatctcttctactaattagttaatggatggtacctgtaaaaagtccatatatttgatcatcaggttccttgttcaccacatgcaaatgatgtacatggaccaggtatgtaccttgtctggataggaaaaaggatcttggcatctatctgaacattcagagaacttctgaagatgactgaatatgaacatcatatggtatttttctgaactcatgtgagctgtctacacaaaaaaactttcataactacgatgtgcaaatgcagctcaccagttcatcggaaggagaaccttagttcggttcaggtcttcaggtctatcaacactgtccgttgttgacagagaattgacaaagctaactataggtgtttcagagcaggactggaaataaatttcctgatgcttctaagactcagagaactcatgatgaagctaaaccttttgagcccatttcaatagaagttgaggtcggtgtatccatatgggttgatatcggtgtaaccatatgagtagggcagcaattcttcgatgtccaattgcgagcttgaacaactcattttctgaattcggctgtgattgatcgattctacttctgcactaaacatgctgtagacaggcctatgatctgagaagcgggactctcctcgaacatatgagagttggctaagaccccttccataccataaaatgcggtcgcacctgtaaaacaagatcactgaaattgctgaactgtacgaaatatggcaaaaatctggcaatgtgctttacttaccatgctggagttctcctcttttctttctggttcatgtcatcccctgcatatctgtcggaattatttgagtatttgtaagtaggaggaaaatatatcctcccctcattccaaccaggaaatacgcggccgcctctttgctcgctcctcagctgaaagtataagcaattcatgccttctcatcacaattattcttggccttctgttttgccaaactaatgaagtcttgtaacgtcaccaaagcaaaagaatgacaggatataaagcaatgattgcctctgtcacaagcaaactactattggaagaattttaccactattggagatctgcattgtgtctttcaaagtgtgttgctaagctcatacctgatctttctcaagcaatgctttccaattgcgcatctccacaagagccttcaccgatcggtaggaaagcgctatccgataatttaggtccccaagccaaatgatccgactaagaaaatggcgaaggtgaaggatatattacacaatatttgtgattgcaagtttttaatttacaagagttgagggatgctaaggtgttttgcttactcatgctccaaaatagtctctggtgatctctcatactgtccataaaccattgggaacctggtttttctcaaaatttccatcacatcggagtttctgcggtgctcatcaccatccttctgccccgatgtgaggtgactacagacgaagcagaagcttgtttggtgcaacaacatgctaaccgaaatcgaaccctgggaaaaaaaacttctcattggtttacaaagcttctgaaacacaatttcttactcttttttcttcaaattcaataatggcaataagataggaatataacaccaaaaatcacaacagattattttaacataagttaccttatttccaagatagcccatcaatcctctccctacacaagacaccttgagatttcttatgtcactttttatttctctcctagcccaaaccatcaggaacaatccaaccatttgcttgctcgcaaccaagcagtacctaaatcacctcaaattttatttagaaaataaaaatcctaattaaatctcatcaaaactactgtaaattcgggataattccatgaaatcaagcttaattatcctgatgaaaggctgaaatttcaagatccaaagccaagaaatggtggtcacctagaatgggcggcgccgccattgctctcttccatgtacggcggcgcgccgtatccgtacgacatcggcgagaacaccgcgcttggcgactcgccgccgccgtcgtcgatctcgccgtcgtccgacgggtggccccaccggcagttggcctcgtagtcgctcggccggctgccgtacatgacgcggtcgttgacgctgtaccggcgctccagcctcggctgcgcgccgccgccgccgccgaggatgtcgccgtccatccggaggctccggctgagcccggcgttgaacgagcggcggtggaagaacgccgccgggttgttctgcctcgacgacgacccctcgaagtcgtcgtccatctccaccaccgggtccggcgccggcgacggcgtcctcatgcccccgccacctccgcctccgccgccaccgcccgtgcccgcgaggctgttcagcgtccgccgcaccagcgacacccacttcctcgccgggccattgtcctccgcgccgagcacgttgccggcgttcaacggcacgatctcctggaacctacacgtattgagttgcatttatcgaccagttcaatccaagctctgaccatattaaggaggccatcgtttaacttattgacagattaagcgaaatgatatatttattaacgtaaaataatttgtaaataaaatttttatatacgtgttattagcgatctaaaagcgaaggataaaaaataaactacgataaaaaaaacttcaaaatcagcataagctaaaagatgagactgtaagttgtatacactcactagttcaattcaaaaacttaaactgatgagaaaaaaacgagcaattcagtttatattccaacgctacgtttcaacggcaatggcgagaggcggcggcgtgtacgtacccgaggacgtagatgtcggccggcggcgaggtgcggagccagtcgtcgaggctcagcgaccccggcggcgcgcggccgcccacgttccacgtggcaacgaagatcctacataacgcaagaaacaacgaggacgacgacgacattgttacggatcaatggagatcggtgcagcagcaatggcggcgatcgccggagatatgcacacacgcgcacctgtagtccaacgtgacggtggcctccgcagcgtcgaggtcgatcttgctccggcgagaccgctcgtggctccgccgcgacgccctctctgcaacaa

SEQ ID NO: 23468 - DNA, 2342 bp, Oryza sativa
ctcatgcatgcatggccagcttgcccatatatatacacttgtccttccggtgagagagataatctattcctagagagaaacgcctagaggttttccggttagctccacaagttgatgggctaggtgacctagattcgaagtctcaccccttctaattatttgatatcaggtctttccctaatattcgcgcctttttgataatctcttcccaacaaacacacacatgcacagatcgagagggagagatcgtctcaccgctgcgttgagataaattccaacaggttttatatattatataagttattttaggtttgtcctgaggcaaacaactctgagtttgaccaaatctatagaaaatgtagcaacattcctaacataaaataaatatatcgtaaaaatgtattcaatgctagatttaattaaatttatttggtgttataaatattgctatcctttctacaaacatagttaaatttgatgaagtttagacaccaattcaggaataggaagaatgggggaattgaaatggtatacttctccaatcttacgtgaacaaaaaaaaaacacacatgaaagaaaatatatgaggcctttgatagtgccacacaaaaaacaaagaaaagtttacaaagagctcatacatcttggtgtttttcctacgaaagtgaagcatgggaatacaatcatatggaaagtcctatgaatcacaaggatatatcggaaaagtttaataaggaatgtaaatcctatgaaaatctcctttgccaaatctcataaatcaaaggagtttttaacttaagataaaacctagaatagcttataataattaatataaaacaggggggggtatatatatataggcttcagcgtgttcggtttggaggatcagaggagcttgtcttactaggaccatcagcaggtccaaacccgagccagatggtgttgtccaaggcggcaatatatggggcgtatcacgtatggtccagacgtctttttttcgaaaatataatataaatgcacactctcatatacacgtaagtacgtacactcatatggcaaaccaaacacattacatcagtcgcaggggaatggggtcataggtccagtaccaaatcagtccatgtaaatgcaagttctgcagttagtgtccctgaaaaaagaaaaggttcccgtaatttgtgatattgtaagcttgaacccccaaaatgctgcatgtttccacgccaaatttgatgcaaaaatgtcacaaaagagagcgcccctaaatcttcccaaaaaaaattttactcaacataaatgctgaggctatgtcgaatcatcgcgaattttttttatttataatttttttattaaaagttttacaaaaataattttccattttgaaaattgacggaagtagtcgcctaccgccctctgggagggcgatttttaaaaatcgccctcccagagggcggcgaaaatgacgtggcagccggccgttcgctctcgggcgacggccgtcaacgaaatttgcaggcggcccccttgccgccctccgctagggcgattttatactgtgcggggggccgcctgcaaatgggcggcgagggggcatggaattttgcaggcggcccccttgccgccctgggggagggcgatttttgcctccccctataaagcccagtccctcctctgtgaaatttcattatattcactaaaaatccaaaaaaaacgaaagagagagaggggagggcagcagaaggggagcggcgaagccctgctggttcgctcaattcatcacaggtatgctcccatacatcttttgcatttgtactaatatgttatgtttgagtatatatgttgcgttttagttttagttccatatattttagcacatctgtagcacacagcacatatgtgtagatccagagcatagaatataatagtatgaattgagacatagacagtagtgttaattgtaagatgtagtttagtttgatctggagaatgtaacgtaattttagaaatttagagaacaatattgtagagaatgtaacttagggcgtagtacagaaatgcgaggttaacgcagttattgttttcatcaggcacaatatcaagtaaggtcacatttcagatagttcacggtgaaggaaatattagatttggtccagatggtgttgatctgtcagattttgtaatgacatctaagggcatcgataggcctgcggagagaacatttcagtcaatttatagttggttgttgagaggatttagaatagaccaagaagtctacacaatgtcaatgtcagttgtagtgagtcgtgcaacagaaggttatttttgggaactaatgccgaggg

SEQ ID NO: 23469 - DNA, 3082 bp, Oryza sativa
tgttgtatcagagggtgatcatgtaccctgggagtataaggagaacgaggtaattgagggtgcaaggtatgctcataaggatgagatgaaggaggaggtgaagcattgggcagtttccttgcagagagagtttagggtggtcaagtcaacaaattatgtgtatgaagtgaggtgcatgaaggaagattgtccgtggcgtgtccatgcatataagggtaaatggaatgattattggaaagttagcattgtgaccgagcacaagtgctacttacaaggggtggagaagtatcaccgaaacatcacttcagcttttgtggcaagtgagatgtacagcagtgttgttggtaacattggctttgaaccaaaatcaattattaggcacatcgagaaaaaattcaagtacaccataagctatgcaaaggcctggagagccaaacaaaagatcattgagatgaggtatggcacatttgaagcttcttatgataatttgcctcgtttgttagccaccattgcccagaggaataataatacgtactatgacctacatacatttacatcggttgatgatcgaacaaagagtgtgctgcaaagagcctttttctcattgggtgcttgcatcaatgcttttgtgcattgtcgacctgttctatgcatagatggaacttttatgacaggtaaataccgaggtcagatattgacagcaattgggtgtgatgggaacaaccaggttctacctatggcttttgcatttgtagagagtgagaacctgaaaactggtactggttcctagagagagtgcacattgcagtggtgcgtatgaggcccaacgtttgccttatacatgatcatcatgcgggtatgttgcgggctattgactacttgaagaacggttgggatgagaagggacttccagctaagtggcctgatgttcggagtcggtggtgcatgcgtcacatgggtgcaaatttctacaagcaattcaagaataagcatcttatggagctttttaagaggctctgtgcacagaaccaagagaagaaatttaatgagttgtgggacaagttggatgagttgacaacgaagcaaacagatgagcaatctcgcagaccactagttgaaggtgacgagcctcccatacctcttggtgcattacatgatgacccaccaacaatgagaaggaggtcagggtcgtccatcagaaatttcactcagtggattgagaatgagcctaaggagaagtggtctctattgttcgacaccgatggatctcggtatggcataatgacaaccaatttggcagaggtgtacaactgggtaatgcgaggagttcgggtacttccattggttgctattgttgaattcatccttcacggcacgcaagcgtactttagggatcgatacaagaaaattggtccgtccatggccgataacaacatagtgtttggcaacgtagtgacaaagtacatggaagataaaatcaaaaaggcacggagacatcgagttgttgctcaaggcacacaagtgcatcggtatgaaataatgtgtgttgataggagcaggcgtggtatctatcgcaagcaagccgtgcaggaatgtgtcttgaaggcggatggtggatgtacctgcagttgtatgaagccgaagcttcatcaccttccttactcacacgttcttgctgctgccggtgattgtggcatatctcccaatgtgtacgtctcaaattatttcaggaaagaagcaatctttcatacatgaagtgaggagatatatgggttcgggatctcaggatcttacacaacgctgagtgcccaagttttttatattccagatccatctaagttaagggtgaaaagggtcgacgccaaactagacgcatcagaaatgatatggatgagtcagaagcaggtgggaggactttacgctgcagcaagtgtgatctgcgcggccatacttacaagaaatgcccgaagaatgcagaagttccaagcggcgcagatgctagtccatctggacaggcaagtgatggtaggcgaccacctggtgaaggaacaacaagcaggcgcgcaaggccaaggcgtcgtcgcgcagcaggcgattccatggtgtaacaatgctttcgatttaggaaataaaatgctgttgtgatgtaatgagtgttcggactaaatacttctatcgtgtaatttcaattcaatgttgttgtaatgagtacctccgactattgttgtactagtagtattgcgaactattcggtgttgtatcataatgttatcgtgatgactgttcggactaaacacttttgtttgtttgtactcttgtttaatatgtgttagtaattcgcttatgaacatttattacttatgttgaactaattatttatatgtttctgatcaacctatttgatgcaggtatggcgtacgacacaccggcgctgttgaaccgtgggattgacaggaaccaccgctcgttcctgtcagcagtcgagggtgcacagctcggcaccttccgtccacgcacgtcgcgcgagtggttgcgtgtcgacccccgtcacgttccttggtacgcgtatgttcacatttcaactcaactttgctttgtgttgtacttatgtttgaagtttgctctatacaggttgcgtgcggcaggccttctaccactttgtaggcttgttgaggcggcggcggacgaccgtgacccagcgaagcggtgggatgcagaccggtcactccttgccgctcttgtagaccgctggagacctgagacgcacatgttccaccttccctgtggggagatggctccgacactgcaggacgtgtcgtacctgctcgggctaccgctggcgggagcaccagttggtcccgtggacggtgtttttgggtggaaggaggatatcactgcgcgcttcgagcaggtgatgcgccttccacacctaggaccggccaacacccttcctccgtactctacagtcgggcctagcaaggcttggttgctccagttcactgtaagtaaataagttgttattatcatacatgcttatttgcgaccggatgagtgttttgtactaacatttcattcttaattg

SEQ ID NO: 23470 - DNA, 2223 bp, Oryza sativa
ggttgactcgacggggacagctagcaggcgcactttgggctccacgtgtacagcagtacgttgacgactgggtgttagctacagaggaggtgatcaacgagctcttcccacacacggaggagaactaccgtgactaccttcgctggtaccttcctcgcactcgtgcgcgtgtgaccttcactccagacgccccagagccgcacgttgccgctgtcacggacgcgtatcccacgcaccgtgaccgagactacttcgtggcggtacgtccaatttgtattacttcttacaattatttcatttatcttgcataatataggacaactactgaattttttatttccatcttgcataggctgatgccgcacgggatatcagtgccgatatcaccgcagtccaagtgaggttgaacagaggtttgcacttgactgacgttgagcagagggtgaccttcgaccggatgcaggagaagatgcgtgctgtcatgcgcgtcttctcctgtcgcagcgccgtggacgtcgtacctccagctggtccggtacaaccacggcctcgcgcgcctaccgtcggagcaggacctcgacctacggcacctgtttcgcacggtactgctcagcccagaggttttttaagttttgtttctgtttttctacgaaaacatcaccccgtcgtaacttgatgttccatcctcgcaggacctcgtttgccttcgagcgcccctagcttcggagcagtgcgacctacagcaccggtttcgcacggtacagttcagcccagatattagttcatttttgtttcagcttttgcacgaatatgtcaccatgttttaactgcacgtttcctcatcgcaggacctcgtctgccttcgagcgcgttcgcaggcacgaccggcgcttccgcgagctccgcaggggcgttcgccacctcttcgggcgcgttcgccagctcttcctctcacggagcgtcgatccctcgcccacacggtactttactttttattactactgttaaatacttgtacgaaactgatggtccttgtccagcaggatttgcagccgggatcttcggtactggggcctcttcgtctcacgccggtaggactggtcctactagccagttctacgatgacgacttgcacggtgcacaccaccacgacgtactaggctcctctcagcttggaggagctccagaggcgcacactcaggagcagccagaggtcatacctgtacaggcaggacgggttggccgtgccgtacccccggaccgactcacgtactcccaggggcacattagggcgctaggtatgagggacaggggtaagaggcctcgtcagtagtgttctacctcttcagtccttatgtgaccgtttcttttggcttacaaacttgtaaagcagtactacttttgctattactactgcagtactacttgtgttcgtctcgtctacatagttcttttcattcatatggtactagaacaacttatgctcacgacaacacactttcggcgcttcacggtagtgtcagatccagtagcgcgcacagtccacaacagcacacatgaaaagcggattttcgagttatcactatcaactttcggcgctgcctgttgacataaagtgaatcacgcccacgcgtgatcgtcttgtcacatctaatgaataatgtatctcattgagttcacatatattgcagtgaaaacgacgctatataattgacaatctgaaggcaacctcttcatatcttctttcccactagcacaccacacacgaaaatggaagcctattcattggtaatacgtaatctagatttgagattatgtagaacattcttcactacaattttacattttggcagcaaaccaaatatgatcaaatgcaattttaccttaccaaatatttggtagtgccaaaacttgcttatattttggcactaacaaaatatttgtacggtaacaatccaaatatgccctaaaaaataataaaattgtattttaccagtcttggagattttaatcttgtatagttttcaatataaaaagatttgataactattgatatttatacaaaaatatagagcacagtataaaatcgccctcccccagggcggcaagggggccgcctgcaaaattccatgccccctcgccgcccatttgcaggcggcccccccacagtacaaaatcgccctagcggagggcggcaagggggccgcctgcaaaattccatgc

SEQ ID NO: 23471 - DNA, 9458 bp, Oryza sativa
atccacacttgtcaaaagatttctctaaacaataatctcctttaagccattatgaagtcaataaaccaatcagatagtcataggacatggaatacagatacagcagatccccaaatctcagaacgactaaacgaaatagatgtactttctacacaagtgtccacccaaaacatgattccaccaatagcatgtgaaagcgtaaaaaatggttaagcccaacaaggatggtcataaattttctgtagggtgagtttaactccatattccataatgcaattaagtaataatcaaggagtgaagtaaacaaactaaagtagttatcatttgggactatcatttatgcaattccttaccacatcaccacatgatgaatgcatagaaatcaatgctctctcaagcacatataagtccactgctttgtcctcaggaatagttgatatgaaactcagaccaaaatcaataagaacctggaatatgaacacattgagtggcacattaatagctcggatgtaagtcttgaattaaatgactcaagaaaatgcatgaactgacagaaaggaagttctacacacgagttgatttgtgttgttcttgattatcatatttgaagtggtcaaatcaccgtgaacaaggcctccatcatgtagtttgccaactgcatttcctatttgtgtggcgatgtcaatgagttgttcttcattgatcccgtttgacccaaatccaaggagtatatctttcacagataagccatccacatactcaaaggttaatgtatgcagaagtgggtccacggcataaagaactggagtgggaacaccaagctttcttgcttttgtcatgcatcgagcttcctacatattgaagagagaatcaagccaacacgaatttcagtcaacataagtagttgtgtgcaaccttttttagctaaatattgcagtttaccatattactacaactcaatcaatatttgaacacttttagcctttgatttatctaatacaaagaaaatcagagaaatgctctacacagaaaacaggaatatctaaaaataaagcatgttagttatggaaactgacagcatttaagcgtttaagagtcaactttgagtccaacaatgggtgtcggtacttctttgaaaaccgctctttgattacacacttccgtcccacaaatgttgaaacaaataccctctgcaacaaacaaaacaaactatgaacaaacaagtaaaagtaagaaactgcaactaaatatattgactcctgactcactccctccgccccctgcttcagtagcacaccaaaatcctgttgttgttcctgagttgagtccataagtataacgtgccctactgcccttcaatcgaaaactgcattggagaaagaaaaacgagcgaaataagatgtcagtcaaacaataaaaatcaaccatattgttgtgctttgtgaacaactttaacattaggagtagctgctcaagaagattataagttcatttccaaatcaataagtggggtggcttttctatttggcaataagaatagctgctttactgatataaaaacaagtttacattgaattaacaaatgcacatagtaatgtgaatggtttgcagtgcctttacagtaacagctctaacgaaactaaaccttaggtgattatgctcatgttcagaaaaaagatcgatgcctgagtgactggtaacacgttaacaagggttatcacaaaagaatttcagaatcaaatagtaacaagcaaatctactcaaacatggtagtacctagaccctctatttcctcgtggctgctctagcagctcccttctttcttgtctcaactgaaccaatcttcttcttttggaccaagcgcttattgctctgcgaactcagtttttgtgctgcacaaactggtctgaatacctctgttttcaggggatccaaaagatcctctgaacatcctaacataaagccattctttttagcatcatcccacaactcctttccattctcaaatctcccattcctacaaagcttttctataagaagatcataggtatgtgtgtccactaactgacacctcttcataagtctgaacatatcaagcccatggtcaactttctcagtcccgcatagaacgcctatgagaccatggaaaaactttgcagtcggaagcaccccactttcaagcatgtcatctacaagccttttccctctaataattctccctgttaaatacaggaccctgaccacaagatagtaactaacccagtcaggggagcaccctgcctttccttctctcatcaagtagaggattctgtatgattctttcactcttcttgctcgtcccaaacaagaaagcaagatgttgaggctagatgcatccggggtgacaccataggacctcatctccgataagacgtccatagcctcagtgacaagcgcagaagggttaaacttgaggttcctatggcacaggcagtgcagataatcattgaatgatggcaaacccagtggggtacacgaagacttgatatcatcaaggactctccgagcttccttcgcattcccatggacgcaccacccgtggagcatgctacgctgaacgatgctaaccatgggttctaccgagagctcgctcttgtggtgccacacgacgccctgcgcctcgcgagcatggcccttcatgcacaatgcctgcaccattgcaaggctgctcgaccacacgccttcccctccatcacccgcgtcgcgccgaggcagcaacctctgcctctccaagcctctaaacaaccgaacagcctcatcctccttccccaatttcacgagtgcctcgacgacaacggtgaacgtctccggggacatcctccggccatccttctccgcgtcggcgacggcgatcctcatcgcggtgaggtcccccatccgggcgagcgccgcgatcgcgctatccaacgcctcgtccccaattccaccggcgtccttggaccggcaccaggacaggaaccgcagcagcctcctccctgaacccatcctctcgctacacgcatcgatcaccctcgccaccatggccggcgacacggccacgcccaggcggtccagcgcgccgcccacctcgtcgaggctccccgccccggagcacacgacttcgcgcgccgccgcctccaggtcgctgcccgagcacagagcgcgacggcccaaggccaccatcgatctcctcgcgagcgtggccatcatggtcgtggctaggtcgggaggagagaagagggagggggggaatgggggaatggatgggttggtcgaggcgggagggagtggggactgaccttgacggctcacgaggatggtgatggttgtggtggttgcggttgctaccgtggctcgctccggtgatggcggcgacggcggctcttcgccggagaggagggggacgacggcggcgctggggcggaggcggaaggggaggaggaaaccctacctaaacctgattaactgcgaaggcaaatttgcacattgaaccttcacaatccttgattttggtgattaatcctcctaaccctttttggcttttgtgcttagaacctactagtaagtgtgaaattcgagcgaaatttatgtagttccaaacataacttccacaagaactgtacatagtttgtgtgtttctcgtttcaaatatgaatgaagtttcatgagaaaattgtagccatatactaccatcatgaaaatcatgatcagtgttagaaagtctgagttacccagtaactccaatttgcctcctttgctctatagatgaacgggaatatgtgtaacaatcatgtactaataaaatactccctccgaccctaaatatttgacgtcattgactttttaaaacatgtttgaccgttcatcttattaaaaaaaatttaagtaattcttaattcttttcctatcatttgattcattcttaaatatatttttatgtatacatataactttacatatttcacaaaagtttttaaataagatgaacggtcaaacatgttttaaaaaatcaacggcgtcaaatatttagggacggagggagtattagtctagtttctttagattttttgccacaaaatttgtcatggtatatgcactaataacagcaaagcgattgttctcctgcgcgcatcttgaagttgaacgctggaggataaatgaggggaatcaatcaggaagtaaagaattaagaagagtagcaactccttctaggccaacatttggcatcatttcctcatcaataaaggtgctggtacaagctaatgaaagaacaacacagcattagttttttttttttcctaaatcattgtcctcaatagctattcaaattccataagaaatctgactacctgaccaataagacctgtgtcacatcgggcaaacagagtgagttagcgactctgtccaaaaactggctatcaactctactcaatctccatcaactaaactccatgcagagccttcgatattcctcttatcgtatctggacttgttctgcagcaaccccctatcagtgaggccccagcctcatgccattttttgacatatgaaacaaaatcctcatttgaaatccctgagcattcctgcatggagtttcaaagagctgtattaatcgtatacacattaacataatgttagcttcagatatttgaatagaagatactatcattttgccatctcattctcatatatgggtataaagaaaaccaaattttatcctaatgacagtagaggttcctctgttttttttctttgaaatagttttttttcctaatatttgcaagtcaacacgaacacaataatgagtagctatattgtcaactttatcatgattcatttaactggtacttaccacccattcctttcttataggatcatagctctcaccactatttgggtatattaatattggtttacttgtcacctgcgcaacggaaagtataaatttattatgtggtcaatgatgtttagggatcaatacaaccgtaataggagttaccttccggatggataaaactaattcatggataaatcttgggggagtgcaattaataccaactgcagcaacttccttgcatgaatcggcaatagaggcacactctatcagggaatcaccacttactacattgactccatcctttgaagtgaaaccaaaccatgccggaatacgtaatttacactcctctagtagttcaacatatgcctgcaaaagatcatattatttcactgattgcaactacattgatcaggccaacaacgcttatttggttagtttgaaacagacgaactcctagttgaaatgtacactaaaagaaagttttcttgccagatttttttttacgtaactgccaaatccttttctataagtagaatcagcaaagaatgtggaagaaatgctgagcttcaacaaatcaaacataatttgtgcaacaaaaatactttttacagtatcccactgaccacggatcatggtttgaaatatatgtccagtattaaacaggtaatggactatgctatgttgactgaaatactccagtacaaaaagatgagtgttaactcagtatcaattgcattgccacttctatgtctatttatgttccttactactttaatctgcattacaatatacagttccactttccaaacatacctgagtctcaattttgtttggaatagtttcaaaaacaataacatcaggaccagcttcagcaaggacttgaagccttctcagatgaaagtttttgaggaactccaaagtgccctcattaccgtagtcaccactgcagaaaaatttagtcagatgtaaaatatctgaaagctctcaacggaatcagaaattcagaactgattcaggcaaaaagtttcctgaaccattaagcaaatactgatacagattgctcattaatttcattattgttaaccaacctatactcagagccatctgctaggtatgctccataagaaccaactgatgccgcaattagtattgggcgcttcctgtattttgttacgtctttggcttcgtccgaaccgttagaacatttttccaggtaaatagcccgtgcttcacatgctagttcaacactcctcctcaggaatgattcactttcctcctgagaaaatccctttgaaaggaagccctgaattgtggcctgtaatagcaatgttgcatgctaattagctgcttatcatcaactttacttgaaggatgtttgagaaaccaatgaatatatacctgatatgatcctgttatcagaacacttgccccagcttcaagatagtccaaatgaacctgttcaaacaaaggcaacgcgattactattcactcatgagttatgacatgcaatgttggaatcaacaaaaagaaaaaaagaacacccactataatatgtttcttatcagtatggcttcaagcttactccctccatcccaaaaaaaaccacactgattgtgtcacatcccgcacgtggttggtttattttggaacagagggagtacaccttgattcaggttaaaaaaaagaaatatttttctttttttttgttttttgctaaaccattgaactgaagttcttgcttcctgatttccttacacctagaaggctagctgagcacatatgacacagcaaccacactgtaaagtacaacaagtctacagagaaatcggatattgctggaaaggcgacagtgctctccttttccgcagcaaaaatcaggcattccacatccctgcagcatctaggcttctcagaacggcgagatagctcaagccacactgagacaaagctccaacacgggccaaaaaccatttcccccaataggccaatataatagattcggcattgcatcccccattgcacatccagcgaaccaaatacacacgagacacgacaagacgcgagacgaagcaagcaggtgtacgaatggatcaaccgagagcgcaaagggggagaggggcagatgaggaggaggcggaggcggaccttccggatgaggtcggggcaggtgaagaggcaccgggcgctccagagggcgtccttgaggtcggcgccgttagcctccagctccgtcgccagcccgccgtcaatcacggccgcgccgccgctcccccgcaggaactccgccatcatgtcggcgtggtactccccttgttgactcattttctccggcgatgtcggcggcgcgaggagcgggggagagagagaggaggagaggaaggcgttgggtcgtgtttgtgtggggtttaagacaggggagaggggggatcgtgtgggcccgcgttgtcagcggctgtggcccgcgttagcatgcgcattgtacatggacagctttgcagttgcaggtgggggcatatgaggttcattgtacgtggacgcggcagggaaggtcttttttttttttttttgcagccatatctatggcgtcatattttttatcaaaaaatagtcggtatatacttacattgtaagtccctaaattacatatataattttagtgtatttacaatgtaagtctcaaaattacatatgtaagtactaaaattacatatgtaaatttgaaaattacatatactaattacatatgtaagtggggtgtaaatgaggtgtaactactgtgtaagtggctaaaaaaaaatcgactgtagcatatggcgccatatttctagcaactccgttttttttaggttttcggacattggttccttgggtttaggctgtgggtaggactgtaggagtggcaaagagaagagggaagatacgtagaacaagttagtctatcgttaattgagtagagtattaattattttaggtttaagaaatggattaatatgttctcttaaataacttttttattgaaatattttgtaaaaaaaattaccgtttaaccgtttgaaaaacgtacacgcattaatcgataattttctttttattgtgtcgttcaaacgaacacatccttacactgtgttctccctaatttttaggagtgattggattttttttagtttatacttcttccgttcttaaatttgcattcaaattgtataccataacgtaggtattcttgcactaaatcctattattttcatcatttctatttctatggttccaaagacaatgagatgcttaaaaatcaatttaaaacttaaaattgacataaaatgataaaaagaatcgttttgacctaattttcgtacgtgctaaataacctaaaaatccttatgttttagaactgagaaagtatgagcttaattaaaatttttgaaacatagtaaaaacacagttaaaaacaaaccatcacattattaaaaggggcaattttattcgtatttttaatgtttactattgattttattcttcttttttaggttttcaattttgcccttattttttttctgaaacgaaccttagttttaaccctaatttgtatggacatattgacagtgttaaatcgttggcaaaaagacatccatacccttacttgctattgcaagtttgacaaaaaatttgatagaatataaacaaaatttgacataattgtgccacaaattgataaaatttggacacattttgacaaagaaaatgatagggcacaattttgacacatattttacacaagcagaactgtagcaagcatcacttagtcaagaaaatccaaatcacaagtcaagcaaatccactcccacagcactcccacagcatgttgctcctcccctgccacttcctcaaaatcaagcaatatccagtcccgaagtcgagtcgacaccaattgccatcgcattcacctcccccccctcccccggccaacttgttgtaggaccgcacctcccttgcactctgctcacggtgtggcaccgcagcctccggctcctcacgttgagccatggcctcctactcccagcactgagccgccattttcgtcgtctccttccctccgcttggcggccgagatgtcgctatcgcttcctctccatattgaaccctcgccgcttagctgagccatcacctcctgctcgtaccaagcccccgccgcgctcgcttcctccccgcgtggagccatcgccgccctcgcttccttcctatgcggtgtcgttgccgtggttgcatgctcctcacgccgagccatcggcactttctccacgcatggagctgccatcgctgtcacattctccccacgcggacctgcagccgctgcttccttcacacgctcaacaatagattggagaaggattgagaaaggattggagaagtagtttgcgacagattggctaaggggctatttggttcctagcgacactttgccattacttgccaatagaaattgccacaccttgcctaaggtgaggtgatcaaattgttagtcacaacttattaagcctaaaggaatcttgccacatttttttgaaccaaatgacacgtgggacccatttgttggaaaggaatc

SEQ ID NO: 23472 - DNA, 2712 bp, Oryza sativa
tgcagctactggagctagaaatcacacagaagagtgaaagtatggacagcctgacgttgagcctgaaagacgaaactgagaaagggttcaagctgaaacatcactcatgtcaatggagagtatgtatcctcagtctcaagaggaagtgaatagattgcatctagagattgatattcttaatttcaaattgaatgaattggaaaacttgccatctgaacttaatagcaccatcttacttctaaatgccgagcaaagatgctaccgatcttaagaaccagcagtccctggtgagaatatctgatctggagtctgaactctcaaagttgcaggctcaactggagaaaattgaagggaaagtacagatgctggagcaggaactcaaacataagaaagaagaagtggatagtctccaaatcagcatacaagatgaagcccataagcgcagtgaaggtgaagcagctctccttgcaatgacgaatcttaactctgagtctcaggaggaagtgaataggttgaccctggaaactaagaagctgaaagtgaagttaagtgaggtggagaacagtaatacagatcttgagaatatcgtagccaagcacacacaggatatccatgtccttcgtgaaaagaatgtttccactgaacttatgataaaagaacttcatcatgagttggatgccctgaaggaattgaatgtgaaacttgagagtgaaatggggttacatataggcgaaaaggaagcacttcagagagactttgcttgtcaaaaagaagagaagcaaaatctagaggggatacaccattctctcgctgaggaaatgagtactttaaaaagcagatcagcagcaaaccagaagttgattgaggacttgcagatcatgaacttaaaactgaaggaagtgtgtgcgaagaatgaggtagaaaaggcacttctctcagaaaaggttcaagaggtggagaagctttctgaagaattttcactcatggagaactcactttcagatgcaaatgctgaaatggattcactgagggagaagattaaagtgttagaaacttcagaaggctctctgaaggatgtaatttcctctcacgtttctgaaaaggctatccttacatcagatctagaaactcttggtaaaagttatgctgatatttcagagaaaaattctaacttggatatcttaatatctgatatgaaagctgagattgaaaatttgagaacaaagctgacagattctgaagaaacctgccaggctcaccttgcaaataactcagctctttctgatgaaaagaacaatgtgttctctcaggtaactactgaagttccttctgtaatagagataaattcttgctatgtttcttttaaaacttaaatccttgtatgtaattaacattattttgtcacttttgtttttcagctggagagcgttacagtggttatgaaagccctggaaagtaaacatgctgatttggaagacaagagctcctctttatcaagagagatgaatcttgcatatgatcaagtaagagaattgcaggatcagttaagagtaaaggatgaagaatatgaagcatttgttaagtcacatcaaacacaagtcaatgactttgaggagcagatctcttctctgcaaaagaaaagctattacatgaatgagttgcttgaacaggaacaggagaaccacatgagtgcatctattaatgtagtgatcttggagaactgtttggctgatttgaaagacaagaacgttgatcttttcaatgaatgccaaaagtttgcagaggcaaatcatgccgcagagatgttaatttcacagatgaaggatgaagccagatatcatcaagatgagaggaaatttttgctaattcatactgagaaactaagagaagggatttcacagcacatgaagatcctaaatatatgcaaggatctaggtcctgctaatatagcggaggacaaaattattttgcagactgtctcagatgaagcctccaacatcatgaaacttaaagagcaaagtgaagatgcaaacaggctcatgtacactgagctgacagttctcgcaacagttatgttgcaagtaggattggaactcagagatctgaatttgcagaagcgtgcccttgagaaagaattggaaactagggcagcagagttcattacattgcaaaataacaatgtccagatgttggagtggaacgaacagctgaagcaagagttacagcaaggctgtgaaagggaagaggttctgaaagctgaaatacttgttttacaagagaagctatcttgctcaagagagtcctaccagacttcacaaaatgaaattgtgagcttgactgagaaaaatgagaccttgtgtaaagaataccagtctttgattgagaactacaatgctttggaggatgagaatggaacccttctttcagaatgcatgaggctcgagcacttgtctttgttccttaggggccataacaatgaggtagcaactgcattgggatctcttactgatgagatggctttgttgagtgtaggtaaggatgaacttgattgcgaagtccaagagcttagcagaagaggtatgatgcttgaatcggaaaacaataacctaaaggagtattttatctacctgatagagattctcagcgctcagttagccctctcagagtttgatttgaatatcaacaaaagcatttgccaggagttggccagtg

SEQ ID NO: 23473 - DNA, 4506 bp, Oryza sativa
aactagcgttgtctacttctcacctccctatttaacagctatcttctttttttcataggaagatgcagaggtaccttttatgcaagagcgcaaccatgggccagaatctcaccccttgccggaaggaactccagagctacagcggttaattgcaagaatgggagcacttcaagttgctattttaaatgccaaagatcttcatgatcaggagtcaaccaagtctgctgctacgttggcagcagcacacagagatattcaagagcttaaagcaagaggcgggtcgcagatggaggcaagggaaatatactccgacaatgagaagctgaacaacgtcgagggctccaaagggaagcaggtacagatgatgaaggatatcgaacttgatcaaatatccacatgtccaccatatggcactggagctgcgctctacccacttaagaatggcgcgaatgctgggatggatgacgagatgctgcagctgtgggaagctgccgagaggagctgcaaaaaccaaacatccaaatcatcatcagctgagcacgacatagaagcggttgaggaggtgaagagtgagtacccttcctctgagctagcaaggggaagagaccttggaatcaataagcttgaggtgtcgacatcatctgtagagcctcatgagcaatggagcaacaatgtactggagaagctctcttctgatgctcagaggttgcagagcatccaagtgagcatcaaggagctgaagcggaaaatggggagcccatcaaacgggaaatcgcccatgaactccgaatacaacaccgtcagcactcagctactcgataccgagggatgtgtcttggaacagatcaattacaacaacaaattgacaaagcgggttgagaactatcctgcgctatcagatagcatgaacgcggagcaagaagggtaccccagtaggaggaaaatatccggacaggtccagaaaggatcggaaaacgtggggagattggaactggaacttcagaagatacagtatgtcctgctaaagcttgaagaggagcatgagtacaggaggctcaaggtctccgataagcgcactcgggttcttctgagggattatctgtatggaaggaaggagaagcgcggcggtgcgcagaagaaaaagaagagggcacctttctgtggctgtgtgcaatcaagaactgagacttgaaccattttgttctggcgggaaactagctataaaatgaaaagggaagatgagagatgtcagctccaagaggctgtagcactgctttgagcaggccatgttcttgggttcatccccattgtaattgagttagtattttagtgctcaaaacaaagcatatgtatctaaaattttggctttcctgtctaaatgaggccatctaagcttagttcaatatgttatagttttctttccatagcaaatatgatataggtataatatagcaaggcattttatttcaaactatgctgcatttgggtggcttctgcaattcatttttttccatcaaggtctcaggctacaaaaacaggtagttcgtctgagaattgctactctcattggattttgattctctttctgatagagtttcacatttcctgtggctcgctactgtcatgctctgaatgccaatgattctgctgcgtcttctgtgctttcaacgactgaacataacaatgtctatcttgtttgctggggtatcagatgacggcaggacatcaggctgtaaaaaaacatttaatttaaatttaaggacttaacgtttcctgtcaggcagtatgtgttcatgtcaataatcacaggaaagacatcgatagaccaatcttcatgtagaagttatgcaaatggattataattctttcaggttgaacgtttcagacgaatggtcacattcaaattacagtattcatgaattatttcagatgcaactaagcaatttaaacacaaatccactatgaatttagagtcgatgaatttactcacgaatgcagttctccatgaagagtgctccagggggagaaaagaaacacccaaaccttatcatttcatcaacttcgttacttgcaaactcatatcgcctaagcttcatgtcagtatctcctgtaagcaacatcttccggcttcaagattcagaaaggttatctctgtattcctttaggttaaagaattcagaaatgtagtaggtcgcccacgcgtgggcgactcggggggaaacctagcaccgccgctgccactctctcctcctctccctcccctcgcagctaccggagaaccgagcggccagctgggacggcggcggcaaggccaaacgtcgacggcgctatgtgcatggaaggcgggccggcgcgcggagcagaggttgaagacacggcgtggaggcggcagattcagcgccgccgcggctggatccggcctccccatgggtggatctggatctggccggagcaagccgctctcgggcagcgacgacgggaggcgaaggcggcggcgtctggtggctggcggcagctggtgaaggaggctagcgcgtgcgaagctgcgaccggcggcggtggagactggcacgcgcggaggacgcaatggccgccggcggcggaggcagtagaggcgtggctggcgacggcaaaaaccggcgtgtgcaaaggcgcggccggtggcagcggaggccggcgctcgtggaggccacggtggcagccgcagctgaagctggcgcgcgtggccggcaacaggagatgactaaacggcgcgatggagcggctgagggcggtgtaaagcctgtcggcggtggcgacgctcccggtggttggcagtggacggtgaggaggacggaggctgccgcagtgagagaatggaggcgacgacgatgcgaccaggcacccgttggaacacgagcgccctggtcgaggcggcgacgacggtcatgttgtgaggggggtgttgaagcctacggccttttgcggggaagaggggatccattcttttctcaccctctccctctccaacccaatcacgtgggtagcggaagctggtgcgcgtggccggcgacaggagacgactgaacggcgcgatggagcggctgagggcggtgtaaagcccgtcggcggtggcgacgctcccggtggtcggcagtggacggtgaggaggacggaggctgtcgcagtgagagaacggaggcgacgacgatgcgactaggcacccgttggaacacgcgcgccccggtcgaggcggcgacgacggtcatgttgtgaggggggtgttgaagcctacggccttttgtgggggaagaggggatccattcttctctcaccctctccctctccaacccaatcacgtgggtggacttgaagcacgacaagggttgagactcttctttgatggccggccggcggcgaggcgtcgacgtggtggttgcgcatcgaaggggattagatggtggttttgctgaactggcatgcactctttagcgcgggagagtagaacaatgggtgagccggcaatggcaacgcctgcgggcgtcgttttccccttggggcattgttgtgttttctatcgtttcccaatgggttcttcaggtgaaaacaacgtcctggttctcaaggacaggcggcggtggcgcttttggcgtcgttttcctccttggggcattgctgtgttttctatcgtttcccaatgggttcttcaggtgaaaacaacgtcctggttctctaggacaggcggcggtggcgcttttggcgtcgttttcctccttggggcattgctgtgttttctatcgtttcccaatgggtccttcaggtgaaaaccacgtcctggttctctaggacaggcggcagtggcgcttttggcatcgttttcctccttggaagcgtcgtttagaagacatattccttgggggtgttgtgtgcatattttgttttgttttagcagtatgatcaaacgtagacgcgtggtgtggtgaacgcacgaactttattagcttcaaaatgtttttatttcctgatacaatgcacaggctattctattcatcaattttcgttgtttgtattactatcatacgaaatctataaacaacatgtgatgtaattattattagtgccatattaaagttttcatcataaaagaattacacttaataattatttattaccttactgtgtggttttaaatcggtgtataacttttacctggtactcgtgacacatcctaaaactgtgaatttggaagagagcatgtccaaatttctacaactcccaactacctaatcacccataagcaaatatcatttaataggatattctagtattttaatcttacccagtagagaataatcccttatattatagaatgaagggaatatccgggaagttgggaagtatccagtgcaatagtacttctcggtgggagaatgcgatatcctattgctagcctttagatttgaaatggacgcggtagattggagcacttcctattctcttagttgacaaatgcaaaaaaaaggaccc

SEQ ID NO: 23474 - DNA, 4911 bp, Oryza sativa
gagtgaaggggagggccgcctatctccatctggcgagcagagcaagagcaagggaggggatcctggtgtggtgagcatccacatcctcttcatgattcatctctctctctcccaccgggactacttttgcctggaatttgctttgctttcgttaagctcctctcttaatttccgatacttaaccttaatacaagtagtaacagtttgtttgttcgtctcaagttggattctcgctgatgtttcttgaaattctctcagtttcttggtgcttcttgggaatttttcaggtgttgttgttgtcgttgttgctcgccggatgttggaggtctgctgctgctccggcgtcctcggcgggtcgccgccgtcgtcgaggactgcgggggtttcctcacctggactatcgccgtctcggcccagtaagcggcgaatcggccgcgcccgggtgcagccgcgcgcgccgccgccgtgcgacgagcggagggcggcggaggacgtcatccacgcgctcaggtcggcggatggccccgccgaggcgcttgagcggttcaggtcggcggcgcggaagcccagggtggcccacacgaccgcgtcgtgcaactacatgctcgagctcatgcgcggccatggccgggtcggggacatggccgaggtgttcgacgtaatgcagaggcagatcgtcaaggcgaacgtgggcacgttcgcggcgatcttcggagggcttggtgtggaggggggactccggagcgcgccggtggcgctgccggtcatgaaggaggccgggattgtcttgaacgcgtacacgtataatggcctggtttatttcttgtgaagtccgggtttgatagggaggcgttggaggtttatagggtgatgatggtggatggtgttgtgcctagtgtgagaacctactctgtgctgatggtggcgttcgggaagaggagggatgtcgagacggttctttggttgttgcgtgaaatggaggctcatggcgtgaagccgaatgtgtatagctacaccatctgtattcgagttcttggacaagccaaaagattcgatgaagcttatcggatacttgcgaaaatggagaatgaagggtgtaagccggatgtcattacccataccgtgcttatacaggttctttgcgatgctggccgtatcagtgatgccaaggatgttttttggaagatgaagaagagtgatcaaaaacctgatcgagtgacctacattactctgttagataagtttggtgacaatggtgactcgcaatcagtgatggaaatctggaatgcaatgaaagctgatgggtacaatgacaatgttgttgcttatacagcagttattgatgcattgtgccaagttgggagggtctttgaagctttggaaatgtttgatgagatgaaacaaaagggtatagtgcctgagcagtattcatacaactcgctgatatcggggtttcttaaagctgatagatttggtgatgccttagagctgtttaaacatatggatattcatggacctaaaccaaatggttacacacatgttcttttcataaattactatggaaaatctggtgaatctataaaggcaatacagagaaatgaactaatgaagagcaaagggattgtgccagatgttgttgctggtaatgctgttttgtttggtcttgccaaatctggtagacttggtatggtaaaaagggtatttcatgaattaaaagctatggtggtttcttcggatactatcacctacactatgatgatcaagtgttgtagtaaggcattaaaatttgatgaagctgtgaagattttctatgatatgattgaaaataattgtgttcctgatgttcttgccgtgaattctttgattgatacactctacaaggcaggcaggggtgatgaagcctggcggatcttttatcaactaaaagaaatgaatctagagccaacagatgggacttacaatacacttttggcaggattgggaagggaaggtaaagtcaaggaggtaatgcatctgcttgaagaaatgtaccacagtaattatcctcctaatttgataacatacaatacgattcttgactgtctctgcaagaacggggcagttaatgatgcacttgatatgctatacagtatgactacgaaaggatgcatacctgatctttcgtcttacaacactgttatatatggccttgttaaagaagaaagatataatgaggcattcagtattttttgtcagatgaagaaggttcttattccagattatgcaacactgtgtactatcctcccaagttttgtgaaaattggactgatgaaggaagctctgcatattatcaaggactacttcctccaacctggctccaaaacagataggtcttcatgccattcactaatggaagggatactgaagaaggctggcatcgaaaagtcaattgagtttgctgaaatcatagcatcaagtggtattaccttggatgatttctttttgtgcccattaattaagcatctctgtaagcagaagaaagctcttgaagcacatgaacttgtcaaagagttcaagagctttggagtttcactaaagaactggattatataattctttgatttgtgggcttgttgatgaaaacctaatagatattgctgaaggcttgtttgctgaaatgaaggaactcggttgtggtccagatgagtttacttacaacttacttcttgatgccatgggaaagtcaatgcggatagaggaaatgctaaaagttcaagaagagatgcatcgcaagggatatgaatcaacttatgttacttataacacaatcatttcaggtcttgtaaagtcaagaaggttggagcaggctattgatttgtactacaacctgatgagccaaggtttctcacccacaccatgcacatatggccctcttcttgatggtctgttaaaagctggaaggatagaagatgcagaaaatcttttcaatgagatgctggagtatggatgcaaggccaattgcactatctacaatatactactgaatggacatcgaatagctggtaatacagagaaggtctgtcatttgtttcaggatatggttgaccagggaataaacccagatataaaatcctacacgattattattgacacactctgcaaggcaggacagttaaatgatggtctaacatattttaggcaattattagaaatgggtcttgaacctgatctaattacttacaatttgctcattgatggtcttggaaaatcaaaaagattagaggaagcagtgtctctattcaatgagatgcagaagaagggaattgtcccgaacttgtacacttataattcactaattctccacttaggaaaagcagggaaggctgctgaagctgggaaaatgtatgaagagctactgacgaaaggctggaagcctaacgttttcacatataacgctcttattagggggtacagtgtttccggcagtactgatagtgcctatgctgcctatggtcggatgattgttggcgggtgcctacccaattcaagcacgtacatgcagctcccaaatcagctgtgactaactagttagtgactgaatgtacttcttctgtatagttttgtctataaaaggaaaaggatcaactgtagatagtccacttcaatatatctgagggttctgctggttcttgttctacactatatttttgtacttgatggaagaaaattattcaatacacagctgacttgatcacttgaatcatctgttcaatttaactgacattgtgaggttacagttgttaaactcttatcaagtccatccattatatgtggttcaagtacaactgatctgtgtgcacattacccattttctttctactggtatgtctcttcagccaaatgcttgtgacatagttcagttttactgcctgtataggtttactgatgtgtgcgcatctttaggaagttgagctagtggttcagtttcacagtgttacgctgcttagcaacaatcaactttttccctgattcacctttttctcatatgatatagcactgccaatggactgcttgagaaggttctctattgttgcaatacatggaaatgcagttagatgcttcctttccaaaagtttctttgttcacatgatagtgaattggtagcattttgcatactttgggtcaaaagatgtgctcatttcttgtagaccataattacaacactggaatggccaatttccttcatgaaaattttcaatgagcagccaatgcaaattcaaatttactatttcctttagtttggttgtgtctaatctgtaagtttatggtgatttttactagaaaaggtatcgctaagtttctgaaattattttcatttctcttcagtctagaactctagattaatttgttgatcttgcttatatgccaatttgtttgactatattttcctgttgtatctatgatatgctctctctttgttttggggtttatcatggtatatttctatattttatggtgttgagctgttgatcatgagaaagtaaacttgcatgttaaactgaagtaattgacagtttgacattcgtaataccttgatataccctgatcaaatgtatttttgttccaaactcaagctactactagggaacattcatcttgatctatttattcaaagctttcttgtggtgctcagttttgttttctggttttagattgtaattttgtctggtaacaagctcttcttttgatatttttccccttgaaattcaaagaaaggtgtattttgcttgcctacctaaagagaagtttgcagttctagttgaacagttgtgcatctgtgaagttcgttatggatgtcccctttaggatgcgtttggagtgaggtattgaactgaagaagctattaattttagtgacctaacttcttgagtg

SEQ ID NO: 23475 - DNA, 3800 bp, Oryza sativa
gctgtgatgcggttatgcccttttttcctgaggtatttttagaagaaaatttctacatgtttcatattgcattatcagggactcttcaaactgttcgtccccggaagctgtcggcacagtgaggaagcagatcaccagccatcgtagctatcacaatgccaaagagccaacaacaaaggtcagggtcttgatctcttgtatgcccagtaacaggttaatcctcctggctctctgtactgaaacaatttctctggatctctttcccttttgttttggaccttatacaacctgctgatggttaataatgatgttcttgaataatagatcatgttaagctgtttgcatggtctgctgctgtcaaatagttttatgcggtcacaactcttactaactgatcaggttgacttcaagcattgggctaaaaactaagattatgtaacttaaataacatatatgccatcatcttcaatttaagtgatattgtgtcaatcttctgatcaactgtttacatcttcgggttatgtagattcatgtcatcttcttttactctgaaatgctatatgagattggcagaatgtcctgatttcccaggcatggcgatggctgtccaagggctgcttaaggagagctgctgctggaaatgcccagcaaattgctgatggatggaggatgcataatcactcagtgtggtgaccatctgatttagcatggcgtatttcgcaaaaggtttgaaattcaaaacagtgtctcatcggatacgccatagtgattttcagtttctcttattggcgtacctctgcttgtggaaccctcctggatctgaatattgcattcccactgttccatctggcttctccttcaggccggcaaagcattgcaaaacagacctaacaaagattacttccccctatttgtcgtaagaaactttggatgttatgtagaacagaccttggtatatgcagttcttgaccataagttcactatctgtcttctgcttgtaataattgatccacctagaattacaaagtggtcttattatttcatctctgaaatcctcactacgaaagaaactggagaagactattgcaactgtcatcacagcgacctcagttttgcttcgacagcttcttgtcgcagtcctaacacttgtatatatgtacataccctaatcttaatcttgctccgttttaaatcttgtgctatcagtaatcaagtccagtttgagctatgaactgatctgtaattagatattacaatcaatacacgaggagaagaactgggcaaacaacgtgatgctggtataacttcatcaaatgttatattagaactcatatcacgtcacataagtgtacacagaaaactcaagtcacattctgatttttttttttctcggatcatgctagcagatgagatgaggaataaataagattggaaatatgttatgtaccagcgagaattcttcacattctgttttagtttgctccctcccaactgttagtttttcacttacagattcaagaaaattcaagctgaacgcttagattttagtatgatacatttcttttataaagggtaggaccccctgtcgttattgaaaccaaatgttggggatgcagaaatttcagggctagggatgccagctaaaattaaaggatacaaaagacctgcacatcagagttttgcagaccaaagaatctaacaacaacaggacctcacaggagaaacaataaggacaacacacacacacgaagacccagtctcctgaaaacactacatggtcaaatgtatatcaaatattgtgcaatctcaaacaggattaacttcttgtattaacttgtataaatggggagtgattctccctcccacaaaactctaaataaatttgttttcctgctctatcaatacacaaggcatagttcttgctttcttagaaaacattctcagtcaggatcgctttggagaatttgcatgaaaatgtttggcgtatcagtcgctatcgctactaaattcctcaagttttgctctatcctccatctgcaatagcacactcttaagactgaaaaaaggcatttcaataccgcactcgaagactgaaaaaagaagataaccttaaaaaaaagagagatcaactcagtttgcttaggattttttttgttcaattaattaccgttttattgcgagtttggcgagtaagtccactgtaaaattttacagaagaacttcacatcagtgaataactggggccacggcccacacccacccttcaacagttaagaaaggaagtcctctttctatgtatgtttcaattttgaagatgtatcacaaccaagcatgtctaaaagagatccagcgtcatattcaaagaacacagagtggtttaatattgtagcagcatgaagatgaggtacagcaaacgccaatctcatatcgcggtttccattgaattggaacttgaaagttgaaaatatgacaaaaacatcattgtgggaagaaaaaagagaataaacagtaatcatctcgaaggaaaacataaattggttgacagttccaaacagaaattggtgatgcggatctacttagctgctggtagaacccttggcatcccgcgtcgccgctccatccatcaccgccgcccgccggcgtcatccccggtctcggcgccgcgcttcttcggcccatccatccgccgtcgctcctcatccccaatcttccctcttcatccttccatctgcttttcaaccattgacatatcgtcgaacccatagtctgaatcagccgtaataaacaattgacgcatacagttgacgaacaagtcaatcaagtgttttgtagcgcaaatttgccagaaattccactcaactcgatattaccaaaactgcttgtccatcggttgaacgcgttcgctccctgcgcgcgcttaaccaccactccatccgtcccgccccacacaacctggggccgcatagttttgaattaaaaagaacagctacatcgtttttggccggtgccagtaggagaggcagtgttcaatacgtcagaggatatcgttgcgttgagagtgacacgcgagacgacgggactcaccttgtactctcgcggtggtctctctcgacagcaccatggtctgcggcaacgtcagcaccgtcgtccccatgttgcagcacaccagcatggccagggagcagaagttggtgctcgacgccgacgccgacgacgacgggttgcaccacaccggcgcaggcgggaagcagcagaagttggtgctcgacgccgccgccgacgggttgcacctcaccggcgtgggcgggaagcagcacaacttggtgctcgacgccggcgcgggcgggaagcagcagaaattggtgctcgacgccgccgacgacgggttgcacctcgccggcgtgggcgggaagcagcacaacttggtgctcgacgctggcacgggcaggaagcagcagaagttggtgctcgacgccgacgacgacgggttgcacctcgccggcgtgggcggaaagcagcacaacttggtgctcgacgccgccgacgacgggttgcacctccccggcgtgggcgggaagcagcacaacttggtggtcgacgccggcgcgggcgggaagcagcagaaattggtgctcgacgatgccgacgacgggttgcacctcgccggcgtgggcgggaagcagcacaacttggtggtcgacgccggcgcgagcgggaagcagcagaagttggtgctcgacgccgccgacgacgggttgcacctcgccggcgtgggcgagaagcagcacaacttggtgctg

SEQ ID NO: 23476 - DNA, 1683 bp, Oryza sativa
ggcgggaagcagcagaagttggtgctcgacgccgccgacgacgggttgcacctcgccggcgtgggcgggaagcagcacaacttggtggtcgacgccggcgcgggcgggaagcagcagaagttggtgctcgacgccgccgacgacgggttgcacctcgccggcgtgggcgggaagaagcacaacttggtgcttgacgccgcccccgacggattgcacctcgccggcgtgggcgggaagcagcacaacttggtgctcgacgccggcacgggcaggaagcagcagaagttggtgctcgaggacgacgggttgcaccacaccggcgcaggcaggaagcagcagaagttggtgctcgacgccgccaacgacgggttgcacctcgccggcgtgggcgggaagcagcacaacttggtgctcgacgccgccgacgacgggttgcacctcgccggtgtaggcgggaagcagcacaacttggtggtcgacgccggcgcgggcgcgaagcagcagaagttggtgctcgacgccgccgacgacgggttgcacctcgccggcgtgggcgggaagcagcacaacttggtgctcgacgccggcgcaggcgggaagcagcagaagttggtgctcgacgccgccgacgacgggttgcacctcgccggtgtgggctggaagcagcacaacttggtgctcgacgccggcgcgggcgggaagcagcagaagttggtgctcgacaccgccgtcgacgtgtcgcagcacaccgtcgggggcgcggagcagaacttgctgctcgacagcactgatgacgggttgcaccacaccggcgcaggcggggagcagaacttggtgatcgatgacgacatcgacgggtcgaaccacaccgtcgggggcgcggagcaagacgatgggttgcaccccaccggcgctggctgggagcagaacttggtgctctgcaccgacgtcgacgggttgctccacaccggcgcgggcggggagcagaacatggtctgcgacaacgttggcaccatcgtctccgggttgcacgacactatcgcgcgttgggagaggaacttggtgttcgacgacgtcggtacagccgttccctggttgcgccacaccggcgttgatgggaagcagaacttggtgtaccacctcgccacggccaccgtgcagagcgtgtggcgggagaattgcatggagcagttcaagctcgtgctggaagcgcttcatcaacctcatcgccacctctatatcgccgtcgacatggagttcgcagcggacgccgccaccaacgtgagccataggccagtaacctccatcagctgctaccaacacatgcgcaggtacgtgaacggaggtggcatttttcagatgggcctcacatttgcattcgtcggtgaaggcgaacaagctccctcgccgctgatagcactggagatcaacttcgacttcaacgtcaattcgccaaagtaccatggcaagtcgatagatttcctatccagtcaaggccatgatctcacgcagcacagcaaaagaggcgtcgcgccggagtttgtttacgaggggctcctgcgccacctcccgttcggcgacggctccgtcacctgggtcgcctttcacggcgactatgacttggctttcctcctccgcttgctgcaagggggagaccatggcggcaattgcctcctgccgcct

SEQ ID NO: 23477 - DNA, 1141 bp, Oryza sativa
gcagccctaatccccctcctctcctgcatataaatctctctccagctcgcctttgcaccatcgccattgctgcatcccagctaagctcgagagagaagcgagagagagagaaagagagagagaggttggtgcattgcggcaatggagatcgaggcggcgaagtgcgagtgctgcgggctgagggaggactgcacggtggagtacatcgccggggtgaaggccgacttcggcgggaggtggctgtgcgggctgtgctcggaggcggtgagggacgaggtggccaagaagggcggcggcggcggcggcggcgggcggcagctggaggacgccgtcagggaccacatgtccttctgcggcaagttctgccggaagaaccccgccttccgcgtcgccgacggcatgcgccagatgctccgccgccgctccagcgacatctccgccccctccggcgcctcctgatcatcacccatcaagctccggcgagagagatcaagctatgagctctgaacacgaagacgacgacgagcaattaatggcgccgcggcggcggagctaattaagctaagctagaggctaagctaagcttaagcttaagctgaaggcttaacgccatttttaacctcgaaatctcaatcaatcagctgcctcgtgtggagaagggtctccgttgaggtggtggtgccaagtgtgaagccttctttggcctagaagatggcttcttaaatcttaatgatgaacattattgttcgagttttggttaattgtagcaaggatgagattaatattgattcattgtacaaggagatgaatagaagttcaaccactgctgcaatgtagtattcagtggtttcatgaattcaattaatttgtttatattcttatcacttttaggattgtactccatttgtctcaaaatataaagatatctgaagttcttcatgaagattaagaaaataggcgaaattgaattagggatgatttatgactgttgatgtgagtaagtatgtagaacttcacggagattaagaaagtaggtgaaattgaattagggatacatgttactattgatgtgaataaatatgtgcagaaatttaatgaaaaattgttgcgattgattgagataagaaaatagatggagtaa

SEQ ID NO: 23478 - DNA, 4437 bp, Oryza sativa
ccgatcaaatcatcccatatttaactatacatactttctaatacccgtatggatcttcagaaatccacagtcattctttcgcatgagaaatagcaaaaccgttttttcagaaaaaactagagaaacaagtgttctgtgctctataaatagtcttagaagtgtggtgcaacatatatataaagatatactccctccgtcctataaaaagtccaactttggtattggatttttttttatagggggagtactgctttactaaagatgaaaataagaaaatctgactctgcactgcagaagtcacttcagatttggaagaactgttccagatgcttcatgcttgccattgagtagctactggctagcatcttgtctgtcacagttctactaagcacaatcatgttggctcatgtttttagtactactacagagcatgcaaggccaaatgccaatcatgaaaggaagatgatttgctgccaatcagcaaaagggaaagaaaaaaggaacaaaataaagaactatgctagtagagggacagatgctgagtaggactcaggtgcttggttagttggtttggcataattcaggctatgtatatacagtagtagcttaggagaaggataatctaaccatttgctcctttggaatactttgcataatctgattctgcctgagatgccaagcagaagggatggatccaaaatgccgagtcagatccacatttcaacatgtattcccctatgttagggtctcatcaatgcccctgtgtatgctttgttggctgcaatgatgatcataccctgtactgaatggccaagaaagcctagatccatggaacagtctaccaccagtggtcatgttcatgtaagctgtaaaattttcttcagattaacattatagtagatcaattgtccaacctcaagtttttactaggagtttgcatctgtctaaatacctgtttgtttgataggagtatgtctccgtctctaactgtactttggtctagacttgggcacatgatggtgaaagagacttgaccatcgatttctgtcgcgatgaaaatggtatgtctggcaagaggaatgtagaatttcagaagcgcatttgtgtcagctatgctgctgtttccatctctattttcacttttttctattatttttgctcgacaataaagaagccaataccggtttttacaggttatatccctgttaagtactacctccgtcccgaaatataagggattttgtgtggatgtgacatatactaatactatgattatgaacagaccctccatcccgaattaaaagggattttgtgtggatgtaacacatcctaatactacaaatataaactacgaatatgaacagaccttccgtcccgaaatataagggattttcgaaatataagggattttgtatgaatgtgacacattctaatactacgaatctggataaaaaagtatgtccaagtgtcacatccacctaaaatcccttatatttcaggacggagacaatatgaaactatttaaattactttcatgatacttgtatattacactgatactagaaatgttttcataatatatagattgatcaatatatcctaatagagagttatggtcaactctgtatcaaagagacggtaaaaattcaaaaatgtaaaaataatacatgttttaacagtattgatcaacattcctcctatataatgatataaacttctaagctggatagtggccagtgctcaaattgtagtagcttagttcaggtgcctggccttgctggcaagggccacgacagctgctatttcaggttcagaatcaaagcttcaagtttcaacctcccttagtaccatgtttagatggagtaatatctcaataacatgtaaatagcacaacaatcatcagcatttacatagttggatttgatcaaaccaataccagatcaactcagattgagaaattagaatataataaaaaattggctatcaatggcatttagttgtaatataaaacataataatattatatagttctgattaatgggatagtaacattatttgttaacactatgcctgctgatttacaccagaacatcaacatggacagccatctaagattggaattacattgacagaactaatactccagcaaagtgcttcttgactgctaggtggcaaacatagtaatgtagcaggaactaagacaggtaacttccaagtcttcacatagggtaaatatgaacagcaaagccaacctgcataagtacaggagtctaatatcaagcatctagtaagggaacaagcatttcacagaaatctgaaaaaacaaaatgaagcacaaacctaccatattgggacttgcatgttccgcagacatcattgtctaactttgttcctcaagaccatcgaggcttgaagagaagtagaaaactagagctcatgaaagcggaaagggattcggagggtgtatgatgatttgaatataggttggtactaaatgcaacttgtgaagagacatgagatgaatctagaatgaatgaaggtggagagaacatgtcatgatagatatgcagcaaactgggaaaaagttagtattgacatagaagggagcaagagaggggacagcttccatcttccacccagcttcttccttccaaaaagcagaagagccagtgaggagatatattggtgttctttgcagagcaccagggaggtcaggatggttgaagggtgagaatcagttagctaggaggttatatatatgcaaagaaatgcaagaaaagtagtttccctagaactatttaacatctgattggggtctaagatactagaatgtatgctatcgttaacaagctgccagactatgctattctacctgaaatgaactaaccgcagatgtttctgcactggcagagtgccactgtcagttcatcacaggtgccatggatgcaaataagattttatactacacctaaaacatcataggtgagcccaagctatgaaggtatgtcaactgccatccaccctatccttaccccactgtccaccttaacaacacctacatatgacagttttcactacccaactttcagaagatgcttcacctacaaaactccacctccaccataaccttgaccatacagtactacctaacttattattctcattactctatacactactatgcatgtgaacaactaaagtcagtggatgataacctatgtacacagacactacccttccatcctcccatcattcaatgatcggaaatatccagatggagaatcctcctaagattctccgtcgcaacagcagtttcattatcattgaagaagtcaaaccctgatccacccaccggcgaggaaggagccgatttagcatgcggcttcacctccacttcatcagaccgctcaaatagtggcaattcaagtgagatgctgcggttctgtcgcagagagaacttggggattgggagcgaactaggcaggtggtgaattggagaatgctgggcccgcccacagctcagggcgggatggaggagaagttgtttttgcttattgagatgggccggctacgcttgccaccacggcgctgcagctgttgctgctgctttggcgtcttaggctctggtgatgagtacctgcgaccacgcggaggtggtggggagggcaggaggccagcacatacaccggaatgaaaagaccggcagttcatgccacggaagccatgggagaacggcggcgatgagaagtgaggccccgtcatcttgcctcggccaccagagtgttggttatggtggttgcgctgctgtgagataaccacaagaccctccatcgtcggcgatggtgatgatgattgcggtgggcgtgaaagctcgacacttcgcgatataacttaggcagcttggagcagtaggtcacccaaagccctagtgcaaaacaaacataaacacactatgagaccaggtggcatccccttcactagtacaataaactgaagttagcgcaatcaactgtagttagagtaactacaacagaagaaaacaaaaaggacagtctttaaagctaagttcagcataatcgcaagacacaacgcttctaacagttgagaaacaaacagagaactatcactaacaatcacagcaccaactgggagtactaaatttctcagcgccacacatcaatccacaggaaaactaaagccgcgacgacgattagattcatgatgatactgtgagcaacaaattccacgggaagaaaagggattattccttttcgatgggggttaccttccagatctacagccgatgcgcaagtcgaatcctccacagaaatcgtcgtctccaccaaccaaccagactctcctcttcctctcctccgattctccgtcagatccaccacccacacggatcagcacacactgcatccatccacacgagca

SEQ ID NO: 23479 - DNA, 4484 bp, Oryza sativa
cgccccgaactagtaccgaccggaatagcccgtgacgctccaaattaacctgtaattcgatatcagtcccaggaaacagtgctggtatcacaggaagacagattatcacagcaacagaggtctctttaatatagagtagaggtacagtcatgttgggctgcggacagatcccgagctcacaactgcattacaaaagggaaacggaagccaggacttggaccaaacaacacaggcgcgacttgggaactaggccgaaaccctaaaactcatcgtagccggcttgctcctggaagaactccacatcagcaggatccgcttcatcttcttcagcaactagggggattatttatatagagcaagggtgagtacgggagtactcagcaagccaggggaaataagtgtttaatgcaggcttcaaggagaggctggtgtttttgcaattgattttatttgaactcttttctgaaacaactaaatgagtgcttctcaaacgacacggatgagacagtgcgtctcgtccggtcggagtatgtgcaatgtatcagtctttagattttgaaacgaggttggcacccggccaacagcttttcaaacggccactcgggccaacaactttcaaacggccacccgggcctagctgattccatcagctacagatttttcaaacatcgaacccctttccacaacagcaatttcacaagcagaagttaaacaaaactacgctaggaatcacctcacatccgcccatgaccgtgggcacggctgttcgaacagtttgttaacctctgcagagggggtacactttacccacacgacattactaacccggatcacccagcccgtggggatcagccacgtcgggagacctccaagctttcatgacaaggcatttccaaagccgacacaggtttaccatatgccgccgagaggggtcccagaccaacaacaggttaggtcccagaccatactgtgccaggaagcccaggggtcctccccgacaccacctcggcgaatccacatatctctcggcatcaaggctcccctgataagctagttactcagccaggggtgtcccattccacccatgtggtcgtacttgtcttatgtttggatgaaattccaaggaaacggtccttaagtgcaagagcgggaaaccgtacacccggtacgttccccggtccgcggttttggaaattcatttagttcgcaagcaccgacctaggtgtcgggttttccaagtcttttgtaaaacccaagttttacccaagttgtttttcagattttaagtttgaaggcgtccgtcgatactcgcactgggtgcacgaatatcgagacgcaactagatggttgcaaggggacatggtatcacaattaacaaaggacggatcaaatgcaacaaattaggtaggtctgccaatctgccttgcagacgggacaacagattaagtgcgatcctatcaatgcataatatttttcaagcaacataattaaatttcaaatataggctcaagatgttcaaaggtggcttgccttgctcgagatctggagcttgatcctcgaaatcctcgcactgcgggtcttcgggctccgaaactacacgcgaaacgggacaactcaacaaacagcgaaaataaagccctattaatgacctctaagcgtgtcattagatagatctcgagatttgaggaattttggaagttgaacggagtcaaacggacttacggttgggaagatattgaatttctaagattattggatttttgtctaaaggaaaaggatttaattaaatcctttttggaaaagaaaagaaaaaaaaagagggagggaaaatagacttccctcgggcggctagggcgcggcccgagagaaagggcggctcggccgagcttaacgggccggccggcccaagaaggcggcccagagcggcccaagacgcgcgcgcgcgggagggaggagagagagagccggtggaccgggctcaccacgcgcggtcccgggtgggacccgcttgtcagcggctcggctcaccgtgcggagggagcacgcggcgcggcgctagggtgggggagggacgcggtgcatgcgcgcggttcgcggtggatgcggatgcggaaaccgacttaggcggtcaaggcacgggctggcgctctggctagcggccaaaacggcgacaggaggtgacgccggcgagagggaaaaaggggaaaagagggagagaaaaggggagcttgcctctttggggaaaaggaggaggggagcgggggcgtcgcggcagagggaggagggctctgcctccgtcccttggcggcttgcgcgcggagaggcggggccaaggcgatgacgacggcgatgacggcggggtggtgtggagcggagcggcgacacgagcgacaggcgcggcaggcgctgacgacggcggcgaccaggcggttggccaccacggcacgcgcgcgcgggaagcaacgggcggcgcggcggtttgagcggcgcggctcgggcacgcgcgctggctgcggggctgagcggctgcaggcgcggcagggtagcggggccgggcgacgcggacggcgcagacgcgactcgggcgacgaccacgcgggcgcgcgcgcgaacgacgcgcggggagcgacagcgagggagcggagagggaggactcggctcggcgcggagggctcacgcgcacgcgcgcgggcagagcggagggggaggggcgctcggcgcggccctcgcgcacgcgcgcgcggcgcgcgggcggagcggggtaagggagagagagagagagagagagcgccggggaaggaagggggagatgggccgagagggattcggcccatcgaccctggggaggcaaaatagacttttgcggagggatttgatttggaaggatttggattcggaatttaactcgacgatagatcggggatttgagatcttgagatggcacggacactagacaacaagcgaagaaacaaatttcgcaattagggtttttaagagataattttcccgctagacgccacgacggaacgggcgctacagaccaacccccctaacaagaatctcgaccccgagattcagcacctaagggagcagctccgggaactcggcgtggagaagatcttctcgttcccaggttgcctcatcttcagaatggttgctccattgaactttgtagaacttgatggtcttccttcgagtctgacgttctgcctcttcaagaaccttgatcggtctttccttgtaggtcagattcttttccagctcgatattacccagggggacttgctcttctggaactcgaagacatttctttaactgggatacgtggaacacgttgtgcacatctgcgagaccttcaggtaactcaagctgataagccacttcgccacgtctggcggttatgaggtaggggccaatgtagcggggtgctaacttgccggacatcccaaaccttctcataccacggagaggtgatacccgcaggtacacatgatctccttcttcgaactcaaggtcacgcctccgattgtcagcgtaattcttttggcggttctgcgctgtctttaaacgttctcggatcagcttaacttgttcttctgctgccttgagtatgtcaggaccgaataccagcgcttcgcccacctcattccagcacaagggggtgcgacactttcttccgaacattgcctcattcggcgacatctgaatactggcctggtaactgttgttgtatgagaactcagcatacggcaaacaacgatcccaagtgcctttgaaatccagggcacacgcacgtagcatgtcttctaggatttggtttaccctttctgtctgaccatcggtctgctgatggtaggctttactaaaatttagatcggttccgagagcttcatgcaactgcttccagaaccttgaggtgaactgagtgcctcggtctgacacgatcttcttggggcagccaaatctacatacgacatgggtcatgtagagttctgctagtttctttccatcataggtggttttcactggcacgaaatgagccgatttcgtgagtcgatccacgattacccagatggagtcgtacccgctaggggttcttggcaaaccggtgatgaaatccattccgatttcttcccatttccactcgggaattggtaggggctgtagcagaccagctggcctctggtgctctgccttgactctttggcaaatgtcacacaaggctacgtattctgcgacatctcgcttcattccagcccaccagaagtatgccttgatatcttggtacatcttcgtacttcctggatgaatggagtaggcggactcatgagcttcctttaggatgagatctcttaattccttcttggccagtacacagatgcgtggaccgcaccaaactgtgccttgatcgtctatggagaaattggtatctttcttctcttgtattctttttattaactcttttatcccttcgtcgtctttct

SEQ ID NO: 23480 - DNA, 2105 bp, Oryza sativa
tggatagaggataccatattcagattttactagcccaacttgttcctgaagcttatctgataatagcttgagtaattctctcgcatctaactcaagccttgcaaagctcttatctttgaagaatgaaatatagtttagcatttgactgtcagtacatacagatttgttcgaggaacctgaattaacaggcttggttttctcataaggaagataaattttgttgttttcaactgcttcaagaactgctttagctgcttcaagtgaacgtttcgtatttttaccctttttaagcatatccaatatcatatccactgcagaatccagatctccaaatttcaagtggcaggagagcaagcaatcataaaactgcctgagctctgattcactaaggccacaggcctcattaacatgtctcctcagcttctggatctcatctctgtgcccattctgttcatatatccgggccataacaatcaacgagctgacgtcaggcttcaaccctatcctaggcattaattcaagaagctgctccgccttttttgtagtgccaaacagaagggatgcagtcagaattatgttgaaggtcaatgaattgggcttcattaatagcaatggacggttgctcttcttccgtggatcaaccctattattctggaaaaggtagccaatctccattaccatgtcagcagcaagaaatgcaccagttgcagtttggcacatatgcgccacgatagccgaccatgctgcaacaggtgggtatgcttccatctttatcaacttcctcacaacatttatagaaagattaggaagagaagaccgtgcgagtgcaagagagaggaaaataaggggctccttctccaacagtttgctcttctcttcaaatgcatgattaaccacattgtaggactggttcagccagtgagcatcacaggtctctgcgaagccagtgatgagcttactcaaaacagactttctggggactccatccatgtgaatatgcttctcataagccctccatgcatcatcaaacctctgctgatcaattgcattctctatctccaatgctagcagggatgggtcatgagcttggaccagaattgtttcagtaagagttgataagcatggaccataactaccaatatttagctttgtgttcaggaacccaattgcaccagtccggttagtccaacaacacttggagcccaagaaatgtgggctttcatgaccaatcaaatgtcttggacccaccaggaatgaagaaacagcacgggttgaagatcttgaacaaattctcccaacacgaagcatttgcctgccatggacaaggaggatcacacaacagaacaaaaagaactcagactaatatagcaaatgttagaattctgcatcgtgttagctggattcaacaaaataactagcaagcaaataatgtattggacacatggttgatgcattattcagtgttactcctcccatcctctgcccaattacaacaaggcaatcacaacagaacccaaaagagatatgcaatgcaaactataaagatctgttattgtggaacattgttgcaactaaagggagcttgcaagggtacaataaccacagccagaatcatcagtctgggttaatcaaaccaccccagtgcatgtccactaattagggaagattgtccttcagcctgataaaccagccccagtgctgtccgctaagcagggcggaatgccactcagactagataattgagtgacatttcgcagagaagctcaattgcaatgtacatagagaagaaaatctaaaagaaaatgtcataaagtttctctcatagtgttcctctagaacaagcttgcaaacaatgctactctacaaaccgcaaatttgctctaacagcactcctaaactcttctgtttctcactacccagcattctattatattagttcccatctaattcccttttcctcaacataaaacctccaccaccaccagcgccctaagcgattccagcattctagcaccacacagcagtagaggagccatgaaattttcattgagtgcgtgtcacaatgactcacaaagattgattttacacaatacaatctgcgccaa

SEQ ID NO: 23481 - DNA, 2480 bp, Oryza sativa
ggcagccaccgagtcaggagtgccgcgcgcaggacgggggtgaggcggcgcgcaggctcacgagccgcgacggcgggctacgcgtgagcagagcgcgagcatgccagagtccgcgtccgcgtccgccgcgaggggaggggatcccggcgacggcgagccggcggcgcgcgccgcctctctctctctccgacgcagcgtgcgccggccggagaagacgagtgggctgaaataaaacgaaacgccaggcagatgtaagattgggcttttgttatcgtcctagtgggcctaccgaagcccaagtttgttacaaaagcccatgtaggcccatccgatgggctgggacttaatcgcacggcccagctaggttttagaaaacaaatcggcctgaactaggataaaaatcaagtttcgttgaaaacaaaatcttttcaattttggaggaaaacagaggactgataaattgataatactagcaagttctggatcgagaggcaaagagctcatctgaaccatattttttttatgctgttgagtgctactattgcttatccaattgaaaaccatggtccatgattttctttctggatttttgtactgttctttttttaggttgttctcaatgactttggataattctctgttaatacatatagctaatactctcgattcatgtttcaacaaaagcaaattatggttttttttcctacaagaaccattaacaacatgttcagatgattcagatttcctctctaacaaaagatttacaaagcatccatgcacagaattgcttgtaaaactgaacagctatcagcaataagctagaggcagagaccaaatgcaacactgtacacttgctgcttagagatggacagtccaatcaatccgtaccactattaccacactgacccactagcactgccattagtgctggtcactagcactaatgacatcactgacatgcaaatcatggaacgcaacagttgcatgaaccactcttatacatacttaaacaaaaacagggacaatgccaatctctgaaggcgacatggatctcaactctgaagtctgaacactagctcctaattgctcacctaatgagcttagctaccactctacaagaaccagaaaagggagcagattaattaagatgatctgacaaagaccaaatatctgaacatttgccatttggaattgaggagggagaggccttgagccacttccagtttcaggatcacgctgatcttcttctccaatttctgaaaattaacctggctgattgaatcagcaagttggagtttacaaaatagaagatctggcgagtcgatcggtgtcagagttcttcgatgccctcgtcgaatagcatctcgtggtagcggcattcgtggctgcagaaggccttctcacccctgaattaagaagaagaagatcaggcattctgatattcagaattggtcactttatcaattcttctgtagataatgatcacttgatcaaatggcatcaaacagtgtgaagaacttaacaatatttgtagtatctttttgcaagtgccaggtgatacttgacagtagtttaattagttagttggcgatgtggttatcaatgtgcataaatgtccatattaaactctatggaagtacagacatgataggcttttcactgaatcatcaccgtcgccaaattgcttagagcatcaggaaagttttaattcattgtaaattaactccaaattgcttagagcatcaggaaagctttaattaattttaaattaactaatcaagcaggtttatagatgagacatacttttcggcttttcgctcattatctttctttcagaaaaaaaatcaactccaaaaaacttaaaaagatttttcaaatctttgatattgaaaatgatactgaaatctgaaggtgatcggatgaacactctattcagttcagagaaatgaagagtagagtgacctgtacatgaagatgtccttgcctaggccaaggtccttgctgcagccatggcagtagcgcaagaagtcgccgtcgccgtcgtcgtcgcccttgccggcggcgctcggtggccagagctccggcgggaagtactcgccgtcgccggagctctcgacgacgcggttgtcgaagatgtgcgtcgtcctcgggttggccccgcgcgcgatgacgcaggtgtagtcctccgacatctcctccatcatctccctcggcgacatccaccggcggcgaggaggaggcgcgtactgcacggcggcgccgccgctcttgacgccgaactccgtgcacggcgcgtagtagttcgtctggacccggagcctgatctgcccggtcaggacagacgacgccgcggcgtcgccgggggcggcgtcgacctctccgtcgtcgtcgtcctcgtcgtcgttcaaggcgccgacgagcccgagcccgacgggcctcgtcgcgtcccaagggcggtgggtcctgcactgtccatcccc

SEQ ID NO: 23482 - DNA, 2216 bp, Oryza sativa
cgccgccgccgccgaccgccgtgatcaaacgcaatctcgtgctgctgcttgttgctgcctccactactgctacttggcttagctctcttcctcaacatgctaatactagcatcaaaatcaataattaccacagcaataatcctgcaaaagaatcaacgccatgaacgcatcagaagattgtgcaagaaccagtgggagatctcgtggacggacgcatgcatacacgcgcgatgaacaagatgaaagaaatcgatttcgtttacctgcagctagctaggctagccaagcatgcagagctggctgttatcttcagttttcgcaggagatcagcagcatgtacagtgtgtgtagctagctacgatgtcgccattagcgaagctccagtggtgtctgttaaatacatgcatgcagatgcagttgatgcagtgcagctaagcttctctccggttttgactgcagctggatatatggaacgcgagcaggtaagcgagctagctaggccctagaggactgtgcaacacactgacacgtgggaccgagggtgtggcagggatgggcgagaaaatataatgtggaaactacgtatataaaatgtaaacctggaaactaccgttgaataaaaaaaatagacgtatgatattagtccacatcatcacgggtaaaaattttacttgcagattcacttagagtaaaattttaactcatgatgacgtggacgaatctcgaacgtccatttttcgatccaacggtaatttccaagtttccactacgcatatagagtttgcactacatattttcctgtgatgggcggatggcccctcttgttgaaactcaatttttaaaattgattttgagcactttagttattataatctattttccggatttagcttttaaaccgctaataatacaaaggcaaaattagttccacaccatcaagcgttcccccacttttactttatatcactaaacgttcccggtacactttaataccacccaaaatttgctatgactgttagatattgtttttttccttttatttttggctgaaatatgaagggatacaaccatattacccatgcgctacacatctaaaacatgagccctaatcaattctttttatcgatcgtcgggcattgcgcattagagaagcagcacgagcggtggcgcgcataggagaagcacggcgagcggcttctagggcaagacgtacgaacgactccggcgggagttgtaaaacaatcctagagttcattattagttgacgttagagccttaactgtttgtatgaaaaataaatgacgttttagctttggtggggttagtttggactaatctgagaaaattgatattttaccatcttcgggatagggtttccctggaatgctactcccgaatatggcttcgttaaaatgtcactttcaaacaaagccaactcgctaaaatgccatttcgaccaatttaggttatttcgaaatgttttcaccgtgatccgacatatttgcccctagccatttcgttgacttgcgtgagaaaggggatcgatcccacccagtcgtcttcttcctcccatcttgccgccggcaaccaccacttcttccaactccccctttccatcttccccttccttgccggccacgcctatctcaccacgccttcctctccggtgaccacctcggccgtcgcgccgccaaagaggaattgtgaggtgtccgtgtccatgtccatggttgcgtcggcgtcggcagtccggccgccgatgacgtgagggacgtcgtcgctgccacacaacctccgcgggtcgcccatgtgcgggagctccatgcgcaggtgctcaagcaagggctccacctcaacctgcgctccgcggcgaggctggtgtccgcctacgcgctactccgtctcctcccgcgtcttcaacgcggtccaggacccgcacgccgacgccttcctcgccaacaccttgctccgtgcctacgtgctcggcggcgcgccacaggacacgctcaccacgttctccgccatgctgcgcagggggcatggcgaggcactcaaggaggaggtcgtcggagaggacgaagataggagccgacgacgtgggaggcgatagttgcgaggtggagcaaagactgacaagggcattttggtcgcaacaagagagcaaaatggtggaaaacatatcggaatcacctaaaatgctcgaaatggcattccag

SEQ ID NO: 23483 - DNA, 914 bp, Oryza sativa
caatactatgatcagggctcattttgaactaagggttttaaaacatttttgtaggatttcatataaagtatttagctttcgaagaaaatacttgtgttctaaacgagcccttatttggtacttcctccgtcccataaaaaaccaatctagtactattttgcatatactattttgcgtggaataccatgaattgtggctaatgttacttgagtggcttgatggatcaattccctgatgtgcttgccatttggatcgaccttgtcagcaaacaagtacatgaaagtgaagggtgttatcgatcgaagcctccaatctagcgcatcaaggactagaagctccatccgaaaaattgtccgatgctcaaatatgtatcttgcatcctccatctgtaaatgtacaacaatgtgcatgtatgcatgttgtaagaaagtattttcgtaaaggaagtactatcagaccctaggatgaattaatattgacagaaacaatgcaaatataccataaatggaacaaatatttggttaagagcacttaggccacctttggaacacaagaatcgtaaacggcaggaatagaagaaaaaggattttggtagaaatgcatatgcaaaatagagaaatagaaaacacatgatgaatggttatttggaaagaccataagaaatgcacaagaattgaatgagagagatagactcaaataaatttttcacgaggttgaatcccatgctaacttttctccaacatcttcatggattgagccattaaaaaaatcatagatccagtcctttgtttaaaggaccatttttttaaaaaataactataggattaaaatcctaaaaagaattcttcattttcctttgttccaaagaggatttaattgagatcaaaacatcaatgtgattgagtgattggttt

SEQ ID NO: 23484 - DNA, 6746 bp, Oryza sativa
  unsure (1)..(6746): unsure at all n locations
ttcctgcaccccggcaattgctatttgtctacctgcacctcaatgggaaaaaaaaatgcagttttaccccttgctcgattgctcctgcttttttagtgatttcacttcagtgcctgttcgattgataagttcatactaatctgtgcagataattagatatatccaagttctgtttctacttggatggttctatcatgtaggatatgctcagctgaatttgtgagatgagcacagagacttttgagttagcattttgtttgtgtgcttgtacatggtttgcccattgatgtctcaggtctaacagaatttactcactgggttgctgcattctgtctaagaatggacatgatataacaattaagagatgtctctatttttagaagacaaaattgacatgactacattcgattttgatctgcttttaacattttacgatagatgtgtttctgttgtttccaactgtttgtttgttttcttattcttttatggaaaaattctgatatattcttcattggcagtttcaggggttgctggtggtacctgactgctgagtaacaggatggttttttggccgagtaattaacaagatcgtgatgcaactactgttaattggactagtggagtccagtttcgtttgccctttctgtgttctgaaccactctggcatgtcatacaattctgaaccgctcttggcatgtcatataattctgaaccgctcttggcatgtcacataattctgaaccgctcttggcatgtcatgtaactcacctagcaatcgactagcgtactggtaggctttcttgttcatgtcacttgaatttctggaaatattgttaatctggcatgaacacgtgatcgatgtcgtggatgcctgctctcatattgcacggctgcagagtttatcctcagagcactgcatttgtgatagtggccgataagatttgaacatctctttctgcattgagcttagagtattttcagatattctacttcctgctgtgcttgattctgactgctaagcaaagcagcttgcagttaaacaattcagacatgtatctgaacttgcattggtacattacattacatggcattggctcattgctttcatcaatgcctggcaatagtggtttcatggcagcatgagctgcatcgcgcgccgggaggcacatgcttttagcttcataggatgttctggtttaccagctgcacggtggttgtagtagtagagtacttccgccagtattatcggctatagaaacaatctaagccaagccactgatttatcagttctattatgtagggaaaaaaattattctatagtctatggttgaaatggtaatataattactgtagtttattagatgataaaagattaaaaggtctgtatttactgtgctaccagttgaatctaccgtaaaaattgtccttccaagttaggccaagctaggtcctcttttagatatacgagttctttgtgttttcttaaaaaaaaaaaactgaggtcccatgtcaacatgtagaacaaattaacgagaaacaatttgctttccacgagaatcagggaaatattttgtaaatcaggattaaactattattatcaaatcctaaatcctaaatatccaacagattttgtatgttccaatggagaaggttaaaattggactgaaccatatagaacacttttcacacttctgaaggaaaaaaaatgggacaaaattggttgtatatgatgtcaaaatgatgagtaaattattgtgttcaaaattccccctctatgagtatagatcacaaacttaatgttccaattaaacgttgaaagtttcatagatttgacctttggaatatacaagttttgctgtattatgacaagaatcaattcaatatatcatgtagggtgataggtataatttcattgaagacaacacaaaattctttcattttagcacgatacaaatactcttttgtcatacaaatgtttgaaatagtttctcaaatgcgtagtataaaggaacaaatgacgtacatagatnttccttgaataataatatcataatgtcacaaacttatatgtttttaataaacttactttggtaaaaaaaatgatagtaaaagtaccaaaaagaaaagaccaactctttttttttttttgcggggaagaccaactcttattgttacattgctgggtacaaactgttttggtttaggttctacacttaacaagggtactcatatttaccgctaattatttttttaagtgcttgtaccaatctacatcaagatattcatggtaattttatcaatatcaaaatatgtcggcccggtatttcaaatgtgctcataaggataagatatgtgtgtatatgttcatagtgtgtgagtgcgcgcccattgtgagtgctacgtttgtatagtactcccttcgtcccaaaataaatataattttgtactgtttatgtccaacgtttaacctttcatcttatttgaaatttttttatgattactatttttatttttattagatgataaaacatgaatagtatttttatatgtgattcattttttaaaaaattttcataattttttcaactaagacgaacggtcaaacgctggatatgatatccatgactgcatttatcttgggacggaggtaatttcttcgtttcatattataagacattctagtatatgttaatgatatatgtgtgtctagatttattaacatctatatctatataaatgtatatgtctagattcattaacatatatatgaatgtggataatgttagaaagtcttgtaactgaatcggaggcagtaatatttaaaaaagttgatccccatttggatccgggctttaccggcacggacccgacccgacaaggcgcgacaacccgaccacatccgcattcaaagctgaagttaattcggtctctcgcgtccgccgccacacactctcactcactcactcccaactccgccatagctgcgagcgagcgagctagggtttggtctctctccatggaggcggccgggggagcagcgcgaggtttccggcgccgggtgccggagccggggtggtgggtcctgagggcggtggagaggtccctgcgccgccgcctctcccgcgccgtggccgcctggcttcccgccaccgtcgtcgtgggctgggtgaccgccgtcgccgggatcgcccccatcgtcgggcgctgggtcggcggcgaggtggggcgcgccatggaggtcgcgggcgtccacgtcgtcggcgccgggcagcacgtgttcatgctcctcgtggtccccatcgccgtgctgctaatggtgatgcagctgcgtctgcttgctgggccttctgatgggaggcagggggatggtatgccgcaaaaactaaaaaaaatttcttctcctatttttatgtattttgtttctctatttttgttgtttgactccctcagagctgagtaatatatataggaggcatcgtgtttaattatcctgatctttcaattccatttcagatgatgctttgattcctaccgttgttcatatgtgttagaatcaagaatgcatatatgtcgaccatagtccatagcagtgtttgaaatatcggttcgacatttcggagcacccccaaacccaaccccacccaccaacccaccaattaatggaactatttcgtccgaaaatttattttatttttaatttagtcaaaatttgttcaaatttcgttcgaaattttctcggaaatttctgtgcgccccagtgtaaatagcagatagtaattcttttctactcaatagtcagtcacgacatgtccccaaactttgttgctgtgttcatcctagatttagaggctggggatgtgatcatcttccttgtcattaaacaagaaagtcaccacgtcttctcagagccaattgcagcaaattctgaagttccatacataatctaaattttacttgcacatgatatagcagctttacgcttttacaaatcatgtgcttctggtttttgctgtattttttgaggtaccatggaacagcacttggcatcttttacatttgtaatcttagtggtgtttactgtgtggtggtcagagttcaagatcccagcagtgactggctggtcactggtcctaagccagtcggctggttaccattataccagccagaataatttggattcaaattttaaatttaattttgacattatgtcaagttgattttttccatacaaggttatttgttgttacattccaatatatagggaagaaagatgaaaatatatattgtaaaattgtatctattattaaagtagtttgtgaaggactatataacagattacagacttacagttatgatgcatatccctttatgcgattcccttatgatcattttgacataatgtgatccattaatatattatgtatattggatatacaaaaaattgcattctgtcacgccaaaattctctggccattaattaccggtaactagtttttgaatagtatttttgggggtagtggtatttttagtgaaaccaaattcaaaattttggttgcggttcggacagcagtaataaccatcagctatttggatcgaccaaaaacctttcctgcatcgttacataaatgaagtttgcaatatttgtttcttattaattatgtgttagaatgttctagagcctatgtattgtaaactaattctcttccatgcctactcaattatttgcatgtcatggtggttacaatagctggtaagaacaattgctacaatggaattatccatcctggagcaccatcgtgaacgcagaggaaaatggaatcagctggctcaagaaatcgtgttcccactcagcattagcttcgtcctcctaggagttgcgatgattggcttgatgatcactggattttcaccagaaaaagaatttagcagaaagaatattggctggatacttgctgatgttggatttttgggttggcatgctctagtaggattttttctacttccaaaagtgatcctcacacttcgggtacgttcctagagtgcaggtgtggccgctggggtagcatgccggtacaaggtacatccctcttcactgtacatcttaactggtaatagtgtttctgtgatgccctatgttatccttcgttatatggctgtacctgatttatatcgtgcttgtactctttgtggaaagaaaagaaactttgatttgcaagacctacatcctaggtctccgtgttccatcatctggtttatgttcttcatgtagcattcagatcaaatgaccctatgaaattatgttgatactaaaacatattatgggtaatgtaggcgacatccctattttcctccggatctcttaattaccattgcttagctttcagttcgcctctgaccatcaaattaaatgtgaataactaacttgatcctacctttgcttgtttgtcttccaacacaaatattgtagttattagtaggcacatttttcttgaagtgggctatgagttatgtttgttcattagtcatacattctcgctctcctgctttttattctccttgcttaatactatattgttgcattttatgtctggtacaaaatacaggctccaaccttagacttgtaatatgtctttaatgtggaattttagatgcctctataataaatgaacatgcatttggctataccctgtttgtaggcatgttatcatttcatttggtcagaattagacgtgtgtacctgaaaatcaaatcagatcactatttgttattattaagttgcatgcaccgaccagctcaacccaaaagcctaagctgataggaaaaggcgggcaattcactttatacactccaacactccccctcacgcgagaccccctcaagtctcaagcgtggaatattggagtgggctgcaattattttatttnnnnnnnnnnnnnnnnnnnnnnnnnnnnnnnnnnnnnnnnnntgataccatattaagttgtatgcaccgaccagttcaacccaaaagcctaagctgatagggaaggcggacaattcactttatacacttcaacagttattttgtttggtagatgttcagagtatttgttacccatctggtacaaattaaatattacatcttttatctgttattagtctggtatatatctgagtaataactatctagcagaagcaaatttgatggagttttgatggcacatgcctagaacatgaacaaacgtaatggatattctgcctcctaactttctaatactatgtcatcgatcaagcaagtatctagactcttaagacttcaaataagatgattgtatattactctgtttctgttctattgatgtctctggcactccttgaactttcttttcaacaattcacgcaaggaaaagctactgacatatgtcacaatgattattgcagttttgggaacctggaaattattggagaatactgtgacaaattcacttccggaatctgcaagctatcgtattaagtgcatgatatcttgcctgttttcttcacgatgactatgatactatgaacaatatttggaattaattaccaggcgtgatgcttatttattttaggtgttgctttgagttagcgtgtctccactctccagcagtcaaacaaaaaagcattgaatgaatgacgttcgtattttcaatcaggcatgttttgtgattgaactaatagttcatatgctgatatggttgatttttgatggacctttgggaaagtgattt

SEQ ID NO: 23485 - DNA, 1959 bp, Oryza sativa
tttgttgatgcaacacctcttcagtctttaggcatgtgtttagtcaatttagacatgtgtttagtttttatggtttatcacacttggcaccatggttcatgtatcataaaggggatgtttagatcagggtgtaaagttttggtgtgtcatattggatatacggacacacatttgaaatattatacgtagactaataataaaacaaattacacattccgcctgtaaactgcgagacgaatttattaagcctaactaatctgtcattagcaaatatttactgtagcactatattgtcaaatcatgaactaattaggtttaaaaaatttgtctcgcaatttatacacaaattgtgtaattagttttttttttctatgtttaatacttcatatatgtgtctaaacattcgatgtgacatggtgtaaaatttttgcctgaaaactaaacagggcaagcttgggtatttgcattacttggtatagttgtgtttcattctaacattttttccacaaaacctgcggtagcttagtagttagactacgcttgcctagcgttgggcctatttgtttccgcttcgcttcggcttgtagaccgcagccaaatttcaattttagaattaattcatttgttgtataattcttggcttttgaccgcaaacaataaaatctgttctaaaattgtttttcttctttggtcacttgtcctgtaaattgtagccaattttttttttcgcagggtctctttatttgaagaaaaaaatatactacagaataaaaattttgtaagatttttatcatgtaggatttttctcttatataaccatttgaaagtttcctttcaccctttttagttccattttcgcttatgcttatgcttctctatatcgcttattagcaactaattcgtgagtaaaacttttatttatgtgtcataagtagtataaaataaaatattataaattaaactacaataagaaaacacaaaattaactttacaattaaatcttaacaaaacgatagggtttttttctctctctttttttcttacagtccagtcaacgatcattattgtattttttctgtactctgtaactgtattctagtgaaaatcttatattgattttcatattcctccgttttgaaaatcctatatttcaaacgtaccataagtccataacttccatagtagccgtttccgggtacattctactgggtgcgcctaacaagatttctccgcttcgggcatcatcacccggcatttctcctcccctttgcttctgttttcgtcgtcttcccacgccgcaaaccccacacgccctccacactccaaccacttcgcctccaccacagcgcgagagagaagcttctggaagctagggtttccccgtccccatggccgccgcccccgacgccgctgtggtggtgcccgtcctgctgccaccgccggtgccccaggtgcagccgacgctgaaagacatcgtcgtggagttcccggtggacggcggccgcggccgcctcgtcgcggttctcccgctgccgccggaccacgagctgaggaggtcgctggattccgtcgcggaggccctggcgagcggccgcctcgccgcggtgctcccgccggcgcggaggaacaccgtcgcggcggtcctggcgcgcagccgtctcgccgcggccgccgccgatgcgctcatgtacctggcgctcgcgggcatgtggatcttctaggcgggcatggccgcgcaggacgtcgcggcccgcgccctcggcgagggctcccgcgcgtacgccttggcgttcgaggtctcccgcgtcgccgtcctcctcgtcttcctgccggtcttccccttcgccacgttgctgcacgccgtccgcctcgccgtctccgacaccgatgagccagacgaggtacaccttcatgtccaaattcttactactgtatccgaatcaattccgcatatgaact

SEQ ID NO: 23486 - DNA, 9384 bp, Oryza sativa
ccccgtccccatggccgccgccgtcatcgtggaggtccttgcgggcgggcgcctcgtcgcggctctcccgccgccgccgccggaatctgagttgctgccgacgcgagacgtcatcgcttcgtttcccccaccgccgccgctgcagtctcccgtgcggaaggccgtcgcggccgtcctggcgcgcagccgtctcgccgcggcggccgccgacgcgctcatgtacctgtggatcgcgggcctgtggcctgtgggtcgccagtgcggccatggccgcctcgcacgtcgcggtccgcgtccaaggcgagggctcccgcgcgaacgccgtggcgttgcaggtctccctcgccgccagtctcgtcgtcctgccggtcgtccccgtcgcgttgtcgctgcacgccatccgcatcgccgtctccggcaccggcgaagacaccgagccagacaaggtactacgactttcctcaaaaagaaaaaaaaatgcttctacctttgggtccattttcgtgtgtgcactggtgcggattaattactgcatttgcatcaattacctctactcctgtgaacgaggttctatatctagggtaccaatagaagcgaaattgctggaaatttcttgccaaaaaaagttcagattcaaacaaaatttggttaaatttaaaatctgaataaaatttgttttgttcaagacaaagaacgaaaaatttcggtaatttgattccgaattatggaaccctgcatataagctgcacctgttatcatgcacttcttgccgcgctgttctaaattttgatttttgttgtgtatgtcgtgggtgcccacgttgccaatttcaagcctgctccggagagctttgcagcatcagtgagggcatcgttcagtcaccccatcctagctgcatccgccgctataacgcctttcgccgtgctggtgcctgttggcaatctggtgaaggggatctcagctgccagtggatcacgcggggagagaatcggttctgcgatcgaggttgtggggctcgtcggcttttacccgatgttcctcttcttctttcttcccactgctgcgtggatggtgtggaggagggtcaagctacctgcaggccatggccagcgtgttgctccggtgtagccaagctgccgaggttatataattaacctcccttctcgtttgattcatcgcgtgtgtctctaatttctgtgaataattttcctttttactcatgtttattaagtgttctctgtattcatagtccactgctgacagcaatagcatttaattgactcctcaagtttcatggtcattctttaattttttttaactctaggatgacttgatgagcatattggcatggttaacatgaacagatttttgaactaggaaatccagtgtcgatcctacctgctgaattaggcaaaacccattatcatcataaaaagatatatatagctagtttcaatgtatttgtgactgtgagtttgaagaattatgctgtttactctcaaatctgaatgtctagctgtctggtatgctccatcatgtcttgaggttcattgaaatacatcctcttgtcaagtcaggtgaaattgatactgtaggttagttactgttgtctatatagaaggatgtttcattgataatctgcacccgtatatctgtaactgggcaggttattggtctacttgctgaaattccttcaagtttacaaattttctactttggttgccaaacatttattatccatcaatcttattaaatttgagctattctattaacaaacaggcttcaagagaagtgctgtgaagatggacaaggacctagaagatgactcttgctgatggttaattacgagcttacggctgattccaacagataaaagttttgagaactatggctcatatttgctgatttctagtacactgcacctacgaactttattttgtcactatatatgagtttaattctagtaatacagtaggatatgtgccacgagctctgcctctgacaatttcgtagtggtagtacagattaattggaatcagattttacatttgtgctgttcaatataatctggtcttgctttctcgattaaaagtcaagctgtgtgtgttgttctctcatgatagagtgagattttgctatctatgagcacgcatgcatccttctagttccaaaaagtatgattcatgttttagggattacctagtgaattcgatatatagtcacttcgtggatttcacattgttgtagtacgttttcttagttacataatcccccccctttttattttttgaatcgctacatgtagtggctaatggcaggaatgtctgttccattatttagaaaatgtttcctcctgttgatcagaacattgctatgaaattatttgcattttattggtgaatcatcatcttttatcagtgcatcgatcaagacgcctacgctagagatacctcaccagagcaccattagagtgatgatgttgccctttttttacatgacaaagtaatgcttggatggctcttctgcatgcctttcatttttctcatgcttgtgggggttctgatggagggatctcggagtgaaaggattggctctatatttccggatgttggatccttgggcaactctgtgctgtattgcttcctcatctcacctgctttaatcctgcagacctggaggatgaaataggtagtggtggcatagttgaggtatctgtcctttactttggctttctcattgtttatcttccatataatctctttattttacgagcattatatatatattgttatcctactgattatggttactagctctgttgagtaacaatgtgcagagaattcctccacttttgcaatcctttgtccttctactggtaatcaggaaataagaactcatcgcggttccttaaaattgcaaataatggttctacttggtaaaatgtgctcagttgtagtcttgagctatttatatgctggccctattatgaatatacaaaaatttgggcagtgctattccattgcattgaagcccaaccaaacaaggccgaaaggacatttcgttcatagatatcctgatatccactagtgctcactcaagtgatatgttatacaggttatctaacaagttggctattttactaacgaagaggagagaagtgctacaagaagctatgtgtagtccattcacatttctgaaggttaatcactcatccggccatcccaacacatatcgaacttgcgacagaagatgtttctttttacagagtcgctgcttcttcgatgcctagtaatacatcttaattctcttaagggccctattctgtgaactgttactatatatatatgccccatcactaattgttctagtgattatacttagtactcacgaatcacgatgcatattatcttttgatattctgctgtatggtgtacatactgtgcttggaggggggctaatgactcataattacatgactgtatatatgtcaatatgcttattattatccttttctaggaaggcatatctcttgagctgaaatggatttggcattatgatttatgaacatgtagcagtccatctcacatctatttatcttcagtgaagctttggtgtgatctctaaggttatttattatgtctgctgaatgcttgcttctctttcttttcccgttggttgggctgctgctacatacttgatcaacattgcttgctattcgactagtactgggccagactgcattgggcctccacatggtgatagtagaaaggaggaagatagaagaaagaagagtggtgatgtagaagaggacggagtaagtcactgacaggtgggacccacatatgactcagcaagtcaatgagggtcaaaaccgacatgtcagccgaaaccgcctcccaaaccattatactcaggttttaaagatgggggaaggcattatacccggttttgccgttgagggatgcgattcaactagacgtaagagttgagggatgcaaaatagacctattcctttctgtggaccgctcatagtttacaggctagcccggtccaggtgattttgccacccatctagtctagattgattcatcaaagtagggtagttatcttccactagtagctaataagctaattacgcgagctccacccaacataagtacggattcggattcagtgacattgctatggcatggcacggtgtgacattggagtgatctggagcgttcaaaacaaatccaacggtccgctacgtcggcccacctgcagcctccgttttcacccaaatctctgtttcctctgccgcccgacgcccaaatctcgcggctcgccccaatcctgcgcgcacgcccggtaccgcggaggtcccaatcccgcaccggagtagagctgctggcggagttccaatcccgcggaggtcccaatcccgcttggagtagggctgccggcgccgggaagtgcagcacgccaaccgccgaggccggggccggggcgcctgccctgccgtcgccaccagataggcgggaggtaggggggcccctcgccgtgattggggaggcaggccggccgccgcgaggccgggggccgaggcccctgccctgccaccggagcaccaagattttggggaggagggctgccagagcgagccgagcatctgcagaggtggattgcaagtgagtgtttctaagttttattctttaggataacttggagagcaactgaattgcacaatttggtttaatggatcttagtcttaaatggagcaaatattgaatgctaaattccagttattggatgtttgtgtttaggcaaatgttactatctgtatgtgttgaaaaatgttgagcagacctactatcagataattgtcccccctaagtgtgaatcatttttatatcagaatgttgtggttgagataatgaaagagcataatagtgccgccataatgaaatatatgttccgattattatagtttggaatttttttttcagaaatttgagtacagggctattcattgttgtggaaggcaatggcagaagttgatacaaagttacttgaagttggtttgaggttcaaaaatccatataagggttggttattttgggtggcatatggcggccgtactggctttgatgtgaggaaaagatgcacaaatgtaagcaaaatggatggtaagggacttcatgcagatatgtttgtttcaatgagggtcatcgaacaaaaaggcaaacggaacatgtgacaaggtgttttagagctgatacaagaactgattgcaaagctcagatggttatttcattggatcgaggtgcaggaaattatgaagtcattgatgtgcttgaacacaaccacccactccacttgccagagaccttccacttgatgaaatcacaacgcaaaatttcaaaactccaagcttttgaaatagaaacagctgatgattctagtattaggccaaaagctgcccatgagttggccactcgtcaagttggtggaccacttaaccttagctacagttgccgtgaccgccaaaattatttgcaaagcagacgtcaaagggaattggcttttggacaggtaggaagtatgttgaagtattttcatgataaaattgttgagaacccatctttccaatatgctttgcagctggattgtgaggagcacattaccaacatattctgggctaacgcaaagatgatccttgactatgcacactttggtgatgttgtcacatttgacacaacttttgggacaaacaaagaatataggccatttggtgtttttcttgggctcaatcagtttagagaaaccactatttttggtgctgcacttctatttgatgaaacagaagcatcatttacatggttgtttgagacttttctagctgcacataatgggaagcaacctaaaactatttgcatagattaagatgcagctatgggaaaagccataaagatagtattcacagaatcatatcatggtctctgcacctttcacataatgcagaatgctgtgaagcatttatctccagtgaaaggtaaagaggatgatgaaggtgaagaggaagacgaaggtgaagaggaatcgcatgttcgcttgtatgtttggccacgaagatgaggcatcatttgaagaggcatttgagattatgagatccaaagttcataagcaaacatagttagatagcatttacaaggtgaaagagaaatgggctgaatgttatatgagagatgtcttcagtttaggagtgcgaagtacacagctaagtgagagcttcaacaatgcattgaagaaccatttgaaatcagattttgatatcattcgatttcttaagcattttgagaggtcagttcaagacaaaagagataaggaactacaatctgaatttgaggcaaggaagaagctacctagaagactaatgtgcacaccgatgttggttcgagctaaccaagtgtacactccagtgatttttgaagctttccaaagcgaatatgaaagatccatggctgcgtgcgctagagttttggatggagaacacagatatgctgttgtagttgggaatttgcttggtgaggtaagttcagaggtggaggagtacacagtgatcggtgatcctctaaaccaaaaaacttcatgtagttgtagaatgtttgaaaggataggaattttatgtgcacatggtctgaaagttcttgatctaatgaatataaaaaaattgccaccacattacatcataaagagatggactagagaggcatgtaatgaaaatatacaagataggcaaggaaggaatgtggtagcaaatccaaaattggaagctcaactacggtacaagattatgtctcataagtttcacactttggcacataaagtagctcactctccagaatgttgtgtagtgttagaaaatgcacttgattgcctttgtacacagctagaggagaaactcaatttactatctgctggtggtacacatgagccctacgaggacaaagaaaatattgacccaaacgcgcaacatggagatgatttgcttagtgctacacaactaaacaagaaggaggttcagtcaaacaagtcaaggagaattagaacttggattgataagctacgcaaggggaagcgcaacaatcctaaatctgcaaaaccaacaaaaaagggagtaaaggtatatcatatgcaagctgctcatctttgtatgttgatgtaaaaaattgcttaactaattaattgacttttcattggcaaaaacaaaagaaaaatgatgctttacagccacaggtacaagttaaggatgatggcagccacaaagaaagagacgtggagcttcaacaatacaatatcattagcgattttacccaccttgtgacagcaccaagttgtgatgatgatattctctgtgatcaagatctgttctaatctttgcaagatggttagatggcttgtggacagcatggttatatggcttttgtacaggatagtttgatgtttttggacaggaatggttagatgccttctcgacaggactaactatagtattttgtggtctctgtttagtattttggacagggccaacgatagtattttgtggccaaattgtacaagtgaatatggcctacccttggaatagttttctatatgctccacatactagtttgaatgacatgtacgatccaaaaacttatctcacaacattatcaacttctatatggctgtttccaactatctgtgatgtctgaatgctccaagtttcaagtttatcaacttctatatggttgtttatgtctttctgtgttgtctcaatccatccaccaattatggggacatgctgtcaattttttcagagaaacatcacagaacagcatacatgaagttactgatttattcattcattcattcaaattacagcatacatgagtcaaatcaattgtttcaggacagtgcacagctaagcctaaggcaattttggagatagagaacaaacagctaaacttcaaaacagcaattttggagaacaaacagctaaacaactgtaaaagaatctttgcatttctctaatggaaatggagggctttgccctttgctaaaaaaaaccagctaaacagctgcgaagaccattgcctccattggcaccccgacggccggccgcctccatcgccaagggtcacggtgttcgcttcgatgccactgacattagcctgattgtaagcagctagaaactggcaactcctgtcctggatttcccttcagttcaagctaaacctgaaaatgattttgtctcacaaagttcagttcagtcacttgaagcaattgcatagcccaattttcacatggtttaatctgtttgaaatgccatggatacaagataagcaagatatatttctcatttcacaaaatcaagacacaatgtacaaaaaagagatgaattatttggaatacaaattcagagatgaattatttggtactgtgttcatcagtattttcaacatatttcagacaagggcaccgtcgccccatgggcaccccgtcggccggccgcctccattgccaagggccacggtggcagggcaggcccccagcctgtcagccccggcatcgcgcggccgccgcccggtcccctccccacttgcggtggtggcggctcctagctagctccggcctggcgcggcggcggcggcctggcgcgggcgagggaggcgaagctgcgaggcagccgcccagtcccctccccactcacggcggcctagcgcctctctggcctggcgtggcggcggcggcggcctggcatgggcgagggaggcgcaactgcgaggcggccgctcggtcccctctccactcgcggcggcctggcgcctctccggcctggcgtggcggcggcctggcgcgggcgaggaaggcaggcgaagcggcgaggcggcgatgcgaccacgggggattggggcgagggaaacggagcgcttgggggggaaaacgaaccctgcaggtgggccggcgcagcggaccgttcgattagatttcaacgttccagatcgctccaatgtcacaccgtgctatgctataacgatgtcaccgaatccgaatcccagaagtactacatgtttatcgcttcattcttctccccttgtttgaggtcaaaccaaagacatccatgtcagcctctagtagttgtatcaaccatgaggcgtccaagtccaccctatggacatgcgcctaacagttcaaccgcatcaacaatgattctaatggtacaataagtggcattaaggcacattcggacccatgcataccacactggctcagattgtttgatgtacggttgataggccgacaaaaaattaaaggaagcaaccaaaactaatttatcggaaaaagtttaatatattacta

SEQ ID NO: 23487 - DNA, 2027 bp, Oryza sativa
ctggcagatgcatcctccttttacagttttgttttgctgcgagaaacgcaaaattggctccgacatacgtgttgaatggtccgcaaaattggctcctcacccttgcgcagatgcatcctccttttgcagttttgttttgctgcgagaaacgcaaaattggctcctcacccttgcgcagatgcagcctccttttgcagttttgttttgctgtgggaaattcggatttgttttgttttggaaacaatccgaaaaatccgaatacggtgcgtaaaaacggcgtggagtccggataagttacgcgctacttatccggttcggttacgcggagtagagatcgtgcgggcgccctgatcaagcgacctatctctatataaaccgtgccaccgccttcacacaacgcacgcgaaatcaatctaggatttgcctcctactctgtgctgcgccgtcgctcgtatactactccatcccgctcgccgacgtgcaccggcgatcgggagagcaggtctccggaacctctgccttcgacgttctgcaccgggagaaggcggcaataaggtttttgggaagcgcttcgcacgactgctccctgttcgtccgcgaaggcttgccttcctctccgctcgcgtgctgcgcgccttcgtcgtcgcctgcaaccacgagtagttcctgccgagcaaccggtctttttgccacctcggtacgtgttcgacatgttgcgcatatttgatctatttatgttttactgcttagtttacatgtgtagatctaatgatgcgttcatgctagtttacatctgcaatgtcatgatttatttatagaataaattaaattattatgtgcttataatttcaacctcaaataagggagaatggcgctaaaagaaatcaacaaaaaagtagtactcctagtacaatgctagtactcgcacaagacctcggaatggcgctacagtgcctattccttggcatttgcatcgcatggtgagattgtcagcttgtgagacccatcacagggtcacagaatttgacgaggcagcaacaaatactgctctctatcgatgcctttttggctgcggtttgcgctgtgatatccctgacggattcgttcgttttttttttttggggggggggggggggggggcgccggtgaaacggacagcagcaaagaccgaaagttgtcaggcaactccctgtattcattcaacaaagaaaaaaaaaaggcgccgaccggttgctggggtggggagttgagcccaatcatttcacctgccgattcacggtcgtcgtcgtcgtcgccaccgccaccgccaccgccgctgcaaattttggcgtcactcctcacgaaatgcaggagcagcatatcgccgtgtgaggccgagcgccattttgatgtaagaaacaattgcaaggaaatgaaactgcagtaggaggaaagaccttttcgcttcagataactctcacaggacgcggcagctgatcatgtacagtacagccttaccgtgctgcaattagcattttatccttttaaacaactaaattttacgaatagatccctataaatcttactccatctattttaaaatagaaaaaaaaaactatcgcggttgtccgaattacccctaaaccacaaaaccggacattcttcacccccaactatacaaaccggatgaattacccccctcgacccaatccgcggtggttttggtctacgtggcgtacgcgtggcagtccagtcagcattctatatttttaaaaatatgggacccacctgtcatacgctctctctctctctcactcttcatctctctcttctctctctcactcccctcactcttcctctctctctctcacggtcagcggcaggcgggggcagcggctaagggcggcagcctcggggcggcggctgaaggcggcagaggcgctgccggtggtggtgctgccgtcgcgtcgccgctcggcctagacgacaccatcgccaccgatatgaccaacgttggccggaagcggaagcgaggaggaggggatggg

SEQ ID NO: 23488 - DNA, 4634 bp, Oryza sativa
cgaggccgccgcccccgccgccgcagctccgcgccgaggccgctacctccaccgccctcagccgctgcctcctcatcaccgtctgacgccgtcgcaactccgcgccgaggctgccgtcgtctaggctgagcggcgacgaggcggcagcaccaccaccggtggcaccttcaccgccctcagtcgccacccccgccgccctcagccgccagttccgcgtcaccgtccgacgctgacacagctccgcgccgaggccgccgtcctcagccgccgtctaggccgagcagcgacgcggcggcagcaccaccaccggtggcgcctccactgccctcagccgccgccgaggccgccgccctcagccgctgccccatcctaccgctgaccatgagagagagaggaagaatgaggagagtgagagagatagaagagagagaggaagagtgaaagagagagcgcgtatgacaggtgggtcccatattttttaaatatagaatgctgactggattgccacgtgtacgccacgtagaccaaaaccaccgcggattgggtcgaggaggataattcgtccggtttgtatagtccggtttgtatagtccggttttgtggttcagggggtaattcggacgaccgcgatagttcgggggtaattcgtactttttactttcaaatataagtatttctaagcttcaaaatatgtaccaccatataagtatttttgcactaatttcaatgcatgaaaaaattatatattttttagttaatgagatagttggaaaaatataagtaattcaaaacttgaccactgaagtaactaaaagagatttgttttctttatctttttaaatacctaccagtacttaaattttagaacaaatgaagtatttggcaaagaaaaagaccctcaaaactcgacaccaactacatttgacgtctcagtgagtgtttattgaaacaaatatcatctaataaaattgaaacaaataagagggaatggaggtgcattgctttgtcaattttactgctaataactggcaacttaaccagattttaggagaggagagtctttgaaggtgggtttcaatcaaggttgtcagtatccggatctgtattctattatcttacaatattatgatcctaccaagccgaaacgataccgatcccactattcattatcacatgatcctttaaaatcttagatagcatcccgattctacgatcctaaaaaatattagttaaaataagatggtttaaaaataatgtaaataaatatactcaagtttatacttaaatatatcaaaactaatgtggtttctcttgataaatgtctctttgcatgtcatatattattactatattttttttatatagaatggctatatgtaactaatacaaatattaaacttgaaaaaagaaaaatctcaaatctcatagtatcccatgctacgatacaatactactttaagaaaaacggtactacctagtatcctgatactgataaccttggtttcaacccaatgttaaataaggttggaaacaaacagaaaggaatgaagcagtgtatattattgccaagttcaccactaaataaaatgaatttgaagtaagggatggaggtagggatggcaatttcacccgcggggccgggtgatatttctgccccgcggggatgcggggccggggccccgcatttggctgggtacaggggcgggggaaacattccacccgcgggtgacccatggggccccgggggtatattaaacctctcaaaatataatccattgcaggcccaaaaagcccatcctaatgaaatactctggaatccggggtatataagaaaaaaatcctaaccctaccttatcctccccccaccccgcactgcttcccgactctagatctcacggagtcgcggtttctctcgacgctctccctcctcagtcacagccgccgccactcgccagtctcacctctcccctccggtcgacctctccccggtgccctcccctcctctgctctccccttcggtcgacctctccccggtgccctcccctcctctgctctccccttcggtcgacctctcctctcctctcccctccggtcaacctctccccagtgccctcccctcctcttccctccggtatccacccggcacaggtgcggcggcgatggtgcaaaggaggcggtggggtggcgcagaggccgcgatgtagaggaggcgatggcgcagaggagcgagcagcgcgcaggcttgggttcacggtgatcggagctgtgtaggcgccgggcgagcagaggattcacatagagaaatatttgtgttcttgctgtgttcttactgaattttgatggtcctatccaagtattcgtgcttttttgatgatgtgtgaagtatgtacaatatttgttctcgctgaatagcgattatcttgtatctttttttttgctgattggatggagtggctacacattgcggggccccggtcgggttgtaggtccccgcagcgggcgggggatggtttggccccgcatcttcactcgggggcgggggcggccccgttgccatccctagatggaggagatagaggggagttggtcccctcttggaggtcaatgccaatgctgaccctaggcaccaaggaacctagcagcgtcctatgccgcatcggtgtccactgtaatttcactgctgtatcctttctgataaagttaccccccactaactccttaagcttaacatgcaaagatgccacatcatcatccactaacaagatgccacatcatcatccactaacaatcatcacatttaaacatcatgcaaacatgctatattttatagtttttataattaaagagcttttcaaatacaaacatgttaaattatcatccaacagaattcacataatatttcaatgtatatctttattatgttttatgatatcctatatataatagttatataattcatcctcacttagttagagtgcttaaatgattaatttatggtccaaattatctttctcattttttcctctaattaagtcataccacatcaattgtttttagcctttagataattaatctacggtccaaactatcttcctacttttcttcttccataaagtcataccaccttactttttacgtttgaatcaccattctacatactatttaaatttaaattatcataaaccacattaatttacttaaactgatattatctagctatcttacacgttatttttttacacgttatttttttattgttatcatactaaattcccgcagcaatgcgcggggtttcacatagtgttttagggttctagtgccaaagatctttggtatcgagatgttaaactttaaggctagtgttattgttgcacatttttacaataagttttataggggtgttgtttatatatttttttaaaaaagaatcggatcacaaaagtaagctaattacttagtgcacttgggagtgaatttctttctccatctcaaaattatgttacgttaatacttacttcttccgtttcataatgtaagactttttagcattgtccatattcatctagatgttaataaatccagatcactatatatgtctagattcattaacatatttgtgaatgcgggcaatgctagaaagtcctatattatgaaacggagagagtaggtcttaagagcttaagagtcgaggaatcgtcgcgctgtctggtgctaattgttcgggaaaaaaaaagagagccgaggaatgctggaagctaaatgactttaggctcatttggtacatctcctatttgagggtttggtataggtgtagctccacgtggacaagaatctcgtagtaggacgacttgtatcaaacgggtcagtttttccttgagaataacgaaatgagcatatcttagctagttcgttttttttaatctggctagttagttttttttttaatctgtttatctaggttcaaattctaaacgtaatatgagtgttcgtatttacggctaactatactttcaatgtcaggtactatatgtgtcaacaatgataagcttatgataactttatcaatctcaagttatactgacttggtcttcgaatgtgctcatagggatagtatgtgtgtgctcacgtttatagggtgttcaccaatcttaagctatgccgaccagtctttgaaagtgtttatagaaatagagtccacctgtgtgtgagcacgtagtgcgtttttagggcaagagcaatacagctattgcacttgagaagccaaagccgctagctataccaagaacggtgtagatagggtcctccatagtacatagtattacatattatagtgggtcgtctcaccagtttttctcttctcacttcgcccctctctattctcttgtgtttccccaccgacaaacggagcgaggcgtcaggcactggtggagaaggggtttttactcccggttcgtaaccccctatgtagtcccggttttccaaccaggactacgaatccgggactaaagatcgctatctttagtcccgggtgaaaaatccgggagtaaaaatctatttttagttccagttaatgttaccaactaggactaaagaacaccaaccgggactaaaaagactagatccggtagcacttt

SEQ ID NO: 23489 - DNA, 4799 bp, Oryza sativa
caggcctccgcgcccgaccgccctcggcctgttagagaggagaaggagaggaggagaggaagataaggttgaggagagaagttaaaaggagaggaggagataaggttgaggagaggagagaggagttaaaggagagaaggagatacctcgatccgatcacgcatgcctctccgatctccacgtcgatctttttatggcgatcttttttcccggttggtgttaccaaccggaactataaatagatctttagtcccggttggtaacggttaccaaccagtactaaagattgaaaagtactctggagctttcaaaacacaaccgagactattgtgaaatctggtcgaccgactaaagatggtttctccaccattgaggcggcaccacatctccagacgacggctgccgagcacacgccgcctagctcatcagatatgaagtcgggtggcgacggcggtttgtcgtatgatcgagcgcatatgtcgtatgatcgagcgcatactccgtactagaaaaaaaatatcatcaatggtgaattcgttcgggaacaaaacgttgacgacgcagtctatttaagtctatacagataagatcatctggattaccttaccctggggcacgcgtgtcagcaccggtatgctgaaagacacggcagtagatagcacacaaagcagcggcctttgagacaaatacatacggacacaggaaatttaaggaagcatcagttttctggaccaaaggcaggaacagcagaatgttggagtcctctgtacatggatgaggatgcactgcagcaacgtcgacctacgtgagaatcaacgagacagatgccctgctcgatctgctgcccttcgatcacgagagcaacgaccctcttgacgtcaacggcgccaatgtgcaggtttcaacgggggaccatgggagcatgcaaaaccatatcttggcttcaccttgtttggatatcaccaaatcgcagggcagggtgttcttgctattaatttatggcttgcactcatttgcaacattgggattaattccacaattaatcatctttcattctaaatgacagtttatttaatactatggacacattcttagtcattgggttgggaatagccttatccataattttttaaagaattcctatgcatggggtttgagcaaatactctctccgtactcgtaaaggaagtcgttttggacagcgatacaatctccaaaacacaactttgacttcttatttctataattattgaaaagtgatatatgtatacttttatgaaagtatttttcaagacaaatatattcatataatttttacattttcaaactcaacaacttaatagttactccctctggttccattttaattgatgttttggacaataacacggtcaacaagatacatctttgatcttatttttctattataatatatattataaataaatgcatgtttatttttattataatacttcaaaaagacaaatctatatatgttgttctagttccttttaactaaatatttttaaagttattgatggtcaaagttataaaagtttaacttgagagagtattcatcatttatattcccaaggtttgacttcaaaattgtcctaaatgattttctttacgagtacagagggagtattgaccagactattagatcatttagtgtgatcgaggaatatagtacataattatcggcaaatccccggatccctccgtgacctcccagcctttcgcaaattttaacaacattagctccaccgtctctccgactcatcttgccccttttctcctgtggctcgtcatcaaagaggggtaggagagggcttgggtctctctactcccctagcagtggccgttgttgttctcaaagccagtttctcctacgagctaggttcttcatgttctttgttctcttttggttctcgaggtggtcatcgatgttggctaccctcgtcccaataatgtggactagggttcccgatcttccgaaaggttctgataaacagttgatttgggcggagtcgcgacacaaatagatctggcttctgaacgaacacgctcttgagccctgcaatcgcagcaccacgtctcctctggttatcaactgtgtcgaaacgcggttgacctcgccgatcctaatccctgtttgtgaatcgaagaacacaaacaagaacaaggaagaatacaaccaaatttgcatatgagtgattaagctcacaagttggggtcttacaaaccgaactagcggcgaaactgttcttgaaagaataatctaagcaaaacccaaaccctaaaggtgatagcgggtacttatatatagagtcttgggtcgtacaaacaccccttgatgcaaccctaatgggttccaacacgatacacggcccaaaggcccacatacggtgatgcagcaccgggacagattctggacattaacttgttcggttgattcccaatgactcggaaagaattcggacatggaaccagaaccattgaaaatgttatcttcttagatttctatccatataaagaacaccccaatccgagcacgtatgtgacccgggcgcccgttttagtgcagactggtcctggactccgaaatatactcgaagtcgacttgatttgggcctccatcttgacttggacacccttgctgattctctatggctctaagtccctccctaagtgtctccttgtcctctccattgtttctaatcattaggtagcaatctattcttaaaatcatataaacaagaacataggagcgagctcacctctaaattcaattggcgcgcgcgagctcttgtaattggtccttgaataactggtggaggattgttgtgtgtatccgaaggagtgatgtcctcatcgcccaacctctcggtgagtgttgtcaaactcttttcaagtgacaatccattgcgtctttaggctactgcttctagccatcagctagctagggcacctttagctatgtaaagaaaggttgcaccagcctacaacaatttctccgacgagtacttttgtcatgggcattgggccagaaggcagaggcccataggcaatccatattaattatattagagataagattagattatgtccttacttaggggtcaagttggtaccacgtatataaggatgggattgtgtttattatgaataaaggaatgaatatcaattagtctaatctctcccttccaacaatgttcttctccctagcctggctatcttggtatttatcccgtcatggcctcgggtcatggcaacttggtatcagagccactcaccatggctttcgatgccgagcgagttcttcatgtcaccatgatcaatctgctctatccagtgatggaggatctactccatcaggtgttctatgtgtacgggagcgaagaagatctacatgctccagatgggaacacatgtggaggcttcaattaaattccaatcccatgcggatgcagagaatgcacgaaaagccttccatggctgttgtaggatggatctccagttcgagcagacccccacaaccagcaacaactcgtcgtcacctgtctccctagtcatgaaggacttgaaagcagacattgaggagttaaggattgttctaaaggaattggcaaccataattcaggagaaattggcgaatgaagaggagtggcatagcaagcaagaggtggcagaggagatgcatgcggagatggacgtggcagtgggcatggtgatgccgtcgccaatcactgtgcctccaactcagccagtgggtctggagatatgcgtaaaacgtccgtttttttgacaaattgacccttttggaaaacttatttcgaaactaacccctgccaaaaacttcaaccaaaactaggccgtcggctcagcgccaagcgcattggcgctgaggttggccgtgtcagcgccaatgggactggcgctgacattgtgccaccgtggcggccgggccgatcccctagctgacgtggcagctacctcagcgccaaccgcttcggcgctgaggtgcccaacctcagcgccaagtaagttggcactgaccttggctacttagagcccggccgaggccgccccagccagttcttcctccgttttttccccagccgcccgcctagggttcggtcgccaccgcgttctcctcgcccaatctcccccaaaaacctctctaatcgaaggtgatttgtgcggcattgagtttgggatcggaagagaaggtaaacccctctataaaccctaagttccctaaagttttattggatattttgcattgttttggttgtagacgtggtttgataatagttggctaaggatggattattagatggataatatgggtggggatgaagtgtggaggtggcatatctttatccatttggttgttattgatacatttgacaaaatatatttgggatggatgtttggtgatgcactagggtttgatgggagatggatgtgtggtgatggcctaggatgtgggatggatttgtggtgattgagagggtttgaaaggggttgatgtgtggtgaagggtaggtaatttgtaggagtagagtttttttttatcaataatgtgtagtatttgagtaatgtacttatttattggaaaaattagacatgttgttagcttttgaagtattggtattgcaatggtaattacatattattttcaagtaattaatgtttatgcatgggttaaaaattgtagatggatagattggtccggcttcattatggtggttgtgtggtagatgaaagtacacatggaagccaaggggtgcagga

SEQ ID NO: 23490 - DNA, 2176 bp, Oryza sativa
ttctctttttttttttgtttcttaatcctggatagttctctatagaaataaagttccttgtctctaattttaggccactcactatttatagagttattatattcatctgctatatctcttaatttatcttcataatattttatttcactttcatgatctaatttttccatcaattcagaaatactatgtcttctgttatctataatatttctgtcagatgattctgcatccaaatcatccgaagctctggttttataatttgtaaatctaatactaacattccctttgctatcttggtaacttatgaagttttcaggctgactcaaggttttattttttataaattcactaattggccatttttctcctgctctttcttcagagtctattgttaaagggctcatgaattttattcctttagaatgcattttttctatcaaatcatttacattgattttgtatttggaggcacttctattagtcaatcttcctataaattctatacttattaataaatttgttcctttaaactcttcgtatccttttgtttgaaaaccaaaactcattttatctatgaattcatttacaggcatcattaaatcaggcactatataggttatcaacatattttcattcatatctccttctagatagcctaaagatgctttgtttattgtgtcccatcttttatctaataaggttattaacactttagctcctaatttctttcttgtcattcctttgattcctattatgtacataccttggtgaatatatttatatcctgaatattttaaactattttcaaattctttagctactatttttaattctactggttttgttagaacacttaattctacatctctagatattctatatagcccattcttattctcaaaaaatcccatgcagtatacttgttgaggtcttattgcccttaaagtatctcgttgatatctttcgagctgcttatctacttgtgcaacatctttcagctcatctatgtcatcatatttgcctttttgtttatcaaaacagttatcgtctctgcttgctattcttctaaagagactcctagatatgtccatttttcagaattaatggcttgtgaagatgagactatgccggatgaagccaaaactatttccttacctttactagagttgattttgtctggtaattctttaatataatcactattctatgaaattttattttgccttatcttataatcttctaataattctaatgtagtatttagcttattattaagaaaagaatattgttctacaaattgcttttgttctttatatatatcttctaacttttgctctaaatcttcctgtctcttaccccaatttatatagaaattatatattaaatctacaattaaatttagttggctattattagagtgccaactatgttcttcagtatggcttaatctacaccttatattgatattatctttgatatttattaactttccaatattagcttctaaatttagcttctctatgattactaggctctgataccactttactaggactaacactattcactactattcttagtgctgaattcactattatgagtagcagaattactgttcacagtcgttactgttcacttgaaaattttctttaaatttttaggatctttgcagggtggcggatccaaaaacagccggcgcttgatttagaaattttaaagtcctactcggtactagccgtatgcctcacttatctgcctatttaagcaaccatcttcaagtatccctagtcatatttgaactagctaagtgtttaccgtctccccaggcagttttacccgaggggaacacttctctacggatactggttctccagacgcctatacaagatgcaggttaaaaacgagaacaaccgagaggtttctcctatagggtccctagcataaacgcttgtctagagtattttagattttatatatatatatacacacacacacacacacacatacatatatatatacatacatacatacacatatatatatatatatatatatatatgtacatctagtacatatatatgtatatgtatgtatgttgtcgcgtgaataatccaattattttaggtaaagcaagcatcggtaaggttgtcatcgttgaggttggggctgcaggaat

SEQ ID NO: 23491 - DNA, 10534 bp, Oryza sativa
ttgaatcactaaatagcattcagtgataggaattatctgtagtgattcagtgaagcaaatgtactactaaactttccatgttacattatagaatactaaaaccttaaaatacaaaggtgcttgacagatgcaaggtaacctgaataatcacaaaataaaaaataaaaatggaaaacaaaggagcataataatagaaattgtatagttaggggaaaaatgattaaattgttacgtattactgtcgaagaaatttccccacaatagtccaacaacatcgataaaatggttgtggattatttaatcctgtaataaacccaagacgaaatcaaagtagttaatcctatgaagaaattgaagggaataattaaactgttagtgcaaatactgttatacagggaaaaaaagaagggatcaatttgggatactgaaatcggttggaaattcataattgaatcacgaagaaattagtgtgattactcaattagcatcaatcaatgtattataaaaagttttagctgaatgggaaaagaacctacgcaagcagtggaacaacccctttgttggaagagccgatcaatctacagatgtggttatatggaggagaagctacttgctggcggagcagagatccagggacgactgttcttgtatggagaggctgcttgttggccgagcagatcgatccagctgttgtgtaccacttttcttcaactgttgtgtatatcatcatacataaataggattagaaaaaaggccagaataatgcaagtaacgtattgtttcagaaaatgaagatgaatagatgggactgttccaaacaactaaaggatagttaaacattagattcagggtgggcaacagccaacagaacagactgccaccaagtctaattgctgcaaagctctaaatgactaaataacaaaactactactcaatcaagctgcaaatcaccacacgaatactaacttccattctaaatatcttcaagattgaatctttacaaagaacagcatccaaaagctcatacagacaccacatgtacactaaattctacccaaggcatcgtcaagattgaatctttagagttcagtatccaaaagccccagatttaacttccaaccctgcaatacccataccataaagaactcctaattacacactatagttttttttcccatgtacttgtgaggaccgcgaaagcagcttcacccaaggcatcgcctgctgctgctgctgttgttgctgctccttcttcctgcgcgagctcttcgctgcagcgatggccgtcttatccccttcttgatgtgcaacgaagcatcaaaaccctaacagctctatccaacaaacccatgtgcgtcccaaaaagaaggaaatccctcctcacctctcttggccgccacatcctcgcccgagctggcgctcttggcggacgcggtcgctgccgaatcctccttgattctcccaggcaccgacgtgtcggcaacgtgggcgctgcctccgcctgattcaaatcggattaaaaaccaccccgatggaaaatcaaatcaagaagaatctccgatccataggaggaggaggtgagaaaaaaaagtctctctcaccttggggcgcttcggtggagggccggaggaggaggaaggggacgggagaggagcgctaggatgcctcggttttccgtttcttgctgtgtgcgcccaccgacggttccgtttctccatacacgccgaggaggcggctgctgggagcgtgaagcacctgtggcgctagggtgcgatgtcgcggggaggagggggaggggcgactgcagcgccagggctagggggaggcgatgcggccgtggggcgggggcagggcgaccggccatcggatccgtgcgggggttggccgtcgcccgccggatcccgtgcctccatccccaccgtgtggaggaggccgccacgcgccgtcgcctatgcccaccacctccaccgctgtcgccgtgcgccgcagtgcggtcggggtcaccggatccggtagcctgggctcgtcgctggcaaatctgatggcctcgcttgcacagagcggtggcggcggcgcagagatgatggacggatgaaggtgtggggcggtggcacgcgtgaaaggaggaggaaaccaagagggagcaacagcagcgacatgacgacaatggctggaggagggcaagactgcggctgcggcgacggcgacggcgacgacgtgcgtgagtggaggactgtgaggcggcgcaggataagaggagggcaagagcaaggcgacgtagcccaggggagcgatgcggctagggttcagtccaggctagggaaatctgcaccgtccgttcctgtcacgccctgaagttcttctccctagcaaaaatccaattgataaattgttggaagaaattatttgtttaaagacaagagagaaatcctaaattaataaatacaaataataatcggaatcgacatgtggaatttttcttggattctacatgtcaaaatatgctaacaggaattttagtggaattttcagagcattggaaataattttaaccaattaaaataagcaatgtgcaatatttaaatcccgggaaaaatctttttcctttttcttctcttctttttccctttttcctttgttgggccgtcggcccactcatcccgcgcgcccgccctcctctcagctgggccggcccactccctccctcctctctccgggtcaccgacaggtggggcccacctgtcggccccttcttcctcctccagccgatggcaccgccgccgccgaaaccgccaccgatgccgccggtttccccgtttcccgcgcccactccgcccgtgccgcacgcccacgtcgccgcccacgtcccgccgtttcccgccctcgcgcgcgcccgagaatggtcggattcattttgaatccctcctctctatttctctctccacccccacgtcgccggccaaatcggccacccccccggccgttccctcccctccctcgcccataaaacgctcccccgaacctcctctcgcgtttccctcctttgttgcgccctcccgtgcttcctaccgccgccgcgccgtcgcaccgagctccgccgcctgccgccgccctccggtcgcgcgccgccgctgctagagccgccgccgcgcgaagccgtcgccaccgctagcttcgccgtcgcgggggctatcccggccgccgctcgcttgccgcgcgccaccgccgcaccgctctttccacgcgccgccgcctccaaccaccgctagccgttgctagtgccgtcgccgcgccgctccgttgccgctgttggcctcgcgagatcgaggctcgtctcgtccatcccgcgcgccccgctgtccgtcgcttgccgccgccggccgccgtcgtcttcacccacgccggccgaatccccggtgagaactccctccccttctcttcctctcgcgcgcgccgccgctcctcgcgtgcgcgtcgccgtgatgcgtcgttgctcgcgtcgccggccgccgtcgtcttctcgccggccgccgccgtcggtggccgcttgcgccgccgcatcatctaaccggccggccggtttgaagccgagccgggccgaccgggcgcctcgccgctccccccctttgtgacactgcccagtgggcccgcctgccagccgccccctctccctcccttagtgccgctgaccagtggggcccgcatgtcggcgccgccccacccttgctgacgtcagccctgggatgaattattgcgcaataaattcattaaggtttttcttttatagtaataaacacagataatcttctaaaaatcataactaattcatccgagctccgattaagtccattcaagtctcagtaaatcaagaaaaatgtgtagaatccattaaaaatggttttgttctctgttttagtagtcttatagcatgttttgcttgtgtgctttgtttgtcgcgtagatttcggccatttcgtcgatccgcggttccttgaagacgttgctgtggtctcatcagtgcgagagcaaggcaagtcatgcattacaattgatcatattgtacataatttacaaatgtcccgcatttctattaaatattgcattattttacaatatcatgtgggatgggtcctattactcagctatatgttgtttcccttgtgccattgataacttgggtatcgaaatgactagatgttggtttaggaaatgcttagccatgcctagttcaactagtacacaaaaggggaatcacattaatgcatagactctgattatcggcatagctttggtttagtgctaccgtaatggtgttggttaattaaaatacactacatggtgggctgtgggtgcatggttttgctagtcgtgcccacggcaattaaggaccagttcgcgggatgccctggaagaacttatcgtacttaccacaagccagcgtgggcaacggctaggcttgtagtgtagcttttctctagccgacgtacctaggcgagggtgggcgtgatggagttgggtcggccggggtgtccggttgatcggcttccggattcaccgcggcacgaaaggggggctgcccgttgcctgctggggacgggggcgaaccctaaggtgtggtgcgatcggttagagggggttatgcgaagggtcttgtcacggcctctttctggtatgtcgtggtggcatgtcggcgtacagaaacgtgtcgtggggctgtgtcttgtgggtacagttgtacacctctgatcagagtaaaactattcgaatagccgtgcccgcggttatgggcggtcgaccagattcaccgtgattagtctcacccctagttagctaatgaactggcgtagttcaggtggttggtcgggcctgttgcaacgtggtgtagcgttggacagtgactggttaatactgattaattactacaactgttttactgctttcaactactgcttttaatgctagctttatgcaaatgagctctttagcctaccttgggtatatcctgcatcctacctcctcttccggtatgacttgctgagtacagtgggtagtactcagtcttgctcttttttcccccacaccagagttgaagtccttctcagttgaagatgtcttgaagaggttggtttcgtcgttgccgtcaaggatgcctgtggaatggagtcgcccgctgcaggagtcaagtcttcaggcttagctcgcttttatcttttccgctgcatttgtaatcctttttatatttttgtaagacgtggatctgtatgtcaacaattgtcgtttgtgtaccctggctggtcctggacaggggtttaatgcacattcagcttagaaattctggttcatgaatttctgggcgtgacaagtttcccgacccgacgattgcacgggcgtggaagggccggcacaatgggacacgtattctaggagagatcggacggtggacggtagcgatgactgatatgtaattaactggaagtacagggacttttttgcaaaaactacactcatataatctcctaagtgcgggggtttatttgcaaaaggaaccgctgacgtggcatgcctaactctccagcgatcccacgcgctttaagtaaacaaatattacagtttggagctttttttttttttgagagctatatagtttagaactcaatctaagtgctcatttgatttagcgtttgaaatgagaagacctattacagcatgatcaattaaatattaactaccataaaattaaaaataagtaacatccaaaccatgatgaaaaatatattgtctaaattttataatataaagaatatgaaaatgatagatgatttcgggcctgttcactttgatgctattttcaaccataccattttttggcaaagttgcatacatatatatatatatatatatatatatatatatatatatatatatatatatatatatatgtgtgtgtgtgtgtgtgtgtgtgtgtttttagtttgttgccaaatttagtaaatacataaaaaatcctgtcaaaattttggtaagtttttttttgctacaatctgaacatacccttcattattgcccacggtataagatgagcttccttcctcgccataaagggcaatagcagtgcatgtatcctatttgagaagctaaagccccatctagggcctgtttagatcctccaaaatggtaaaagttttgccattttagagtactttgtgctattttggatctaaacactagtagcaaaagttagcattttgtcatttgtcatttgctagtctagggtagcaaattttgccaaaaagtgctctaggaccgcgcgctctctctagtactaaaatggcaaaattttaggatgcatctaaacactccatgctaaatcttttgccactaaaacttttaccatttgctattccaaatggatctaaacaagcccctagataagaaacggtgtaagaaataccctccacagtgcatgtggtcttaaatagaggtctttcttacttattatagtgggtcccacctttctcttctttctcacttttcatcttcccccctctctctctcttccctttgcctttccccactggccaccgacgagtgaggcgtggactacccaagtggcgacgtgccaagcggggaacaaagcagctgcgaggcagcaccacctctccggacgacggcgccgctgaggctaagccacatacgacggcaccgccgagttcgatggatctgaagtcgggtggtggcggcgatggctcatcggggcacggctacggctcgttgggaaggcatcagcaatgtgaaccactgctagagtgccctcgctaactaagggcactcctagaggaactcatctgctaatagaggccagaggtagttgggttcttcaaaatccgaagctattcggtgaggatactccaacccacaatggatgtcccggcctaaagtagtcccaggtgacaaaatccctccctagcgctctcgctagcccaccgacgtcctcgttgacataaaccaataatgatataacactataggtttgctttagtttgggtagaaaaccaaagtgaggcagtaattatatagtaccacttttgattcgtaccgaatcgagtgatgggccaacatggatttgtttttcctttttacaaacggttttgctatttcacctgtgacagattttttgggcttatgtttcgattttttttccatacgatttatatttctctagatcttttgggcttctatgtttcgaattttttgtctgcagaatttatatttctctacatctaacttttccatacgatttatatttctctagatcttttgggcttctatgtttcgaaatttttgtctgcagaatttatatttctctacatctaacttgcagttacactcacttacagtgtatcaaaattatatttttacaatcgtttttctctagatttacgatttttttatatgcttgtcctttttctgatttaatttaaacgggccatattcgttggttaaaaattctgcaagatttaaaactctaaatctgtcgagagatcatgagaagatcacgtagttccttaatgtgatcatcccatgtacattttcttccgggcatacaaaaaaccaactcttttttatagtatatcggttactaataagcactactaacactgcgtgtatttaacattaagatgacatattataactgctactcaactaaataagattttccacgttactaattaaccgcacgaaattaattaagccatcagcaagccgctcgtcgccgtcgccgtcgtcgtcgttccagcatatcatctgtgccactttcaacgcatgcagttgcagccatggtgcctcgacctgccgcacttcctgcacttgccatggagcgcctcgtcttctctgcgaacgcgctgcgcctccatgatccgggcgacgcgccacacgtcgcgcatggtggccgcgcccgagcggatggcggcggccgcgttcgccgggagcaccgtctggcacagtagctcggcgagctcggcgtcgctcaggctcagcgtcaccctcgtggcggcgttgagcgcctccgcgcgcgcgatccgctccagcagcggcgccggcgcgccgtcgagtgcgaggtcgtcgtagagcatcctctgcgcgacggcggaggcggcgtccgcgttgtcgtaggtgcgcgccacggcgtcccacgcgtccctggccgtgcggtggcggacgtagtccgggaagatgcggtcggagagcgcggcgaggatgtggccgcggcacaccgcgtcgtcgcgcgcccacatcctcctcctcgcggcggcatcgccgtcctcctcctcgaccccggccggcggcggcggcgggggatcgtcggagaggacgtgggcgacgccgacggtgtggaggcggagcagcatcgactccttccacctgaggtacccctcggcgccgttgagcggcttgacgttgacgttcgtcgccgccgctgccatcgccctagatcaaaccgagaacctggcagagacaaaccaaagcaggcgtggcgtcaggtaagcaaacaatgagactcgaagcggaggcgcttcttgctcctctcgagcatttgcacgaacaggtggtgcgcgtacgagctggactccggtaccgatcgccgtcgatgttcgtgcaggtgattgagaacccgaggggcgagggcgctgttggcgaggaggaagggataaatagggagatattttttttccaaaataaataagaagcagctcccgatttttctgccagattgatcaagtgccgacttcattgtagattagattgattcgaaacaaagtattaaaatgtgacacgttactatgagtctggacacttgttttttataggacggatggagtactctcctagtctcattttaagtgcaagtgttgatttatgtgtttatgttctcttttttaattttttttatgattagtatttttgtggttattagataataaaatatggataatattctttgcgtgacttaattttttaatctttccataaaagttttaataaagcatgggacagctgcacttaaaattgacggggagagtagcgacagtttgtttcaaatgctagtgcggagtagtagtgttcagtttggaaaacatacgaggatgttggacaattccgtgagtatctaactaaatctgatagttgagaattttgtttgtaaaggttttgtaagcaaattttaactacgcggagcagtgctcaaagatgtaacgtgccaatttgtctgtgaaagtacttttgtaatcttataaactcatgaaagttgataaacctgttgtagggaataattatagcaaagttttttttaagagaattatgagcaccccaaatttatttatgaaagaacgtatatactccatatagatccaccataattatgttttggataaaagttccctttttactggttattactcccttcgtttcagattataacatgttttaactttggtcaagcttcaaatttgatcaagtttataggaaaaaaatagtaatatttccgacccaagataaatttattataaaaatatatttaactattaatttaataaaactaatttggtaatactccctccatctacttttgatagtcatatttcatcttgacacacagacaagaatatgtaattctacttatcatccatttaaatatgctactagttattcctcgtaaagaaactattcattaatatttatatttctcgatgcccatggagccaatcttgtgtgaaagaatggagagtcacgcattaaatctaagaaattcattcagatgtaggttgttggattgaaatatgcctatcaaaataaatttttcagatttggaaatatgcctatcaaaaatagttggagggagtataaatattactatatttatctataaatataatcaaacttaaagcaatttgactttaaaaaaccaaaatatcttaaaacctggaacgaagggagttataattaacagcagcaaattaattaagccatcaggaagccacgtcgctcgtcgccggccgtcgttccagcatcgatccaaaagcaccatgatcaacccatgcagttgctggtatggtgtcccggcttgccgcacctccagcacctgccatggcgctccatgtcctccctgcaaacgcggcgcgtctccacgagccgggcgacgcgccagacgtcgcgcatggtggcgccgccgccggagcgcgcggaggccggcccgcccacgctctccgggagcatctcgcacagcgccccggccaggtcctcgtcgccgagcgggagcctcgtggcggcgttgagggcctcggcgtgcgcgatctgctccagcagcggcgcgttcgcgtagaactcgaggtcgtcgaacgccctgcgcgccacgccggccgagagcgcgcccgcgccgtcgtaggcgcgcgccacggtctcccacgccgccctggccgtgccgtggcggacgtagtccgggaagatgcggtcggagagcgccgccaggatgtgg

SEQ ID NO: 23492 - DNA, 29520 bp, Oryza sativa
agtttcagtgattaatcatcgtgagattctcgcgtggtcatcactagatgggaatgtagtgtcctgataaccttcaaattaaccttttgcctctgtcttgtccgtgtaggaagcaatcatcaggtgctaccggctaatgcagcaattgatatctagtaacaatgttgggagagaatcgacagagataacaatggcgacgacgacgacgacggcgacaactgctgtgagctcagaggaggttgtgtcctcttctcccccatcaaagaggaggaagatgtgaccaggcacatgacagaatttgatgcaacattgttaattttcagtgattattcagcatttgtgtttgtgatatacataggggtcctagtttaattagcagagtttggttttgtgatgttatgttcctgcaatgtttttttttttttttggcccttcctttaaccttcttgtagatagccctactggtacagttgagtcatcatgccagtggctgcaggttctgaactgccagtctgtgaaggaaacaaaatgagatagatttgtgcttgtccagttgtccttgctggattgtagtactagcaatgtgtgcagcaggacatgctctgattcacagaatatttacatggattggtgaatgaggccttgtttagttacaaactttttcttcaaacttccaactttttcatcatatcaaaactttcctacacacataaacttctaacttttccatcacatcgttccaatttcaaccaaacttttaattttggcgtgatctagacacacctggaaagggcactggagtgagctgaaattgagctggtcaggcataaagtcaaggcttggggtcagatactacattgttggctactccctgccaagatctgttcatgttcatcagggaaagtctgtctgctcctgatgagtgatgtgtagtttttttattattatttttttggcttgctcctgtgtgttatcaagtgaatccaaacttgaaaggggaagcataatgcctgtactgcgaaaggcacatgcagccataaggctttgtccatctcctgctggctcattgtgtatttatgtgcaaacaaagatatcagggcatttgggggacttgccataattttttgatatctgtactttctgtattggttatcattacattcatcgataagaatcgtacatctatctatacctatgttaatatggctatttcttatgagctttcacattaacaaaacgaccactgattagaatgatcgaattatcgtgcgtagatcgtgttgggagtccatgtcaaataaatcacacaattgaaaatagcatacactataatttaatagttctgaatttgtaattaataaatacattctatattgtatccatcttggatctcaatttaatgctctattaatttaattctcaaatctgaaattaataattattaagttgtaattgaatggtcacatggactccttttttaatataagcacatataatttcaagagcaattttatagtatttgaggaggtaacatgaggtattactttttctattgtaaatttagtacatcttggtatctatgtactaggaggtacaaaactttacactaaatacctcataatacttactcaagaaccgtaaaattgctctgagtacttgagttttccactcaatgagtcccttaatagggatggcgcctagtcaaaatggtgagatgttgtaaattggtgaaaaacaaagtctcggaattttcaacaaagaaggtaaaactaaaggtcataagggagaaatgtagtatccgtatatccataaagtaacttcaagatgaaacctactcatatttcatagtaaaatataaaaacaggagtaaattgcatattgggctatctatggttaccaagttttcacttcagatcatcctctcaacaacgttttcacttcggactaggaataattacattttgttacaatttggaccaccccatcccactccaactctttcttcttctcatgctctagctagttggtgtccacaactccaaatcgagctttggcagttcactggcgagctggtggtgtccacatcgtggtgtaggcaaaggttgggcatgaacaatttgagcagccaaagtgtgggaagaagaaatggatggagagggtggtccaattctagctagtccaaagagaaaacttggttaaaggattactccaagataaaactttggtaataataggtactctagaccaatgtgcaattcacttaaaaaatgtttgatgaacagaggacaataccattcatgaagtatctttttgttcatgtcttataaaggaggtcaagattaatcttgcactttttgaaaatccttccacatttaccctagtttgacaagtagtcaagtactccaatttacaataccagtttggattgctatcagatttaacataccgattttggtcaagaccaaatcccaattgcaacccaaaccaaacagtggctaaagcatggggtttggtaattttcactaccaaacagtggctaaaccatagggtacgtagtatttgcgcacaaatgcattactgttcaaacatttgcaaatctgaggatgcaaatagtacttctcctggtgatcattggatcgaatagccgaaagcaaagaaacatgtctgcaggtccgtcatacatctctagtagtattgtgtgtcatcttgtgtgcttccaaaacaatggaggaagcatgcagcaaaccaactcacaaggggcgtgtgacatgacatgacccaacaagggccaaaggcagccagccaagcagggaggcggaatgacatgtttcttcccttcaatgacatatctgccgtgagggagatacttaatttaaaattggtttttttttaaactaaaccggtaggagagctgccaattatatttttaataagcaggagtaaaaaccctagacgggttacaagaaaagaaaaaccaaccaccggctggctgatcaacagttacacagcacacgccagaactcactaacagctgaaaccactgacggagcccaacgtaggatgtcgttaccaacgttgaccaaaacaacatagggggttccgactttacaattgtgtcatcgttgccgagcttgccgccaagcgacacaacagctccaacttcaaaccggatgcaccatcagaacctagatgctgcaaatgatcaagtggcttcgacttctcacgatgaacatcagtcaaagccgcctaagcgccacaatctattcacggccaacaacaaaacccttagaaagaaaatgcagtgtgtcattgttgcccagcttcgtcactctgacaaagcagctccgactctatctagcaaaatcaaacaaagagcgaggtcgttcaccgcaaaacaaaaggtggagctagaaagcgaaggcctagtcaaaacctagggctgaaaagcttcgaagcaaatgcatagaccatcaacgacatccttgcacgaagaagtttcttcaaagcggtgcccccaaggaggacgcgacgtggatcgccgccaccgctcgttcagaagccgaagcaaggttttcacctggagaatgttaaggaaaggagaggggtacgctaaaacgacgcctccaaggaggggaacgacgccaaaaggcgtcgccgtcgtcagccggccaaacggctcggcgaggctttcgccagcgattccctgtccaaagccccacaaccaatccgcacaagaaggactgtcgtcggtcgacacattgtcccttcagcgatccggcctaggccactgccacatatcttcccgccgtcgacgttgcgcctacacccggtctccttccccacctccacatgttgccgccgccgccgacacaccgtcagccccttcggttgtgatggcctgccaaccatcaccgcaacaggcgccaccgtcgccagccgccaccgccaccgccaccgtcgccatccgccaccgtcagctgccaccatcgccagacgtcgccgccagccggccagatccggcctgggtggcgcggatctggaggtgcagcgcgccgcgcgggtcgtcggcgtcgtggagggagcgtcgacgagggtgtcgcgccagaggtcatgcggcgaggtccttgacgagcccggccggtgtcgcaacacgcgccgcggcccgccgacgtcgtcgccatatccgccaccagtgccgccgccgccacaaccgccaccagcgccgccaccaccaccgtcagcccccgccacccggccacctccctggcagatctagccggacacagcacggatctggccaccaccgcagccgccacggacagctcccccggcctccgagcgcagcgtgggcgagatgaggccctgccgccgccgtccttgcagccgcgcggctttggcggcggtgaggcggaggaggaggcggggagaggaaggcggtggcgggcgcgtcacctcccgagccgcccgggggagggcgatgtgggggtcgtggattatactaggacttaaaggacaaattggttttcttgtgagttctgttctttttacctgacattctagacaacgacacattatatctgatctcaaatgtaggtatttcattattgctattactaaatatatatctacaaaaactattaaaatataattacatgaaggtatttatattaggaaaacgtaacaacctctatgtgcgcgatccggaggcgaccgcagatccagcgttgcctggcctccttcccaccatctatcctgccgccactggaaaaaccgtgcggtgagcaaggagggtggtgacaggaatgaccattggtgcccttaatctcgtacgcgggtgacgtgtggtcgtggatgaagcccgctggctgttgcagcgcggtacgatggcaaggtgggtagccagcgacagctaggataaggtggaggtgacgtgtggtggcggcggtcgcgggggacagctccatggtggcaccgtgttgccaagcggcggcaacccaacacgacgacgagtgcgccgggagacaatagccgcctatcccttcgatggattttggcatatccgagtttggatctggctatggatattgatctataagctggtgccaaattttaaatcttaaaatttgatttttgaagttttttatttttattgaagtttatttttcagcattgattttttaaatcagtaatagcaatacatatataaaagtttgattttattttattgctaataaaccgtgtggcttataatcagcaatagtcctgataactcaaagttacacaaacactctcttgtcccagaatgatgcacactgatttgtcagccagagctgcagatcaaactggggcacgggcgctccccacgcgcgcagaacagagcaccacgaagctccaaacacattcctccatcatctcatcttttgaccggtcaccggccggccggggacctacgcggcggccaccaccaccaccaccggcagcgccatgacagcctgaacttgtgtttaagtaagccccaaagcgtagcaaagtattgcaggaccaacgaaaaggtgaggctgtgctttgatttgatcttcttttttgtgtgcatgaccacctactatacctctctttgattctgcaactctgaatctgaaacgcattgtgttctgacattgcaggtttctttttttttttttctctttggcctctggggctctttcatgattccaaaagtgcaatgttgcatcactggagtgaactgattgtttgctttgctgaattgtattattggaagagttaaaatcttccttagttactaccaacatcccaccaaagaaagagctatctagtctgttctacacgttaagtacccactattacgtcacttcgaaaccacatgggactaaactacactattactgcagtctatataggtttcaaatggagtgcggtgttacacttccaatcctctatggccacgtagccttgcggccagggttaccgatttcgaggtaaaaaccggttcctgttggccgcaaggctacacaaaaccggaccctactggtttcaagaacaaaaaaaggaatggactcccgcactatctctagttctttacacatgtcatggaggaataactcagtgaaacaacgcactgtctggtgctgtttgttaaaaaaaaaaagaaagaaaaaacttagagtgactgaccaagaaatccatgatctggtctacgttcttggttcgtctaccgattcatcaagaagagattccacaccggcctagctacggtgtcccgtgatgtcggctgtcggcaagatcaacatgtatgtttcgttcagctcctccagtgaaatggccccggacagctatatagcctgaatcccaatcagagatgcagtcatggatgataaccatgcgtcgtatgcttcagtaattcagtttagtaggctcatgtgcctctgaatctctgattgggaagttgcagtaggcagacattccagtttggatgccatgatcagttagttatcaatgccgatcctgtgctgatgcagttgttgggttgggtctgattagtgtgacgagcaggaagagacatttgccagtttttctggatctgctacatcattcagaggctttgctaattgatgctgtatttctgtctccaaaaaaaaaaaaaagtaagtgaaatctttgagaaattatgtgattcttggatgcttgccccgttctttttagcatatcgacttatcgagtcatatagattattcatgccatgcttttaaaagttcgatttctgagctactttcctcgtacttaaatatgtgatactaaatttaaaactttgatcatcaataactctaaaaaaatctaaaaaaatttagtttgaaagcataaaagacatatggatagcatactaaaatcttgttatagatgtggagtagaaaaaatagtggtcaacgacgtacatcaaagatcaaaaaatcaatgatatcatatactcctatttaaatacaacgatagtactccctccttaccaaattgatcattatacaagtttatataccaagatcaagaataatttaaatcacatcaatcaatatactatgcacacattctctcacaatgcatgcatcgattaaaacaccatatcaattacaccttagcatgcatacattctcccatactgtattaattatattctgataaaatccgtgtccatgcggttatatgatgattaatttgagaaattttaaatactctgcaactcttgtcccagcccatatacacgtcattacgtaacccaaaaatgttatagtgggcttggactagcctaggttatgggccagcccagcccaaaatgcatataggtttgatcaatatgggccagtgttgttttgtgccagattcaggcctgcatttttctgccgaaagaggcctcgctgatttgagtgaaacgttaagaacacattgaagagatgatgaactgcacaaacagatgcaaaagaagaaaataaaaaaaattgttgatctcttggcttgatttacacacatcagtttcctgaaaattctcactctgtttggctaggatattatcgttatcgattatggtgatataattactcccatcaaactatcgtcaggctcaaggatggtacgtaattgagtaaggatgcttattccttgtacataacaagagctttcatgacaacagaaaaaatacctgccctaaccacaagtcaaccacacaatcttgcaaattgtcacgttattaaatctctctgtctctggtcttcttgaagcaccaagtgagcaactttttttagtgacacgaactatcactgctttatcattattttttgtttactttgtggtttgtgcaccaccaacaggcagcagttcagggtttactttttgcatgtcgacatccctaactacaaccctgacagtgatcagcaaactttcagaaacagatgtgtcaatccatctcaacctttctcaggtgcatacatgttataatagttattgtttttgtaagtgtaattttatctgaacaatgtgtagaaaaatgactagaaaacctccactttggtgcttagaggttcctttggaattgagaaatttgctgcattcttgcagaaaattggaatagttgtatgaaattttcgtagaatcattgtgttccaaaggatccctgagtttgttcttcttttctctgcctctcaagggaacaagtgcaatacataaaaagtgaggcaaaatggtatttcgacaattaaatactcaaatttccattaaataataaacaggatatatgcaagtatctactcatcagccgcccaagttaagaattaaatattgcccattttcatcatgatcttgaaacgtgccggccaaatcagttgttgtcttgagctgttgggagcatgtaatgctacatcctacatgcaatgtattatcaatgcaagatgccattttatattgcgctctttttttccacagaacattttatattacaatttttaaaaatgccgtctttgcttgaacatacctgtatgcctagtcaaagcactgttggagttgtacccatcatttgaacattattgatttggtgcttcgctacattaagcatgtgtggcaaccgaccagtcactagtactatgaaccattattctccaaaaagaagaataaaaacaaaattttctggtttaacctccatatcaatgaataggcccttcaaacatctgtttgtcaatagtggaaaaacagaacttttttttaaaaaaaaagaggtgaaaatggaacctacttattctccaaaaagaaaaataaaaggagtgaagatgaactatgttcccttgttcagtcttttcctctttccctaattcctgcattatatagattttgctggtcagaaaagttcagcctttccacaaccatgatgcattgctctaactttactttcatcaaaaacacactagctatgaacactgtcttttcaggcttttagccatcccatgattgcttaacatgcacatataggtgtgtttagtttctaaaaaaaagttgaaggtttgaagaaagttgaaagtttgaagaaaaagttaaaagtttatatgtgtaaaaaagtttttgatgtgatataatatgatggaaagttgggaatagagggaaactaaacaccgccatatatgagcaggtaaaattgaccaaagaaccaaactatcaagacattagacatgcgcatcagcagtaattactagctacagcatgcacatactttactgcatacgtaatctcttgctgaaaagaaagaagagaaaagaaaacgaagtgttcagaaatcagaattgtttactctgcccaatgcagagcagcagttcacagttcacaccacatgacatggccctgtttagatgggactaaaacttttaagtccctatcacatcggatgtttgaaaattaattataaatattaaacgtagactattaataaaacccatccataatcttggactaatttgcgagacaaatctaatgagcctaattaatccatgattagcctatgtgatgctacagtaaacattctctaattatagattaattaggcttaaaaaatttgtctcgtgaattagcttttatttatgtaattagttttgtaagtagtctatatttaatactctaaattagtgtctaaagacagggactaaagttaagtccctggatctaaacaccaccgaaatcgcctgccgctctggcctctctgcagctgccacagcctctggatccggatctctctcccgtttcttttgccgtctctatcctgtgcagttacttcatcgcgtcaggatatgcagtgaaaaatccgctggggtgtttagacctgtttagacgggacgatgttttggactgtaattataaatattaaatgtagactattaataaaacccatatataatcttagagagataaatctattgagtctaattaatccatgattagtctatgtgatgttacagtaaacattctctaattatggattaattaggcttaaaaaatttgtctcgcaaattagctttcatttatataattaattttgtaagtagtctatatttagtactctaaattagtgtctaaatataaggactaaagttaaagttcctaaattcaaacaccaccttactgtggtggatgcatcaccaatctaatctccgacgagctcatctcattgagcatgcaggagttgatctaggggtgtgtttagttcgcgccaaaattgaaaatttgattgaaattgaaacgatatgatgtaaaagttgaaagtttgtgtatgtagcaaagttttgatgtgaaagaaaaattgaaagtttgaaaaaaaatttggaactaaactcggcctaggatggcactggaaatgttcaccaattggtttgcaaattgcaatgtacatgtgcctgcgaccttatggatatcgttggggtaaccattggttcgaaacgatccatgaaaccagcagcaaaatcgtaagaactctacataaagtgttgttttttggtgaaaatttacggaaggcattctgattcatgtgttctgaagaagactggtgcgcaatctcggagagggatctcgcatggttacatgccactgtgggctcaactgatgcatggccctgtagcatcttgaaattccattttcattctgagtagataatagattgaccatttttcctttttttttccccaagaccacatggatccaaacaacaaagaagatcacaccatgaacagtcccccccccctgttttttatactcatgtttgaatcagcagctagctgatgaactgatgatcctaccatcctagcagtagcaagcagtaaactacagcagtaattattaattaacaaccctgtgctgttcgttgcaaaactactctgaaaattctgaagctgcgagttcttcactgtgcaagccagcagctacgcttgacctaaccgagaactcttcacctaatttacatttctgatttctaccttcccaatttccaaaccaaaccctcctgtactaatcgtagtttaatcctggccgtacgatgtcagctcgccgactccgagatgctctgcagcgacggccgccaattccgccctctgccgccgccgccgccgccgctgctccggtgccggtctttctccgccggcttccgctcctgagtcaccaagaagaggggaattcagaacacaaattcagctggtcggagaagaagagagagagggagagagcaagaattgggcggagcgagtaatcacctggtgatcggagggtcgcctctgttcttctccggcggcggcggagtcgccggtctgcggttgccggtggtggtggtcggtgacctccttgcaccgccgcatcttctcctgccgcctcgcctgcagcgccttggtcacctctgcgcggacaaggagcagacacggattagattttagcctaagcctccatggatggaaatcgagcaagaagcagagcaatccaagaaagaacataatctctgattgatttgataccttgggaggtgacgaggcggtagaccttgccgaggagcagcgtctccttgggcttgagcagcttgatcttggtgatcttcgccgccgcccctccggactcgtcgccgacggccgctccgacggcggagtgttcggccttgccgccaccgccaccaccggacgaggaggcggagacacggagcaacacgagggcgacgtagtggcctgggttgctgcgcatgacgtccgccgcggtggccggccagtaaagccgctccaccttgccgcccgggtgctggatcaccaccgccgccacctccgccgcctggcaattccccatcgccgccgccgccgcccgtacccacagcccaccacctcgccggcgtcaccaatggctcccttcgacgaagaggaggaggaggaggaggtcgtcgtcgccggcggcgtgggagctgcagctgagcttgtggttgcggcggtcggggaagacggggggtgggtggtttatatcggggcgggaggtaggggagcagagcaagcgagcgagagtgattagggaggtaattaaattaaattagcctttgtttaatcataatggttggctgttagcgacgtgattaacgaaggggtcaacgtgttaattagggtaatacttctccatccacaagtagtagtccccgtcattaaataggtaagtgaatgttctaaatagattggataaatagtggaggtaggtgggaaagtgaatggtggatggttatgattggttcggaagagaatgttgatagaaaagttgttatattttaggacaaattctaagggctaaaagttattatattttgggacggatagagtaattttttttctccttccatgtgtattctataataagtttatttttaaataatcattacgttgaagtttgtagaaatagaaaataattgtattattttggtagataaagtaaagaataattgtatttagatttgatagagcagatgtattttaactattttgattttatgtttatatgtgtgaaatggatgaaaaacgaatttattttgggaaggacaaaggaggagtactccctccgtcccataagagcaagtttgatagtatagccatctactaactacaaatcatctatagccaatttaatagctcattcatataatagttatctataaaccattaatatatggtcccacatctcgcacacacacaacgtattgtagttcgtgctgcagctggctacaaatctgtagcccgcttttcttctctcttctcttctctcctctacatgtgtttgcagctgacttgtagcctactattgtactcattctaaaaaatgaatttaggatcggatgtgacacattctagtacaagataaaatgtatgtctaaattcgtagtactatgatgtgttatatctggtactctctccttcccaaattaatcatcatataatagaatccaaaatttctcaaattgatcatcatataaccgcatggacacggattaatgcagcataggagtatatgtgcatgctagagtataattgacatagtgttttaatcgatgcatgcattgtgataatatgtgcatggtgtcttgattgatgcgatttaaattatccttgatctttgtgcataaatatatatgatgatcaattcaggatggagggaatactaggttagtttttttataggacggagggagcacatgtttaggcatgtgaatgaacaggaaaaaggaattatttctttctgcccggccggattaattgatgtttaacagtgggctgcccagtggatagacttgttcttttgtttctacgtcagggcatgttttgagcatgccatatgtgtgtctcctagatagggttgaaaaatccacatggctgtatacggtgtaaaactctagttattagaagggaaaaaaaggaatgttaacatccacaatatttgtctaaggccctaagagatgtatatctagtttgcaatcgacgacgatatcgatggtggtcatggtcacatagatatcgatgttggtcttgatcatacacgcataatgtataccctacgttcttttagaaaaataatttctagttattaatatttacatgggtcccatcatcaggtttataatttagaagttgatttttttttagaatggagagagagagagagagaccaagtatagtagttaagaacagcatagccatttcatctcaattgactttctatattcttttcccccacttgttttctactaatatcaatatgattaggaatctacctgacatcaatttctaccattacattcttgaatgaaaagagagagaaaaaaatgcaattccacattttacacattgggtttttggatcttggatcacacttccatagttccatgtaccttcctcattggattcccacccttatttttctcccaaacttccaatctcagtgaaacatccacaacaccatattattctctccccacattttcacccttttgctgcctttccagtgcacaaaaaaggcagatcttaagctctccaaatggcatcgcccatcctcgacacgtgtcacgaccccactggtagaaactttaacttgccaacacccaatcaatgcaacgtgggccacgtggcaccagcgaacataccggtgggccccacaggtaagggctcccagctgcttacgtaccctagcctgggaacatacgtgtcgacgtctacgagatggccgtacagcttccatatgctcctaccgtagagagacgctattgttcactgtacaagtgacagaacgctgcacagatcagcgtgtcagtgatgttacctcggagacgtggtacttgtagtataatatacgtatatagatcctgtacactgtataaaatttctttagttaggttgtgtttaattcacaccaaaattaaaagtttggttgaaattagaacgatgtgatgaaaaagttggaaatttgtgtgtagaaaagttttgatgtgatgaaaaagtcggaagtttaaagaaaaactttggaagtaaacacggccttagtacttcctcagtgttttaatacataatgccatttacttttacatacacgtttgcttgatgagtcgtcctataaagcttacttatcatttattttattgtgagttatcttatcattaaaaatgatttaaaatgatttttatcttatatattcatataaaatttttagtaggtcaaataaaagttaacagtatcatttattaaaaagaatggacggttatattttattggaagcttctaaatgggcggtgatcatcccagccgtcggattaagatcggacggtcgtgccatgctttggaaaaatcacctcgtgaatggaatggatgtgactagagattaatctgagccgtcaaatccatcaagggcgcccatgatgtccatgatgtcactcgcagcatggtggcatcagtgatgatgataaaaaggggccaaaatagtggatgggccaaaagagaactcgtgttcatcatctcagggcttttttttttctttattgtgtttgacaatatgtagatgctaatatgcaaataatgaaccatgtagtttctacagaaacaaatgatgcactaataccacttctagtgctcatcttgcttgattcatattataagctagcactatagcatatcatgcctttggtctagaggcatgcagctatgcaaggtttttttagcattccaagtttgggatggtcaacaaaatgtagtttatgtcgtccatatgcagcattttcaatgcatagccatgaaaagagtttatcaatcaccatgtacttagtctaggaaatcattaatttatgttagtgatattactgtatataattgatttagtgggggatccagtaattttcagagctgggtcgaaacctaccatatataatactccatttgtaaataaaaaagaagagattttgggtggatgtaatacatcctgttcaaatttatggatgtcatatctattcaaaatttcttatattttaaaacgaagggagtaggctgctagcattgtctgattcgatattggctaacaatgcgaaacttccacctcttgcaatgcaccaatgagctcgaggacgaacatcctaggttagatctagctacctgtgtgcttcgcaagaatatcatatatgcttaaaatataaatggtttgctcaaaatggagatatgccacacgatattatgcaattattgtacatctatctacatgtgtggatgatgtagctcgccgcttttgcaagatgcggtttcaatttttggaagaaagatcgatagcttaagatcgatctttgtcgtatgatactattttcaaagttcaattgcagattatactaccgtttaaaatgaacctccgaggcaacatcctcattatgtgaagcatgcgggacaatgacaatttagataacaacgcatactttttgaagtgcatatggaacatagttcgattccatccatcaccgaattcaaattccgagagaacaaaatcagcgatgataaccaataaatatatatatactaccaaagaggattgctgatcttaactaattacgctatatatactaaagcaagatctttgtgaataaaaaaatgtaaaatacaacataagtgtgatagaggaagcacctttggtgtgtgcgagagctttcacaagcttcactccatataccagtgttcagagactatatttttttaatgtattaatcacaaatgtgtgtacagtaggggactagggatgtatgtgggtcagccacgaacccacttatagatcaaaataaacgggtttgcggcttatcttagcctataagtgggtttcgcaggttagccacttacacccctagcgtacagtatatatgtacatgtatgatgatatgtgcatcttttgtgttaatagatacctgtatattactattaccgcgggattaattttattgagaaacattaattgacctaattgttgatatttcatcgacactttgatcgaatatggatactccctccggttccattttaattgacgttttggataatgacacggtctacaaaatatatctttaaccttacttttctattgtaatatatacaataaataaatgcatgcttacttttattatagtactttaaaagacaaatctatatatgttgttttagtttctttaaactaaatatttttaaagttattgatgatcaaagttataaaaatttgatctcaactttatccaaaacgtcaattaatataaaactggagggagtagttgttaaacatgaaagctcctttataacaaataatcatattaactttttctctagtcaaattttttcaagtttaacctaatttataaaaaaatagcaaatatttttaacacaaaacaaatataatatcaaaatatattaaatgttggttctaatggaactaatttaacactatagatattgctaaaaaaatatttaaatttaatcaaacttaaagaaattttattagaaaaaagttaaaatgatttataatataaaatgaagtagaatataacatggaaatagataaggaacggggtaagaagagagatatattataggcatgtatgtatctttgttaattctgtcctgatctcttgctttcatccgatcgaggaagctaatctcgtgagaacttaagagtcaaaattagtctgctcgagcatgcagggttacgttttccacgcaccgaatcaaatcaagaaagagatcaagagccgtctccacgaggccatgtgccctgactgctgctgatcttgccttagttaaccgagaagatcctaccactcgtaataattaatcactgccgaggcttaattaacttacagcactgtgtgacagtgacgacatgcccaacttctgcacatcactgtttgatttgatcaattacttgtagaaaagtgagtttatactgacatgggaattgggactttggctgtgtgcattctgaatttaaaagattttcctttatcaccttctctgttttcttggattgcaggctaatgcatgcagttaaggtcaggagtgttcttagtaaaattttatctccttcatggaattggatgagttcaacaaaactttcagatgatttcaataaaactttcattatcttaaagatatacttgtagttatatatggtatcaaaattaaccttttgagttcaggcatgatggaaccactactcccaaactaatcatggccattctagagtgcccaagaggctccaatccacatgctcaaaagggccattagcaatgcgcacacctaattcatttttaataatgacctaattaatcctaccatttgcctaattgccttttgcatcgcacaactttactatgatcattggtctacctagattgtatttaaatcactaggcaccatgtagttagtgtggtgccggatcatcttagcaaaagtgcagctaaccacaagtttgttgctgctgccatcacattcagagacatttaatttcttgccttaacctttctcatttactaattctcttctcttccaattctcttcctcttgcgtgtgccaatcctcttgcttgaaagggatttatactgaacggaataagggattttgcgtcttggccataaatcctttgaggcctatcaatgtcgtctcctcgtgactatgtactagatacaaatctccggagaaatactttgttgtagttgatgggtccaattgcaagagattcttcagctaattattgggtagatagacatggcaatttttgggggtcaggactcaggacaacaatgactcgtaagagtgacattgccactgaacaaccagacctagctaaacatggtaggagaagccaaacaattaatcacaatttagtgaaagtgaccggacccaaatcatagtacaaagacacaatcattgaaacccttgctaactgaactctagagaacaaaggtttttttttttctgaaatcatttggagcttgcaaaaatgaaagaactgagattgaattaagatgttcacgaagctgaaaaaaaaaagggcaaaatatggctccattctaacgcaggaatctataaaggtgtagcttatttctcaaatttaagttctttttgtagttgatttttaaaatcagtcttaaagttcttgattgattaaaactcaattttctagtgacacaatttttcagaattagcttttaaacgctaataacacacatataaatgtgcattaattcgcgaaaaacacacttataaaagtgattgcttcttaatttctttttcgtggcttatcagcatatatagttatcagagccgcacaagaattgcaggccaagcagggttcacattgactcccaaatccatgcctaaccagtaaactaatccccaagtgttagccggttatggcacagccagccgccatgcacagaataccctaggcaaaccaatacaacaacacatactctttctctattaattaacacaccctaacacaattaataaagatttttttcctttaataccatttcttctggttgggtatgtttcctagcttggtgataacactagatggcagtgtaaagggagctggcggcggtaggtcgtcttcctcgttgccggtcggcaccctcgcccttcctggagctcctccccttctttgtggggagtttctaggttggattgaggcggcagctcgtcagcgggggaagctcaggatgccgaagcaatgccatctagtcccaggttctccttcggccaaaaatggcgaggtggccggctggtggtggaacggaggagtcctggaccagctctcaggggtggtggttcgatgaagtcggccaacgaaggggcgtcggtgcggtgtggtgggtgctgcgtgctgccttttgtctgtgtgggggttctgagttggtggacggcgatctgcagtcaagggtgtagggtcccaggtaaaagcctagtccggtggttcaccgggccggcagtggctacgtcttcgggcgtcgtaatctccttggggcgttgtcgagggtttccctctccctttctcgatgagtttctctgggtgaaaaccacatcttttttagatgggtgatggcggcatccttggatgtcgtgaccaccgtggtggcatcgttttcggagtctcttctctgtggtgttgccgtaggcctagcggcgttcggccacgcttagcgggggtcgtctggtgctaggcttcaccctcagcgttttgtgcttgggtggtagtgcgtggtgtgtggcaatgcacctcggtgcattttgttgttttttcttgtaacttttactctttaatatactcggctggcctccttcggccgtcccggagaaaaaaaaaagataatactaggcctgcagccctgcatggctgcaacccaacaagcagaaatggacactggaatcttcttgtgttcctgctgtcctaatttgtctccattagaggacatggatccttcccaagtgcaaatctcctcatggactgccctccccatgggggaaattgcagggggcaggcttgggacacagcatgacactgggttttctttgagcctcaagaaaaggttttttgggtctatggtctagtggtgttatgggctaagcaaaggaaaggatttgactggtgtgttgattaatcaacatgctaattattggggactgactggaagttggtgtacccctgcaaattgcaatctctgcactttttatctgtaacatagatgtgcatattttctttctctgtcaaaagtttttggctgaagtgtcaatgtgtcaaggtggtgttacagcctttcttctgaatttcttttctttatcttcacactgagtcctgactagataaaacactactggcccaagccaatccaatctaacctaccaacctgctgctcctaccattttattccatttttgcaagagtgagtcattgctcttgtctactactgctactaattattcactcatgtagtgttggaatgatggttcaaaggaatcaatcgatcactagcttgcaatacaaaattggggaggactcctgtcatgaaatggattattagtattaacaaatctgcactttcacctgctgtctgggctgtctaggtgtctccacgtgtttcagagttgccgggaaggtcctaatggggattagatttattgggagtatgaaccaaatctgttgttttgttaatttgtgcaagatttgattatgcagccggtcagtgtgagaggtttattccatggaccacaaagaattgtgccctaactactaaacaaatgtgtaaagtccgtgtgtaatggcgttagggagggtgaagaaactcggtgaaaaacacgtgtaaaaggtactgatgcttctcctagctgccactaatggttatggacagctgcaaatgatgctcaaacatggtgaggacagattattttgttcaaatttttatggctatggactcgtaactagtcgatcacaccacacttacaccaacacactcaaatatataagcatattacttagtcgtagaagaacgaacaaaacaaccagaagatgaaaagaaaagaacactaaaattaattgtggaaaaaactccaaaatcaactttaaaattaaattctaaaatttaaatgagccatggcggtaaaccaaccagtaaacaaatattttgtttggggagcttaaaaatctaaaaacagctggtttgtatctagcttccgagaatttaaaaaagttgattttcccaacttctgatttctaatttactgtatgggttctataactacgtattttaaaaatcctagccaaaaatctagatttttaaaaagaactagatattctaaaagaagctatagcctccaggttgttgcgggtcgccgccgtcagagctatgtccgcccccaattggatcgttgctgggggactgaacttactcttgctggcccatgtggccatgtatatgggccggcccaaatccatggcccatgtgacccatgtatatgggccggcccactccgtacgcgcggcgggccgcaacgcaaccccacctggccgggcccgtgaaatgcgtaaagcgccgtccccgaactgcgccgcatttgaccgattccggcggcggcggcggcggcggcggtttccgggacgaagaggcggatcggcgccggagatccgacgaatccacggcggcaccggcggcggaggtgctaggatggaatcggggccagcatttcttcaccccgcacattttgaatttttgatccgacggtttctgtgactcgaggccggagaaattggaaagccggcgcgtcgtcgtcgtcgagatcggcgccgtcgtgtgcatcgatgattcaacgtggtcgaggagaggatcgctcgcgctcgcggcggatcagattcagagaccgtccccaaacctcatgtaagttgttttagacgcaccaaataattttgttactgcttcttgtaatttgtaatatggttttgttgctgctggtgtttgtgtttctacggatttagattttagaatgggctgaacagactgaactcactcttgctgattttagtgttgattttttttatattttcttttgctgatttttattttgttattgctgctgctgttctctaacgctggtgattcttggaaggcataccgcataaattttgatgtgaattgaaagggtttgtactccctcgttctctaaatgtttgacgccgttgacttttttaaatatgtttgaccgttcatcttgttcaaaaacttttgtgaaatatgtaaaactatatgtatacataaaagtatatttaataataaatcaaatgataggaaaataattaataattacttaaatttttgaataagacgaatggtcaaatatttttaaaaaaatcaacggcgtcaaacattttgagatggagggagtatttaggaacaatggtaatgcagtgatcactatgagatgcagtaatcaccatgagaagatgcacaaaaagtttttttaaaaaaaatggcgtgctgacgaatgaggaatgatgctactaagcactgtgattctccttgggcaaaacagaagtacagaatcctgaatctaccttaccacaaggggaactcctagcagaaagctctcaagattcaagaacaacagatcaaccagaagcagcagcccctccctgacctctgtactgaaccaaaatgcaataatatgtggcatgacagattagtcccccaaccagccaaaattcacccatcctaagatttacaaaaccatcgaaccaacatcgaaaaaacatgcccccatacaagtagaagctgaagctcccccccaattctgctgcggtccgaacccgagctaaggcggatcacacggaagggaagaacttgttcaagttgaacggcagagagtagaactcctcgctccgggtgtccgtcttgaagctcctgaacttgtcccaccagtggtatcccctgtctctcctcaccccattgtcgcgcctctggatagtgttgtctaggaagtacgcaatgagccctgcgacgaacggctttgacgcgaagggtacatttatcatgtcattgaactgccatgccaaaatgatgaacatcagtaacctgtaaaggatttagctggaaaaaaaaagatatatagaagtacaagaaggttggaggttttctttacatacccatcgagcgccggtgtgcactggaccataaccggcaaccgatgtatactcgttgaagtactgaggaaccgataagcccatgaagaacgagaaccccacaatgaacttggtcctgaagctgttgagattgcagaactgaaggaagctcagaccacaggcacctgcaaatagaggcattgacaatttggaaactgcaatgtgcaaataaaagcacagaaataatcaaaagcctggtaaagggtgctgaatatctggaccacttaccaatatatgcaaagaagatgcaatacagtgcagcgaatattggtaagggaattgacgcaaagattgctccgaatttccctggtttagcataacaaacattattagcctaggaaatcatatggtactctgattctgtctatccttattaaaacttatatgtactctgattctctctatccctgcacacgacaactacgagcctactagatttttcttctgaaagctgatatggagtactaaagttagaaaaagcactgcacattaccaaggatagaaaagaagatcatgaagccagcagatatttgcactactctccggctgccaacatgtgtcaaagctagcaaaccggcattttccctgcaaagatcaatatggattatgacctacttaagagacaaatgggaagaaaaccagttcccaagtaatccaggccactaatttaattagatggtaacattacacttacactgatacagcagttccattggctgtcccgaaaaatgcacctattaaagtaccaataccctgcaaatgatactcagcagtgatcagtaaaacctagcgattgactaagatgatgcttctgggggaaaataatcaacatgtttacctgccaaccaattccacgaccaagcactgatggaggtatcatagtcgcacttgcatatcttgacacagcaatgaaggtcccagttgactgaaagatagtagtagcagcgggttaaaacttataaccagcaatctatgtttcactttcaggtaaagctgtgcagacaaacctctacaagagcaacaaatgaggccatcatcatggcaaaagattcaccagcatcaaatgttggagccccccattgaaaagggaaaggaactcttatcctacaagatttttttttcagtgcttctatgatgagtactatcaataaagggcccaggaagagaaatgatgaaacactcatgaattgcttaccatggagctccactgataattccagagcgatcaacacgacagtgcacttgtgtcttcggccgggcattcttgtatgcgccactagcagttagaatgtatgcatacagccacacaatagcaatggtgaaaatcacagcaaaccggtcgaacacgggctttgccacatgtatgacatggggtaaatactgcacaagggggcaaatgcagttagctcatgactttcagcaaccacagctatacttgtgtgaatatgcattatgactgctgcaatcacctgagaaaatacaagcagtagaatgatttctgggagcccaatttccacgcactttgcaacctgcacatacagttgtggcactaaaatcagtcttatgaggtagggaacagccaaagaaaaaaaaaagaatctccaagctaactcttacccctggaaaaccaagctcatagaggccaaatccagcaagtgagatcaaaggaacagcagacaatggactaagaagtctgtgaaagagtgggcaatggtcaagccacaaactaaaacaatacattgtgcaacgagtcgccaaacctgataactgaaacactgcagttggcaagcctgcaaactgaaatgatgcaattgcacaatgtacattcagaagttcaacaatgatacctacctaactacattgcgccagagaccactgaaaccaagtatgatctggattgtcgatgcaatgatgagagcaccttgtgttcctcgcattgtccgcaagaatttcttcacagcagtagcaaaatcttaccaactttacaagatcacacagaggatgtgacaatcttaatgcttagatacagctagtgcggatactacctcatgaggatctgcttcattgctatagcggccagccaatatgatggaaattgtcggcgcaacaatggtgtacgatcctcccatcacagctggaagacgagtcccgaagaacgattggcagagggtgtttatcccggcaacgaacagcagcgtctgaatcacccgagccttctcctcctgagtggcaatgcaacgaaatgcaggtacagttcatcagttttgacatgcaagctcatcacaaaattacagtagtaacagtttagatcttctgtgacattcttcaaatgcacatgtcaacaagtgaaatcaaccaagattcagatattggaatacttttcaggtgattcttggggagactcacatttccacctcccatctggggaacaagagcactgggaataatcactgatgtgcccagcatcacaatgtagtgctggaatccaagtatgacggcctcagctgcaggaaaagagagattcaaagtttcaaacccatcaacatcgtcaggaccaggtgtgagaaccaccagagtgaagtgaccacaaactacaaccaaccaacacaagcaaacctaggaggccgacatcgacatcgacatcatcaatgctgcaaatctatacggctaagagaacataaatgccacaaagtacagtggatgattagcagctccgccatcaaaatcaaaaggcaaagatggccttggtgatatagagagagaatcagagaagaagaaattaagagacgtacgccatggcggtgggctggtgatgcagtaggacacgctgggcagctggtccttcacctggtgaggctgcaactcctcctgcttcggcggcggcgccgcccctcctccggccatcctccaccacctccaagaacccaacaaaaatgggacaaacaaaggcaaaaaagaaaagaaatgcaggaaccaagaacagggagtccaagaaccagaacagtgcagtgaaagcacaaaactcagagagatttcagagagcagcaaacaaaggcggctaccgattctttgcgtgcaaagaggagcaagaacaaaggaggatgaaaagaaagggagacagctacagctgctgcttcttgctttctactactactcctcccagtgcgcagtggagtgaagcagcagcagtgcaatgcaatgcaacacactcgcagctagcagctactacctgggtcgaaggaatctacaatgctttgagcttttcctccctcttttatgtttcccttcttttctctcgctaccagcaatgctttttttctctggccatgggatcggagtttcgcctttgcgccaccgcctccgcgaaaaacgcgccctccgctcctcttcccaagttgttatctttttcccaccaccgtaaaggagatggcagagagaggaaaaaagattgcaaattccacaatgggaagaagttcgggtctgtttggttgatatcttcgggtctgtttggttgatatcttcggtatactccctccgtcccaaaatataaacatttttagctatgaatatgtctagattcataactaaatattgtaacattttgggacggaggtacttcctccgtttcacaatgtaagactttctatcattggtcatattcatatatatatatatgtatttagattcattaactatctatatgtatatagattcattaacatctatatgtatataagcaatgctagaaaatcttatattgtgaaatggagggagtagtattatatttaaggttagctaggagtatgtcacaactttttaaataactatttggttcattgtcacaatagtctcttgtcaaactttttagacacatggacttccttgtcattgattcaagtttttaaccaaggttgtgtttagatctagtggttgaagtttcgtcgtgtcacattggatatacgtgcacatatttaaagtattaaacgtagtttaataacaagacaaattacagaatccacctgtaaaccgcgagacgactttattaagcctaatcaatccgtcattagcaaatatttattgtaacaccacattgtcaaatcatggcgcaattaagcttaaaagattcatctcacaatttacacacaatctgtgtaattagttatttttttcatctatatttaatattacatgcatgtgttcaaacatttgatgtgacagggtgtaaaattttgctagggatctaaacaaggcctaagcttgtaatgtggataaggatctataaacataattctgtgataagccacaacttatcacaattgtgatttgataaagttagccactaaggccatcaacaatgcgtgcccctggagagtagcctcgcaaatggcatccaacttccgtcgtcgggtcgtcccctgggagggaggtgcgacccccacgcgggggacgagtggctccgggctcctcagctcacttttcctgagctactccatcggggctacgcattggggtgacccgatgccccgtccccacctcctcccccattgcttccccatgttgcccctcaccggcagcgtgacaacgagagcgagagagagagagagagaagagagaggcgacggcgacgggcggagacggcttgaggcgcccgtgctcgccgccgaggagcacaaggacgacgtcgtggtggtggtcatcgcgctcggggacgacggcgacgacggccaccgtgcgccttgcccggccttcttcgctgacaccttgctcgccaccgctggcgccgtgcccgctaccgccggcgctgccactgtatcctccccgatctggccgcgtggagctcagatccgcccactacggtgccggatctggcgcccctgaccggcgacggcacgaggtggaggatgccggagaggacagcgataggcggcaatgggagagagggagagagaggggcggcggtggacgccggcgacgggagaggcggccctcctcgtcgtcctcgcagccgtgtgcggcgagagggagaggcgagtgcggcagcgaaaaaaagagaatagggggcaggagagagagatcagggatagggtagtaaaaataaatatgtggttttgtaggctggaatattcattatgggttggagtgtctctattaagttgtttcagattttgaggagcccatccagagatatcctttattgtgagctgagtttctcctacgagtgttctcagttagtgagtacactctaggagtgactcacattgtagaatgccctaacggaaacaaccccaaatcttcaaagtttttcctctctagagagtcttttatctctctctagtgtaggtagagaggagcagggaactttttgccactgcggtgcaaagctttttctgctttggctgctgctgctctgcttttgctgcggctaaaatggaagaaggggaggggaggtgcgtggagttgaatgctgctgggagcgcatgtgagcctgtgtgagcagagcagccatgggcaaaaatggacggcctctcctctcctcgcagtcgaaacgcaccgttgcgtgtagccatgtggtacgcgttggcgtttgccgttgccaactcctcatttgcctttaccgttgccgttgccatctcctcatggctagctgttcacgcttaggcgcgagaaattgaacggatcgagaagctcaatttccttaaaaaaaatacatgaaatatgcataatcttacacatttgcgattacacactctaacacactaggtgagttatctagagctttttaattttagccactaacacttctcaaactgctaaacattgtttcatgaaataaaatcattataaatgtttttttaaagaaacttgattctcatttttaattttatagtagttaatatttaattaaacatgcactaattaattattatctcatttcacgtatggctgattagccaagctaaaaaactgaaacgaactaatcctaaggctgggcttagctagttcatggcatgaggcagatgatcagcgtgtgattaattaactttaaatactacaaacttaaaaaaataatttatttgatttttagtaaatttatatttttcacaaaacacgttgtttgtaattcgggaagagtgttagctaatctcaaccatagtatacacttaaaaaggtcgatgtcaacacggtagcacttgattttactaaagtcctgggtaagttggattctatatgaagaaa

SEQ ID NO: 23493 - DNA, 10132 bp, Oryza sativa
accccctcgacccaatccggcgcggttttgtcctacgtggcgtacgcgtggcaatccagtcagtaccttatttattaaaaaatggggtccccctgctcagctcgcgggatgaaggatcggcgcagcctgctcagcccgccgtcagcctcagctcctcgcccgctgcccgtagccgcctccggcctcggctcctatcccgccgtccacagccatccccgccgccggccgcccgtcggcgtcggctcctcgcccgcccgccgtctgcagccatccccgccgccggccgcacgtcggcgtccgctcctcacccgcagccaccttcacgacagcccgccgccgcctccgtgcccgctcacctccagcctcagctcctcacccgccgccggccgcccgtcagcgtcggctcctcgcccgcccgccacccgcagtgttcagttgttcaccgagagagaggggggagagaaggagaggaaaaaaggtgttgatagctaggccccacccgtttatatttgtttttgctgactgtatcgccacgtgtgtgccacgtaagctgaaaaccgcttcgaatcgagttagggtggaaatttagccggttttaagtgtttggggtgtcaaatgtctggtattatagtttagggggggtaaatcgtattaccgtaatagttgggggagggtaattcgtactttttttctttataaaaaggaggttattatttttatggaaggagtacttattagtgtcgattactgttgttccgaatttgaccatcagtaagttttactcctaatcatcaatgtatattggacatttacataaaaaaattgtatattggacatatatgaaaaatattcttaaactttagaaactgttaatcacgattaatttctaagaggatttgggtgtgtttgtttgtgctgttagaggagctactccctcctttattgtggacacacttatcaaaatactaaatggtacgttttttaaaaaaaaatcctatataaaagtcttttagaaaataaaataaatcatttaaagtttataattattaatacttaattaattacattttaatggtatgcctcaattcatatgccactaagtaagctgagccaaactgcacatttgaacgaagccttagtgtaaaaacaaaataatggttagtgtgacccccttttatttaggattttgtggaagaattttgtaggatttaaatcgttatccttttgaaacaaaaaattagagctttccaagtcctatagaaaaattcctatggaatatctcgatgtaaattttggaataaaattagtaagagctttaaccttttgggaaaaaaagagtccaaactacatataatttgactaaattatcataaaactatatatttaaggtgatatccctcacaaaactacagatttaacaataaaattatcacaaaactacaggtttaaggctaaatatcacaaaactacagattttggggtttaaattcttagcactaatgctatatttgagtgatgtatgtccaagttttctgattgatattaaacatatagttttaggataatttcattagtaaatatatagttttgtaatacttagccttaaacctatagttctatgataaatttagtaataaatatgtattcttgtattatatcatgttaaatctatacttttatgataatttgattaaaatacctatagttttgtgtttactaaaaaaaatccttctgaggatatatctctcttatttatttgattcctgcattttttcttcacggtcattcaagtgattgtccttgtattttatttcccatgcatttttataattctctattttatatatacattcctagcaaatatgttttttattcccatatctaccattcttgcatggctataaatttgtcttggaagtaaacttattatattttatagacttattctgacacaaaagagatggcaaacgttttaaatagtttggcataatattattcttagcatctgatatttatgacaagagagtgtatactattagattatgatgaacaaaagttgcatgattctattcatgatgcaaattagtttgataacatgtcaaaattaaattcaatattgtaaagagggtaaatcaaaatttgaagatgaacgctactcgtattatttgaaaatagagataacagcataatatatgtatagggtggtggggaacatggaatttattctctcgagacaggatagagtgccccactgatgagtataccctacacacactgtaaaggaaaacatgcagaatcttgctggattaatataccagtcgaagtacatccactcagagggagtatattacaaccatgaccacgaggaggactgaaccagttgaaaacatgccgaatcttagttagcataagcagcacatcactagtagccaagtaatcctgcctcaaatcttggctttagcatgcaatcctactataataatgtctatttgaattttatcacttcgttttcttatcatatatttgtacaaattattgaaagtataacaaacaaagaagtatttgttaatgctatatcaaatcttagtatctttatatatatatatatatatatacatatatatattagtgatttaagattgtaaaaacttgactcagcaacaatactacttatggagtaagcattagtattaccttgaccactaattattgttaaatggtcagactgtgtttaccatctttaagtttttttgtaattttctatagaaaaactagaggtcaaagtttgatgaatagtttccctatgaattattatctccatttaatattatagaacttcaaacttcttttagatctgaataagcttatagaaaaagatattaacattttgaagacaaaatgaacatactatcgtatcaaatatattcgatattgtatttaatatactaattcggtattataaatgttttttattataaactttgtcaaacttttaattttgaaaaagtcaaaacaccttacaatataaaaaataatggagtagtatttttttaaaaaagtgtgctatcttgtttggatgatacccacactattcatagaaaaatatgtagtgtaaacatgtaaactaccgttagataaacaaaataagcgtcttatatatgtccacgtcactatgagtgaaacttttaatgatggttaaatttaggagtaaaagttttacataggacaacatagataattctcagtcatctaatttttatccaacggtagtttttaggttcgcactacctatttttcccatttttccctactttttttctaaccatacttagggtgtgtttagtttacgccaaaattggaagtttgattgaaattggaacgatgtgatggaaaagttagaagtttgtgtgtaggaaagttttgatgtgataaaaaagttggaagtttagggcctgttcactttgatgccattttcaaccttaccaaattttagtaaagttgtaaaaaaatagctacatttagtttgctgccaaattttgataactatataagaaatcctgccaaaattttggcatagttatcaaaatttcggcaatgccaaaatttagtaagttttttttggcattaaagtgaacatgcccttaaagaaaagtttgggaactaaaccaggccttgggacaaggttttgcaaaagaatgaggttatggactttatgatatggccaagagtttagcatgacaaaacatgacatgcaactaaacagtgtcgtgtctataaggacaattttgccagtggatttggtgaaagcatcttggctttaacacagaccaagaccaaggaataaaactgaagtgtacgggcggtcaacatgaggattgatagtactactcctacaccatgaacatgaatgcagccgttctactactactccgagtatctctcctcgtgcctctgccgcctgcttgtgtcatcgtgtgcaagcacagtagcacgcctacacaccatcaatggaatcagagcacagtggaggagacaggacgagtgtttttgccgtcagctgcatccgttgcctatcatttattattatattttgtaacctagaaaaaaaaacttttatgtaatgttggtatgtacttcctctgagaaaactttattaaggaaaaaaactaaaaatatcccttgttaatgctccctccgtccaaaaatataaacatttctagttgcttatccagatttataactaaaatttattatattttggacataaagatagtaagtactactggtaccatttacacgtgaatattaaaggattaaacttcttgaattgtgaatgcggacatcaatgtccgaattcatatgtttcggatgattttaagccccttaataaattggatttttatggattaattttaaatgtgttatagcgtgtttctacgagcataactattatcaatagtctaaaagttaatataaaaaatagactacatttccttaaaagaattaataaaagacaacgatgacaaacactaaagggtgtgctcgaaactgctctttcaccacaaattttagctgcatgcaaaacgagatgaattattagtttatattaattaattgagtattaaatataaaatgcatttgtaaaaacacatcgtttagtagtttaaaaagcgtcctcacgataaatgagggagaaatagattcacactcatgtctgaactcagtctaacttttaaaatttaaattttggccgtggccaataaactaacaaatagattaggaaaagtacgaattacccccaccccgaactatcgcggtcgtccgaattaccccctgaaccacagaaccaaacattctttacctccaactatgcaaaccggacgaattaccccccctcaaaccaattcagagcggttttgtccaacgtggtgcacatgtggcaatccagtcagtgtttttttaataaaaattgtgggacccgcttgccatactcttctcttcttccctccctctctctcttctctctctatctctcgcatggcatcggccgccttcccctcttccctctcttcactctctctctctcacagagtcactgggtggcgcagggcagtcgaaggatggtgcggccgacgacggcagcttctggggcggcgcgtgggctcagggcagcgcgagctcgccggcctccctgcccccctcatgcaggtcggcggggggtggcgacgcagcagcggcaggcgcggaggtggaagcatatggatgcggcgccggcgagcttagggcagagggagagagtgtaggatcaagatgtcgactagaggagggtgaataggcgatttaaaactaaatgacacctaatcaaaactaacctaagttgctaggcttggtgagggtcaactctaactaagcaactaagttatgttttgcaaacctagggtgatagtagctcaattatatctctaggaaagtaaatcacactcctatgtcaatgtttagcactcctagggtgatatgatctcaagtatgtctctagaaatgtaaattgcacaaatgtaaatgcgacaatcaaatgagacaaggagacaagagatttttcactgaggttcggaaactcgccagtttcctactccccattgaggcgagcccaactccaccgctcaaccacgaagccaccgcacgcccccttcgtcaaggggtgggcaaggcaggagccggcccacagagaggactacccaagcctcgatcactcggggtagttcttccttcactccgaatgtggtgaactccaaaccactcacaaaccggcgccgggcctcctccacaatcttctcggagagatcaccgggcaactcctccacaagccatctaggaggcggcaacctccaagagtaacaagcaatgacctggcatggagatgatcaatcaagtgccacactagctctacaaatggaagcaatgcacttgactcttggctaatcaaccctctaacacactagatggatgaacacaaagctaaagtgggtgtgagagaggtgcaaggggtgtatgcaattgaaatgggtgccaagagagtccccttgctgctggagggggagtatttatactcccaccaaccaaaactaaccgttaggggcgaaatcccccaactctgtgctttgccggtctgaccggaggtatgtggccggtcagaccgtcctactctacaacggctagttttgtagccgttgtagggctgtcattgggccccactgcctaagtcggtcagaccgacatggggtggccggtcagaccggcctcggctcggtcagaccgccatcagctcggtctgaccgaatacggctccggcggctcgggatcgacacaccaagacgacaccatcccggccatatggccggccggtcagaccggcccgcacccgccggtcagaccggccttgaggctgcggtcaggccggctatgaccctgcggtcagactggttgccctggccggtcagaccggctctaaggccgcggtcagaccggttcggtcaggccacacagtgaaaacataaattgaaatatggggagtctaaatgcgagcacaagtctaaatgcataatgacctaatgtggcaattaaaatcatctctttgctaggtcattacccctcttaatagtacggcaaagatataaataaactagcacaattttgattgcctaacgcctcaatcaatttaaaatgtaaacactagtttaccgtcttctcttccttttgctttgcgccgtcaattttaatccatcaatgatcatccatgtgcacacaaataagtgaacctaactcaaacaaatagctcaaacacaatggtagtccacaattagtgcttgccattaattaccaaaattaacactgggggcctagatgcttcagagagaggatggagtggaggggaacagcgtcatcggcacggccaccggtgagctcagggcagagagagagggcagagtggaggggaacaacgtcgtcgctacggccaccgatgaactcgaacgcgtcgtcggcctcctcgtctcgcaaagccgcccaccgaccgcccccgcgtgccgtcgtcccccgcccgcgctgcgaggcagcgctcgcctccttcgccaccgcactcatctcctcgccgccgcctcctccgcttgcatcctcctcgccgccgtgctcgcactccgactcctatgctggcgtcgtccccaatcgagaacgagccgccgtctccagcgccttcttcgaggagatctcgagctcctcccccttgtccccgccatcgccatcctcgtccgcgccaccctcatcccccccgccgccgccgcgcgatgctctttccctcgcctgcggcctgccgcctgtgagagagagaagagagagaagaagagtgagtgagggagaggaagagtggatgagagtatgacaagtgagtcccacaaattttttataaatagaatgctgactggactgccacgcgtacgccacgtagactaaaaccaccgcggattgggtcgagggggataattgtccggtttgtatagttggggatgaagaatgtccgattttcaggttcatgggggtaattcggacgaccgcgatagttcggggggtcatactttttccaatagattatgagagatatgttttttttttcacatgtgggataatgtggttgaaaagtgtggaaagttaattgtggcatcaatgagacaaaaatctaaggagctctatagggttgagtgtgatggtttgtttattgaactaaacattccataggtagtcagatatctagacattacattttacagcggcggagccagctcccacgcagagtaggcggccgctcaggctctctcgctggtgtttccactatggacacctcagaatactattagtcgccaggcttaaaggcttcactaattcgagagtattttagaacataatcccttatgtagttggatccattggtggtttgtgttgccctctcgccacctcacgttgtctgtctgttttgtctatttctcatgcatactcccttcgtaaaaaaacttctgattataaggataaatttagacacagtgtatctacagattcatatttaagattattttttttgacagagaggtaaatgcataacctaaggcctctcttaaattgaagaatttttttttgcacaaaatataaaatcatggagtatattattttagtataatttttaatgagatttttatatttataagtttattatgcgagatatatttacggcaaaatttagttttggatataaattaaaatactaatatttatttattaattattaaaaatgggataggtagcatatttttgttgattgtagtacaacatatttgatgtataagataaatctatttatatgctacctaaacagtttttaataccaataaataaataatatttgtaataaataaatattatgttttatatcatattacaaataaattttattataaataatatctaactataacaaactcataataattataatagtcttaaacaacggatttctgccctccaataatctataaacatatatgtttcttcaattctcatgataaaatggttttttctataggaatttaacagtcaacctgcgattaactaacgaaaaagatatgaaagtgatctaaatttaagtttgacatacgtagaagaataactaaaactcaaacgcatagatgagattaaataaaatttcagaaatacatatgagattttctcaaactaagagcaagcacaatagcaagctataaaccaactataaatatattttaaaaagataaaggaagtgagagaagagcagcgggctacagatctgtagccagctgcagcacggactttaagacgtaatgtttatatgacaggtgagactagatattaatagtatagtaagcaactattatataaattagctattacattagctatagatgatttggagatagtaattggctatacgattaaacttgctctaaagtgacataggcataacctaggacatgactagtacacgatcacactgtcaacacaaacatttctttacaatgccagagtaacatttctttactatttcgacaccaatgtaatcattcattcggaatatattagcacgtgtggcggtgtacgtccacggaggagcagtgcagagctctgcctgcgctgggaaagatgccgacgttaaaaactttacgatgcgggcacggcttttgaggtagagagattgggaggagagaaaaaaaattaaggggttgggaaattgggatggcgttcccttccctctcggccggcgttccagttgggccagggtctcatcaagtctcgctgcgcccggctcaggaatccaacggcctaccgagggtttacctgtttcaggcacgtactgtaggagcagtactcatccacatttaaaagagcaggtaaaataatcagctataaaaaaggagagagaaatacagtgggctgcagcacagactacaaaatgcatatgtgttgacaggtgggaccaaaaaaataggcaactactgtatgaattaactattaaattaactataaatgacttggagccaatagttagctatactactccctccgaccttaaataattatagctttatacggctcatctccaacatttaatcgtttatattatttgaaaaaaaaattatgattagtattttgttgtcattagatgataaaatatgaataatactttatgtgttactttttttttgtttttttcataattttttcaaataagacggacggtcaaacgttggacacggatttccacggctgttcttatttttggatagacgtagtaaatagtgactacaagtcaactataaacacatgtggatgagataagagcaaatacaatagtagaccaaatccagctataaacacatatcaagaagataaaagaggagagaaaagagcagcggactacagatttatagccaactatagaacggactctaagacatagtgtatatatgacaagtatgactatctattaatagtgtagtatatgtttatagatactccctgtatctacttttgatagtcatatttcatcttagta

SEQ ID NO: 23494 - DNA, 1423 bp, Oryza sativa
tcatgcataaggaggttcaggcgttggcaaatattgcaaaaattcagccacaccacatgagttttctgttgatgatcttgggaaaaattgatgcaaatgcagctcttaaaaagatagcggctagatctacaccaccagtaaaaagagtaataaaagcacggactgcacggtgagctgcaaaagaaaccaatcggacatacctaatcagggcctccacggatgggcggttgagaccacattggcaaggcttgaatatttcagtcgccatgtgaagaactgttgatggagatcaagaagaaagaagcctaccttggaaagttgtcatgacctgaggccatgacgggataaacaccgccaagaaaatagctgggcggcgtcggctccggggggaagggatgtagatttaggctagggagaagaacattgttggaagggagagattagactaattgatattcattccttaattcataataaacacaatcccatccttatatagatggtaccaacttgacccctaagtaaagacttaatcttatcttatctctaactaactaataatcttatctttaacttaattgatctggattgcttatgggcctctgccttccggcccaatgcccatgacattatatcctccttttgagcagctcgtccttgagctgcaacacgatctttgctggctgagacaactccctaaacaaagcctaacatgactcaagccttttacatctcggcttgctaaattattgcaaactaataaatctaagataattgtagatcgccatgctaacttgatgtcaacaactgctgatggaccccatccggaagcactacgagagaggattagtctcatcacaatgcaaagccgaaaagccaatctggcctgctgatccatgtagagccacgttgtgcagcaacaagaaaaagattgttgggctagcacgtgagacccatccagccagctatgcgaaaaaagtggagcctctgaattcctttctcgcacacgccgtgaatgcggtgccgccgaattgcccattcactgcaccaactgtcgtctccaaaactagcggcgctgcctctgacatcagcatcgtcgccgcaacaagatgtagcccagttcgtcagcatcgctccccttcgttgacaatggcgccgttgccagggccagcggcaaggatcccctggaagcgtccgctgtctgatgctcccttgttgctgctgcaatctgatagccaaggactgtgccggcttgaacgatgccggggagcgaatcgccacccacggtcggttgggaagcaacccatccttaggtggtggtctcccatgggttgacctgcccctcgaggcgctgatatgcgtgcaccacttcaagacctgtggatgttgttgtagtgtatagaacagacaaggggtgcaggaa

SEQ ID NO: 23495 - DNA, 2902 bp, Oryza sativa
cagccagaaattgccagttggttgtggggctgcaacttgatccacagaaaagaaatttttctagccacattaatagaaaggccacatgttctcaaggggtgaccgagccctggcccatgtatgctgctacatagcctaaccaacctcctatgcttttggtcttgaagtcatattggttctttgtgttcaaactcatagggttggccgatgaggtgacattcagacctgtgatcatactgatatctatgagggttggagtcatcggcccttgattgaacagaaaggcattggtagtgtttgaccagaagtaagaagcagctgccatcaggggttcatctttggctgagttcgctataataaggtcaagtgcttggccgattccaatttcatcccagtgaaccctcttgctggctgatacacgtttgaaccatgtggtccagctcttttctggtggaactttctctagagatggccaggatttgaaggtattcttccagtaacctagatctgggttggttaatctgaaggggatcctattggtttcaccaataatgaactcggtggggtctggattgccgactgggccaagaaagtagtgattttcatgcgacaggctgagaatcgcaactaggttggaaaggtactacaaatccaaagcaattcagagggagagagtgatatcagattggagaagatcgatttgctgctaaagaaggggatttagctgatgagaacttacctcagcgtattcggccgatggtgcaccaggtgggctggcggaagacgacattcgtgcgggcggagatctcgtcgggaaggaagtcgcctaggaatcgcctttgcgccagaggaatcgccggagaagagagagaaaaggtttcacttgagtggtgaaaacggaagtcacggcgtgagatttctcgggggtaacggttagtatttaaagcgctggaataacggtcaaacgcggtcgagtgcgaaacttgctcggagtcggcatacagcaaatccggaccattatcgaatatcctagacttgggggacatgtgttaacaaccaaatttggtaatatctatgtcaggaaagaggatctcatcaaagtggagtcggaggtggagatcgagttcggaagcagagcaggaatcggctggaatccagatcggctacggttaggatcggctggatctgagtcgggctaaataagccaatatagccgattccgacaatacaacttgtacgcgacatcgggttcaagttaatgtatttcaaggtgattgccacgcacggatagagtcctgggaaggcaattgtatctattaattaggatatcttatgtaaattccttatagataaatgtgggcaaaagtctgccgcaaagacttatagtatcttagagtttgttagagataatggtcgtatccggtatgggcatatcttgtaattctcaggaataaatagaccccgagccctatgtaattttttaacacacacgttcaatacaatctcggcgcatcgccacccttttttgctttagttttgtttcgacgaattcttcctttcgggttgagctgcatcgatttcgatcttcaacaagaggtaaaattcgttatgacggattgcgttcttaggattagtgcttccatctttatgatactctaatcttgtttatgtaattcgtcgagttatcatatgtcttacataatatctagcaatatcgccatctaatctactatcggccaatatctgtatgcagaagacagccgattaggttagatcttgacgttgatctagattatataagatatctaccattctatgaaacttctagcagcttgattgtctaagtatcgctcttcttttcatacttaatactgcatcagttgagtttgatctattaagtcgtgcttagaatatcgatctctagcctgccttctagttgccgattagaatagcattggagtttcagccaatcgtatctgatttaattatatttgttttatatgctttactgatatgttaaatctgccctttatatcaagatattgttgtatctaagtatgttaggcctttgtttgatatattatacctacttttatatcctgatatagagttgtatcggagtattagccgatacatgctagatctatctgatcggctacgctacaaacatatatagtcttgttattgatatatatttcgatctaggtgatttatactgtctcggtatggtgaccgatctatcccaatcacttgatttaagtatatatcgacataaggagtatatatcattaatatctacagccgatcaagtagatttagttcttcttcacttattcatgactgccgatcgatacacggatgacatcggcccaaagataaatgatatgtcattggcatctagccgatcggctatcatttatagatttaaccacggtttctttgcttctatttcttgttgattacaggatcaaatcaactggcacgctaatacatccgaaggcgagctttggacctgcactggagttaagcagatctcccaggccacgtgttttctgtcaacaatgacaaatgggtcccactaacttatagcttttctcatccatgctatatccctcctaccaaacaagaaattggatcgccatatccatacaaaccaaacaaaaaaaatggatcgccatatccaacaaaatatggatggccatatcccatccatgcatgaccgtgaaccaaacacaccctaagaggatgaagaagatgaggaggggctccacctcgtagatcgggatcgccaccgctcctctccccaccgtcgctggccgttagccggcaccctagagggaaatcgtgctcactgaatccctcctccgccacgcccagtcccttctctctgctggcgcccacc

SEQ ID NO: 23496 - DNA, 1971 bp, Oryza sativa
ttctcacttacatgtgggccctataatttttttattttgctgactaggatgccacgtcacagaaaccagagactcatgctgccatggaaccgaaattgcatggttttgtatagtttagaggtgaagatttctggtagtgggaattagggatgacacccaaactcgatgaaaagttgagggatggatggtgaacttattcccaaaatttttttttggaagctttcatgggtccagttgggcttgggcttgatctttggcaggcggcaaggccggcctagatgggagtaattattattatttctcatgttgtatattggcacatttagccacaattagcactatggtgcgtatgctcgaatttttttttagataatggaagcttttattgaactcagtcaattacatcaaggtgatacaattatcctgagaacacttccggcctctgcataactaagatgcacacagacgaacaaacaaaaccacactcgaaaagaaaaaagaatgacatggagtattgaggaccatcaatctaacgactaaatttccactcatgaacaactccttagccatctcctccaaaagcacagagttttaaggaccaccaattctaagactagattgccacccatatccctgggtaaaaaactccttgaccaccttctccaaatgttgacatgccgcaactaccatatcccgcgaaccaggcttgtgtaggatagcccatgtacgaagccaatggataagagaatatataacctgcaaaggtgaagatatgactttttttatcaaaaaccacaatattcctgcatagccaaagcgaccaacaagtagcagctgctcctaatagaacatgtgatttcaaattattatgaattccatcaagccagctcctgaacatatgcgctacacaatgtggtggagaaagtccagatgctgcttggatgatggaccaaacagaaagggcaaaacgacatttgaagaaaagatgtctaactgtctcgtcattgcaacaaaaacaacggttcttattgccttgccatttcctttttatcaaattgtccttcgttaacaccactccatggcgcaagtaccaaagaaaaatcttaacttttaggggtatctttaatttccaaagacggttattaatgttgggaacgttgctgtgaattagagctagataatgagacttcaccgagaactccccatttgaggttaagttccaatgaaactcatcttgctccttagttaaataaaaaccagtgatgcgcggtaataaattattccacgccgctagttttgatcctataaggtctcttcgccatgaaaaagatggaagattgttttcgaagacttgtgcaactgtagcgtgcttatgcctaactatgttgtaaaggcaaggatactgttctttcaaggttgaattgcccaaccatttgtcttcccaaaacctaatttaggagccatctttaattataaaggatccaaaacggagaaagtcccgtttcaccttcatgaggctagaccaaaagtgtgagtcccctgccttccattgagcttgagaaagaggtttatcaccaagatacttattacgcatcaactgttgccaaaccccttccgtggagagcaacttgaataaccacttactaagtagagccatattcttaatttccaaatcatgaattcctaatcccccttgttccttggggtggcacagtatgttccatttagcaagacgatacttttttttttaccatcactttgccagtaaaacctggagcgaaagtagtcaagctttgtaagtatccctcttggtatggtaaagaaggacatcatatacaacgggaggctacttagcaccgaattaatcaatgttagccgtcctccggtagataggagttttcctttccaactgcttagatgcttttcaaagcgttctacaacctccttccaatcggcatttcggggtgcagg

SEQ ID NO: 23497 - DNA, 18054 bp, Oryza sativa
aatgtccaacttcgtcattaacctttaccgctacacttcctccagaaatgaaagactcaacccaagagatccacttaggcgagaaacctttcatacgtagagtttgcaagaggaaaggccatttgactttatcataggctttttcgaaatctactttaaaaattaccccatttagttttttacgatgtaattcgtgtacagtttcatgaagaacgacaactccctctaggatattccgtcctctcataaaggctgtttgagaagagctcaccacatggtctgccacgaaattaattctatttgttgcgaccttggtgaaaattttgaaactgacattcaaaagacatattggcctgtactattgtatacagtttgcctcatgaacttttggaagaagtataattatcccaaaattgagactaaacaatggtaaatcacccatatggaaatcccggaatagattcatcaaatcaactttgatgacctcccaaaaattctggtagaactccgccgggaaaccatctggaccaggggctttgttgtgttccatttcaaacacagctccccggatctcatcctccgagaaaggtgccgttaggaattcattttcctcattcgttacctgcggaatatcctcaattctagattcatctagtgtgatggaagtatcctcaggtggcccaaaaagatttttatagaatttagtaatataggacttcaatgctatattaccttctattttccctttgtcctgatcgaggaaaaaaatacgttttttccttttcttaccattggcaaccatatggtaatacttggtgttgttgtcccctagtaggacgtcagtaacttttgccctttggtaccatttgatttcttcttctcgaaaaagtctggataactgatctctagattgagcaagatgctctctctcactatcagttaattctcgtacctcggctgtgatgtctaactcatcaatgatattttgtacggtatttttttcttgtttgtaagaaccactggtgtgagccgcccaaccccgaagatgtcttctcaaagcactcatcttattgttccatctttgaacagggttgcggcccttaactggcttattccagatttccacaacacggtcacgaaaatcatcccgaaggaaccagccaagttcaagtttgaactgtgcacggttccctgaaaaagctgatgatccagtgtctagtagcaatggtgtgtggtctgatagacctctgtctaatgcttggacagaaaccaaaggatatttggattcccattccgtagtcattagaactctgtctaatttctcatatgttggggatggtagagagttagcccaagtaaattgtcttcccgtcaaagcaattcctcttagatcaaagctgtcaataacagcattgaaaagaaaaggccatcggtcattgaatctgtcattgttcttttccaagctgctcctaagaatattaaagtcaccccctataagggtgggtagcggattttgttgacaggaacgaactaactccgctagaaaactagatttgaattcatcttgtgccggtccatagactgccattaaaatccatttgaatttgtcttccttattgaccaggtggaatttaacataaaattcgccttcgacaatcaaagacaaatcataggtagatgctttcaccccaagtataattccgccggatctgccgcgaggtgggagacaatgccaaacgaaatctacacccccagatagacggtttagattcgtctttgacatatcactcttacctgtttccataagtgcgacaaaatctaaattgtgctcctttatacattctgccacatatcggtatttagccaagtcaccgagacctctgctattccaaaatatgcctttcataataacacaattgtagagattatgtaaaggaacggtttctccgtctctttttcttatttgatttagattttctcgcggacaccatcaagtcgcaaattttgctactcatgtccacatcatctaaatccacctcagtgacatctttcactaagtgagcgagtaggctaccgtcaagttcggtatcctcgtcatcactagcatcaaaaggattgtctttctctaaagtttgattcttaaaaggttggtgagagccatttattttagatgctgctattgaacgatctagttcaatatgtttcaatttattaatggaaattgtaatgtcagagctagaagaacccaaagaaacacccacgttacttagatgagaagaaactctatcatctggtaaagacgtaattgaaaaaacatgtttactttgtgggggagaagctggtgtagtgtcagagctcgacggagaattaatcacagccaactccttcactggaccatctaggttgcaaatagcttttcgcctcattgccttactgagtgaatcctcatccgtcatcgcaattccgctgatctgttcagcattcgaacgaccacttcggcgaagaccattgcaatctccaggagaggataacaccggccattcttcatagtttccttgtgtcgtttgctgcgaactcagtggtgctgaaacagtgcccatgcgcaccttacttgtgctcccaaatggagcaacagtattgcctacactgcacttcttcactagtggcactgaaagatgaccatccatcaagcctggtgatgggttttgttgcttactaatcggatgtgccaccgggacaacatgttgctttctattagattgtatctctgttgctggtagcgtgcgcggcactgcctcgatctcctgcacctcagctgcgttcatacgcatattctctaggccaaccgatcggggagtagcaggtggtgagattcctgctggactgatctcctgtgaaacatcaggatgctgcagctgcagccctaccaagtccatcaccacaggccgacgagatggagacgacttgagaggtccaaaaggcgttaacgccaactgcattggcgttggaccagacccctgatcaggttgtgtagttgtggaagagttgcttttgtgtttctttacaatgtgatttgtattgttgtcttccttagaatcccctccctcttctgcaccttcatcaccaccacctgtgggctcatctaccacatgcacagccggctggaacccttcttcctcaagagagaaagtgatatgatatccaatcttgccgaagacgatatcagtcttaattggtagatccgcacggctaagaactcccactttgacccgaataatgcccttcttacgaaaggtcagcatatctacctcttgtgtggttccaactacagtgcccaaagcccagaaacaaagatagtgtcgccaagagtgcagcactccagtgatgtgcacccacacctcgtcgagctgatacaccggtataatatcggaatcttgctgccactgttggattgtgatagatacaccgtgattctttaacctgaattcaacatcatccatccggttgagttcctcctcagacgggaaagtcacaaggtatgaattgtcaccatgtggcacagcctcccaattccaatcggctcggatgaggcgtgccaactcattctgcacggcactagctgctaaatgaccaccgagaatggtcaccaaagccattggcgcaggtttcggcggcttcaacttcatatcaaactcctgtatcggcaagaaacccatgttctgttcactgaatccaaataaagcagcagtaggttttggttcctttagaataggacatctattcggcacatgtgcatctttcttgttacatataaaacagtcaaggacagttttgcagccatccaacaaatggccactacccttgcacctgaaacagtgaagtggacgaggtttcttggcttttgccgttgttacctccacactattcttggatgaaagggcagctgtttctcctcggccggcttgaatgtcttgttttacagtactttctattagggcttgatgaacagggacaccttgattgcctgcatcccttcgaggttgctcatcacggccatggccctggaaccctggccggaagtttcttccctatgggcgctgaccaaatcccggacgtccacctttgttgtttctgtaggaaggtaaagcaccatgtcctccttgatttggtggtgcatcccagcctccatgtgcaccccggctactttgatcacgatgatcaactcggccaccatgtgcaccccaaccgccttgctgcgtagaacggccttgctgcgcaacccggccgccgtggtgttcttgcaagttggttctattgatttgttgctggggaggatgatttgctagcggccgctgctggttgtggcgaggagggtcagtcgccgccatcgcagcgtaactagggcgagatggctatgttgatggaatgaaagagatggcagattgcgtcaacgatggtcgaagcaagtcatatctcgatctgccgtaaggacgcatgccgaccgggcccatcacacggcccacaaaagattgtttcgaattttgaaacaatcctagtgaaagcgcgtgatctgaggacgatccttgtaatgcgcaatctgaggaaaccattgtcgcttggtttgatgtcgccgccggcaggaaatcccccagtaccactaccgtcgccggacgtggacggggaagaggacctttccatggccgaatcagccatccacgtcgacgctgtatagcaggaccgaattcttttcctgatcgactgtaagacaccaaattccatccgccagcgttgtctttctcagcaagcttcggtgaaagagagcgaaagcgagagggaggctcgggttgtttttcccaccagcggttcgccggcgtcggaaaaccaacctcgctccagaactcctgtactagcgaagcttcatcagatcgagccggtcgtccatggcctccaccatcacttgttgcttgcctgtgaccaccattgtctctcccactctgcctagtttcgatgacagcctcatcggcaatctcatgcgaggtattaacaccatcgtcgtcgtccccatcccgattttcctgcaaaagacactcaaaacgagagccacgtaccacggaggaagaaactggagccaaggtgagacgccggcggcgatcactgtcgatcctcatctcaacgtcatctcctttggagccagtccacccagcgtcgtcgccgccactgccgctgccgccgtcgccaccgcaatgtgccgagttcttaaatgctggttggtaatagattagcacctatattcatacataatgccctcgtatgctcgaattggaagttttaaatttgcactgattgcctaagaattttacagtgtgattttttgaagagtttacagcgctgtaaaattccctcaattttctaaacttaaagttgtaaggtttctaaattatgcaagttagtgatatttgtgcaagcttaagtgactgacaagtaagaaaaaaattaggtgatcactgacaacaagtgaaacggaaaaaagaatttgtgtagtctgtaatctattgtacgaaatgttttatagtataattcagtttctcatttttaccattgagatagatgacctcgaggtgatgacgattttacctcattttatttctcaaattaatggagacttattgttggacctaatggccaatcggccatctcatttttcaaataaacaagatcatgcatttatcatgacacactagttgtttgtgcttaaaacaaattgtggttagatgttttcaaataaagcacataatattgtagctagatgagtccaattaacaaattgatgcaaactagcaagtagcaagaacgcttcgttcttaattagaacgagcgaacatactatatatatatatatatatatggggagcgtatcctatacacacaggcactcgcgtgtacacactgtgtacaccaactaaaaattatcacaaaaaattctatgaaaattcgtacatgtactttcaatagtattacatctacgtgcaaagtcgcatcttcaaattcattctacatagagaataacaaaaaagataaaattctgacaaaattgtaaccttaaaactgtcagattttttgttttttttgttacggctaaaatataatgaatttgacgttaagattttaaccctaggtgtaatacaattgaaagtatgtgtatgattttttctagattttttggtgatattttttagttggtgtgcacgtgtgtacacgtgagggcctgtgtgcataggatatgttgccatatatatgatcattaatttttgacgatctgtgggacctaatatcacagtagcaactttagctatgatttttggcaatttaattagggccacatataccaaccaaaaaccatcgtaccaagagatctgataacaatgggacacaagaggtctatccaactgtggcatcaacaggccaacagccatgcttcccataagtgaaaaatgtatgacgagtcgtgttccttccctgaacgctttcacaacacatttgcagacagtagcaatataaagaagattcaattatatacaaagtacctaataattgattcaatctacctatttttcttctttgccgctagtcatatggaccatgtatagtgtgttccccacttgtttgagctttgtcttataagccgcggccactgttgaactttaaaattactagctgaatgactgtgcttaatttgcttccgatagaaaatatattatagtggtccaaaataaataaaaaatatttctatgaaatatattacccgtcctcatgttgccatagggaatattcacctcaatttaattttttgtgtggttattcgtttatggttgtgttttaatattaagaaattcaaggaataatttgtaaaatttactatggaagtagatgaatggcacattcactttcaccaccaatatcttattttaaagtactacagaaattggagggtttttttcctactcttaattctcaactttggcctgtagaccattaaaaataagaatatgaaagtcactatctccatcagtaaatataagtatttctgacgctgtaaatctaaacgagtgtttgtcttgcttcagaaccatacacccttatatatatattttgaacgactcgcgccaaacagtgcgaagttcataatgatagagtagaaaaaaattacaaaattataaccatgtaaggtcgtaaccaggaaaacgaagaaaaaaattgctaccacccacacaccgacagctctgacacatgaacccaggagaaggctaacaccagaccagccgccatttctccccctaggccctccgacatggtcattttgtataagctagggcgccaacacaagagaaccaagatctagagcgagcttgcaccagttgtttgggaggtttcggccaggggttgcctagacaacgtctccagggagaggagcgacagaaacaccgccgcggccgtccgtcatggagactgcgctttcacccgacaaactccttagaggcgatgggacgacatgacaatgccctcaagagggaatgtgacgcaaacgccgtcgttgtcggctcggccaaaaccgggctaggttttcacccatcgtctgccgcctgcctatccaccattgatgctacattgctccttccctgtcaaacctccgtcagtgcgtgggtactgctgtaccggcacccaccgtcggctagcctcaccagctacgccacccgctctagtgtaccgttgccgctgatgctacctgccgtcaactgcaccacacctccatgccgccggtcattcctccacggcggcctccaggccggcctcacctccacgcgtgctaggtgcgcctccacgccagccacgacctcgcaccgttgtcggctgcacctccatgcaccgtggcggcctccgtcaccgacggccaaacctccttgctccgtcctccatcgccagccgccgcgcctcctcagcctacccgtgctacgccagtgccacctcacgccaactgctcgtactgggcggcaatcggccctggccgaggacctgatccggcggcgcccaccgtagtcgccgccgaccctactacgaccccgtcacttccacccctacctccaccatctccgcctctagatctggcagcacccgccgcggatttggcatcgtcgtcgccaccgccacccccccatgcagttcgcacctcgccgctatcttctcccttccccgcctccaccttcgtttgtcgccgtcatccgcgcgccggcatcccgcctcaatgccgacgtctttccggccgacctccaccttggattcgcccacgccggatctatggtggtcgccaccgcgagccccaccgtcgtcatcctcgtaggccgccagctttaagcaccgactttacggccactcgctcaagtggcacaaggtaggggagaggttggggaaggtaggctgtggcggctaaggtttccgcctgagtcacctgtgccatcacagagactgggctttcacccgacaaactccttagaggcgatgggacgacacgacaatgccctcaagagggaatgtgacgcaaacgccatagttgtcggcctggccaaaacctggctaggttttcacccatcgtccgccgcctgcctatccaccactgatgctacattgctccttccctatcaaacctccgtcggcgcgtgggtattgctgcaccggcgcccactgtcggccagcctcaccaacctccctatcgtcaccagccactgtcgcgtcagctttcctcgccatcggttgggccggcctccctgtcgtcgcccataccgaacctcctgacgccacccgctctggtgtaccgttgccactgtcgctacccactctcagttgcaccacgcctccatgccaccggtcattcctccacagcggcctccaggccggcctcacctccacgcgcgccaggtgcgcctccacgccagccacgacctcgcaccgttgtcggctgcacctccatgcgccatggctgcctgtcgccgacggccgaacctccttgctccatcctccaccgccagccgtggcgcctcctcagcctacccgcgctacgccagcgccacctcaagccccactgctaggcggctgccggctctagccgaggaccagatccggcggcacataccgcagtcgccgccgtccctactgcgaccccgccgcttcctcccttacctccaccttcgccgcctctagatctggcggcacccaccacggatttggcctcgctgtcatcgcagccaccccccccccccacgttgtttgcacctcgcggctatcttctcccttccccgcgtccactttcgtttgtcgccgtcgtccgcgcgccggcatcccgcctcaatgccgacgtctttccagcctccaccttcatctgtggtggtcgctgtcgctgtcctcgcaggccgtcggctttgagcgccgactttgcggccactcactcaagcggcgcgaggtaggggagaggttagggaaggtaggcggcggcggctagagtttccacccgagtcacatgtgtgggaggcgacacgacagctaagggtatgcagtccactccactctagtagcccatacacccttatatatatttttagagaaggatattttttacccagcctctatatccaaccggatatatgcagccttttaattgggaacttagccccataaataacccaatctaaaatttgtttctatggagatttgaactcgggatcttaagatgctacctaggtcactacaacaattaggatacatgctttttcgcatacactcttatattttggaacggggatatatagtaatatcgtgtcttttattttgttgcacatacatatacaggttatgagtgtaaaaaagaacctagggctgaaactttttcttcaaacttccaacttttctatcatatcaaaactttcctacataaacaaacttccaactttttcgtcacatcattctaattttaatcaaactttcaattttaacgtgaactaaacacaaccttggccggcaatatttcctgtatggcctatatgtagccaagtgcagtccatgtcaatcatcaggtcacatccaaattaaaaaaacatacaattagtagttagcagcaaaaaaaagagaggctaatgtgatgagatgtcagagtcctagctcacatttgtatattcttaggcgaccctttgcattctccaacagctatcaattattggctcaaaaccttaattagcttccctccaggtagctaagcttaccatgttttcttccccttgttgttaattactctcgtaataatcgatgtgatggttggatcagaggatgagatcaatcgagtagtactaagcttgtactattaattaagtttgtacataatggatcttcccacatggggtaatattaagcttgtactactatagttttacttggactttacgggttaattaattatagtttgtttcatacttacatcatgtgtgatgatgaatcgctgtgttaattaatgttgctttcagcttaagcttagctcattagggaagggagacatgaatagtcaaatatatatggagctctcaacgtgccgcacggaagctacacaatacatatacagatagggtcaaacatagagaaatttgatagttcgacactttcttcggtatcaatttattttgattggcacttataaaaataacatagtgtactatcagaaatatcaaacatagcttaatttattttgattgacgagagtaaatgaaagtggatcagaaatatcaaataatcgaaacccactttaaaaaagaaccaaattatcaaacctctcgtcaaacgtatggccctgctagaagccactgcacgaagttatatcactatcgtgatatcatctaattactatttctctctattttaaaatatacgagtcatgctcaaaatatatttaataataacatattttcggttgggtggtattttgatgctacaggtttttggaatagacacttcataacgagatttatgacttttgctcaatgcatatcgcaactgcaccgtatacgcatcaattttcttcagctagcaacgtacatgatgacttctagtgacagtacgtaacatttccatccgattcccattgtttgttctgttttcagcctctctgaatcccaaatctgcaagtttttgcccctctttagtaacgttaatctatagctattgtcctcgttcttttttttaatttcttgtggtttagaccaagcttacaattctgttctggttccaaacggagtgacaccattttaaatagactcttccgtttttaaacatacgacgtcattggcttttggtatgatatttgatcattcaacttatttaaagaatttaaataattgttatttattttttgtgacatattttatttttaaattaacaattggtcaaactttaatccaaaagttaacggcattatttattaaaaaacgaagatggtactccctccgtcaaaaaaaaaaacctaacctcgtactaggataagatagatgtgtctcatcttagtgtccagattcgttgtattaggatgtgtctcgtcctagtacgatgttagttttttttagacggagggagtatgtactattccatcaagcaacgtctagttcgacccataatataagagagtaattccagtaatgaccgaccgtgttcatccagtctagccattcctagggatgggcatgcaagagacagcacatgagtgatctttggtccattccagtctaaccaaataaactaaatttcattttctttaattatctgcaagccgatccaagcacaactctagccattccacccattttttttgtaatggcctaaaatttgagtaatcatttgttgagttaggctttaagcacaatctaataatcctgtcacctaaacttgctttaaattgtgagagatacaactcaaacttagatttattacaatatctattatatactaaaagtccattaaactttctacaaacgctcctaagccgccacatggcgctcctacaaatactcctaggctgccacatggcactatctaatctcaccgtcgattttcatttaaattggtgtacctgttaatttagaccattagattagatctattattaaaaaggtgatagttttttctaaaaaatatgcaactggtggctgtgaaaaggaaagaaaactaaatattcgtacgcaagtataattgaaaaaagaacaaataaagcttcctactgttaggcggaagaaaaaaaaaacatctgtgtacgacaaaaaatgataaagccaaaaaaaatgtgtagttagtaccggtggaaaaaacgacggtctaaaataggattttgtataatataaaatataattacataatatacggaagtatatgatctatgatataaatatcaaatatcaaatcaacggtctctaaacattatcttttaaattatttttcgtttaattatatatagtatcggtgtataaaagtaatgttgtggtcctaaatacatcatgacacatcgggtcgacatataataggtaacgttagagacctattaaacgtgctacaaacgcttctaaatagtcgtgtggcactcctacgaatacttctacgccaccacgtggtgttctagtaaattagagaaaaccttgtaaattatgagaaaaaaaacatccaatcatttttattggttgacccactatttttaaactactagattagatttatttataattcatcccacgtaacctgctcgaataaaaaaatcacgtgaatagttgcacgtatatatacatacttccatactttgctactcactgaaaaaaaaaagaaaaaaactggggttgaaaaaaaataaggtttagccctgccacagtcccacctaattgttacgagtgacacgtacatatgtactgttcacccaaaaaagtgaaaaaaaaatctcaaatgtacaatacgtactactgttcactggattgagaaaaaaattcgcccgagtttgtacaaactacgcgctgtccttcactccttgaatctttatacataaaatcaatattcacccatcctctaataaacttatctaaataataaatagatgtatatgggaaaatattatgattacatttggtattaagtatattttaatttaaaaattatcacattgaagcatatttagagctttgtccattaaatatcatgtaaacgctattaagccaccacttagtacatctacaaatgctcctacaccatcacgtggcattttaataaattagaaaaatcacaaaaattacgagaataaacaaaacatccagttgtcgattttcattaatatacggtggacctattgtgtgtacgtacctctccacctattttctttatctcctattttccagtttctgttagatggaaaaaatattttaggataaaaaaattttagacaattatattatctaaatcatatagctaactttttattagtgcacaccattagattatttactataaaacataaaattgaagatccaagttaactatattattaaaaaaatcattactctgggtcatatatattataataattattgtttttcactgatccatacatttttaagaaaaaatatatagatttttaaaccttatgattaataacatacacttaaattagaacaattttaaacaatttaagttgtttaattaaaaagtacaacacacaaagtattttctaatagatctaagattatatgtgtttataaaactaggacccattcaatctatgttaaaaacaataatctcctcctatcctcataccttacgtatacctcggactgacccatcatctcctctccaattcaattatctcctcttcttttttttaactaacataatataactattgttttatttataattaaataaataaatcaagataacattagctatatttactataaaaagttaaaatacatcatttgatggtagaccctatcatttgaatggcaactaaataacagccaataattaatcgaacatatgtattatgttatactaaatcactataggtaacaaaaatcaattaaagcccactagagcgctaataaatcaccatataatatgtcctaaaattttaagaaaaaggcaaaatttgatacagaacacccaaaaaacgtgtaattggctgggagacaccgtaaaaacgtgacatggctgatggacactacaaaaattatgtaattggctataggacactggaggaaatattttataatttccgagtcaaaataggtgagaaattttagcttattttgattcaaactctgtttttttttctttgggcatcgtatgggatgtaattgcacgtatgtggatggagggtgccgcttggtcggattgacggacaaaaaattattgtgacaattggaaagttactaatttttaagtagttaagatatggataaatgtgaatttttccatatttatctctaatttttttgacacagggagtaaccaacagcctttttcccacgaaaagaaacaaaaagaacataacgaacactgactgcgaatcaccgagcgacacgtggctggacgtacgaggtgctagattaaattaattcaattaaattgacgtctccattatttttaactattagatctattttttttgaaaaaaaatcttaagttaccatggggcacgtcctataaaaaaagggataaacattggaaattcttaaaaaaaatgaaacatcccgtcgtaggctttcacttaagtcatttagaaaaattagaaaaattggaaaaacaaaatctccacctcctcctcactctcatatctacgcaacaatgtcgtcccctccctattattttatctattaaattaaaagagaaacaataaataatgtttgatatttttttaaaacaaagtacaaatgcgggcgctcacaacacgcacactcacctctatgaactcatacatacacatacccctatgagtacttcttagagactaggctggcatattttgagattgacgaagtcactatgtacttctcgttgtcgatgtgtatgttatctactactgaaagaatttgtccaagtctaggacatgaacccgagtgggcaaattccatcacaatgaacctaactagttgagctacgttcacttcacaataatgttggatattaaaataaccataatttttaagctacatttctggattactccaatgccctttaaaccggtggaatcattatttttgacagttagatctatcttatataagaaaaaacagatgtgtatacatggtacatcacatttaaaaaatattattatgcatggaacttctggcccactctatatgaaatattcatagatggatcggctctcaaattacatcaatcatattaggctatataaaccaatatatttagtggagcttcacgtcccacccaattaattctcgaataaaccatgataatatatatgcaattaaaaaaagaaaaataccttagttttactttacacttacttttcattgacatgttttcttaagaaaataagtctaccttctttgcaaatgatgaagaagattataaataattgcttatagatattacttaaatatgatataatataaagctaataggttagaaaattataaaggaaattaatgtcgacgaaaacaatttatggagtaatcatggtagatgttcaccggttaatatttcgctcttataactgtctcaatcttagcgtacaaggcatgcccgcgtattcgcgcgggctaccttcctagttgtatataaaattaaaaatatgaactattgttcttttgataatgtaattatcaatttagccttgcttttcaaatatgaagcggacatctgaacctggaatagttaaaattgttaaagttagcaccaaaatatcgtttatgcccatgcttatttcccatgctttctaaaaggttgttttttttttcagttttgtgatgtatacataactttgtgattgaaattttgaaatatctgtggaaaatttaacttagatttgaaaaattgtaattgaactttaacacatttgtcacaatatgtcaaattaagtcaaatatgtcacagatctgtcaaaattttcatcacacatttttataagtgcacaaaattaggccaaataaacaagacatttttgaaattagggcataaaggatattttggccctaagtttgaagtcagacaataactttatttatttatagcagggtcgaataaaccaagtttaagaaaagtccaaaagcttaattatccgtaaaaatacatattgaaaaaatatatattgttttgttaatgcaacggtatctatcggtatcaaaacgttccattccaagaggtataccggaatggaattaacaagctttttaattttgacatcagcacgatctgtaatgcatttttatctctgttttctaacaaaccgatttataaagcacttttaaaatataactatataccatgtttttcatgataaatctatgtcttatttattttgtacaataaatcgtagtactaacttttgtatgtaataacgatttatttttttgtgattcggttgcacgcacgccgttggactaaatctatatttagaggaaaaggtctgtatgtatgtatgtatgtatatatatgtatatatatgtatatatatatgtatatatatatatatatatatatacatatatataattcccatatgggactccatggtgtccgggctccaaagtataaaacacacaaattctctcaaatttttaaaaatgtttaaattgtgagtatatacctaggaatatgaatttgattcatccaaatacctaacaacaaaacaactcaaactcaactttatttcacaattcattattacatacctaactaattatatgtttggatgttatatatctagaaccaaaatctaacaaaaaaaaataagttcaaacttgttagtaaagaagttaatgttcatatctaaacatttaaaaaaatttcatactcattcaaattgggtatatactcaatttgaatcatggagcccatactccatgtagcaccaatcacacggtggcgctgcgtagcgccacacataaacaccgtgcgctacgaaacttcatagcgcaagtcacgacttcccccactcccggtttttctgttccatcgctcctccctggcgtccccgctcccacccccacgttccaacgtcggtaaaaaaattgctcacccagatttatcgatttttctctccgaaatttctgttagatacgcacagttgttttcaatctcagattttttttcgttcgatacacctgctggttcccactaagagcgagtaaaaaaatcactttgcttctcatgccacatgtatccggtcacgagtaaaaaaatcactgcccgattagattaggtcccgttaaaaagatttaactttttaactttttgaacagcgtccacacgatatcatattgagtagttaaaaagttactagctcctgttcaatatgcattgatcggccagtaaaaaaaattgctttcatgcttccgaatgcatccatctctctcgtttcctgtactttccactttattgggttctcccgtagatttgttaagtgaaaaaattactccatgttctctgtccactttatcagagttccatccaacagatttgtcgagtaaaaaattattgtaccggttatttcgacatggttagggaaaattatttagtgcaaactacatacatagtaaaaacttgtaaactaccgttggatctaaaaatggacgtccgagatgtgtacatgtcaacgtaagtaaaaaattttacttctagtaaaatttttactcatcagtgaatatgcgagtagattttactcccagtaaaatttttactcatgagtgaatatgcgagtaaaacttttactcgtgatgatgttgacgaacatctatttttcgaccc

SEQ ID NO: 23498 - DNA, 55163 bp, Oryza sativa
  unsure (1)..(55163): unsure at all n locations
tcatcccagtggcgctgcgaccaccaagggagttgcttggaaggagggtagaaggcccagcgggcggcagcggcgcatggtggatgttttttgccgtcgtagcccgtcgatgacacttgcttgtgtcggcagtgccaccgcctcctcttgttgctgctgtccctcccgtcgtcatcttccatagtgatggcggtggtgaggaagcggccatggatgcgacgccatcaggcctggcctgccactgcaatggaagacgatgggagaaaggatgatgctgcggctgctcctggtcgtgacagccatcggtggccacagatcagatggcgtccatgccaacgaccaccacgccaccactgctccaccccaacaggtcgcgcagtcaccggccaccgcttgggatggcctcgcccgcatggctgccaccgccgcactgtcgccagatcagcgtaaatcgtggtagcctccttggtactgtaaaaaatacaaaaagaaaataaaaaagaaacagaaaaacaaaatctcactcccgaggagaagaccatcggcaccaccgcactgacgagtccatgccgtcagagacgtcgccgccaacgctcctccactggctaggaagaacagggcgtcaatcccccatgatccgcctcgatagttgagggatattaggatctcctctcatatgtctcatcgtcgatccgaaaaatcaggatcgtatgagaaattaaagaatgagaatggtgggtacaggcgtacagtagtatcgacacctaatataaatagacatgcatgagtaaaaaaattacttgcaaaaacataatgaaacagaagaaaaataataataacaaaaaaaattaaggtatgagaaaaaaagtttcctttagttaataaataactcattatgctaagtcacgtttattatagttgttgaatcatacatagttaaaaattaactgattaaacgtggatatatatggtgggctatgtagtagtaaaaatttaactcgtgaattaaagtgggtggagttaggaggggagtggggtggtgggcagtgggtgggtctggttactgtgagtgccgtttaatacgtagcaccttaagatatatatatatatatatatatatatatatataaaataatgatgatgaagacagtaggactacctttgtccaaaaataacgcaattttacaacgtttatgttcaacgtttgatcgtccgtcttatttgaaaattttgtatgattagtattttttattagatgataaaacatgaataatactttatgcataactaatttttttattttttttaaataagatgaactgtcaaatgttgaacacgaaaactcacaactgcacttaaattaggaggcatgtagtacatatatatgcatatataaatcagttcctacgtgcaacgggcgcaaaatatcccggggtcacagatccgtttccttgtttgtgtaacaagtgtttggtacttcctgcccattactgcacgctggtggtggacagtagcagcacaggagaagacagccatggggatggggcggccaatgggaaactacaccggtggatattttgccgacaggaaatgctgcacgcactaaccaatgttgctcacaaagtttttttttaaaatttttaatttctccctcgcatcatgtggtccctgcagatacatcatgtcataaaagtttttcttaacagtgaagtattattattattattgtttgctcctttgatatttatacttgattatgaaatcaagtttattgtattatgtagaatatgcagtgccatgcttgggtgtctctctcgtccagaagctgagttagacttcattttttttaaaagattgtacattaatttaaccacaacctacaaaagtgcttgtcttgtgcatataaaaacatgtatgttatattatttttttgcgaggaatattatggaatggtggaatatatttatctccttttaaagaagcaccttgtttctatatttcatatccatacctttaaaaacatcacgttgtattttgctccatcgtttgcccgttagcttatgagtcaaagcaaaatttgaatttttagacttaattctagagttaattttgaggcatttttttattatagtttagttttcagcattggtttttaaaattgccaagagcacatatatacaaattttatacataaatcaatttttgttgcttcattctattttacaacttaatggcagagcaaacgatgaaaataatttatatcgtgtgctctagaaatgttgttttcactatatcatggatcagtttaggtagacgtgtagatatccttactccgtaataaaacgagccaacaatgctagcttagagccgttaattattgttacaagtaaatgcaaccttaatctatatatgcttatctgacttcaaaagaagtactccaaccatgtaaccaaaatccaaccgtgttataagtcgatttaattattctctagctacttactaaagtttgatatactcttatatagagaaaattagcaacatctacaatacaaaattagttttattctaacattcaatacattttgataatacgttttaaacattagtatataattctaaaaaataaattaaagcaatgtcgagtggaaaatacaacttttatcactgtgatgcaatcctatatacgactacctttatatactactctattcatttcaggttacaagacgtttttactttggtcaaaatcaaactctttcaagtttaactaaatttatagatacatatagtaatatttataatactaaattagtttgattcaatcaataattgaatatatattcataataaatttgtcttgagttgaaaatgttattatttttttacaaacttggttaaacctgaagcagtttaactttgataaaagtaaaaacgtcttataatctagattagagggactagcaccagtagtcggcaaacacattgcaactatttgaccagagtcaagtcaaacaaagcatagcacactcctccttaatacaccctacatacacaaaaccatactactactactagtaggagtctccccgttctgaaaaaagaaaaagaaaaaaaaaacctccatctcccgcccagtgccgccgcgccacgtcacccctcccccgccgcgcgtgtgtgtacgcgtagcctttccggcggagacgcagcacaaaaatggttttacttgcgatacccttcgtctccctcacgtcccatccatccctccccccccttttccctcctcctccacctccactgccatggccgcctccgccgctcctctctcccgcgtggtagccgccgccggttgccgccgctaggggagcgcgacgggggaacggtaggggcgacccagctcgctctgtcgccccgcggctggtgggggtgcgcgcgggggagagcggttggttagtatggtgctggatctcaatgtggagtcgccgggtgggtcggcggcgacgtcgagctcgtccacgccgccgccgccgcccgacggtggcggcggggggtacttccggttcgacctgctcggcgggagccccgacgaggacgggtgctcctcgcctgtcatgacgcgccagctcttcccttcgccgtctgcggtggtggcgctggcgggggacgggtcgtcgactccaccgctgacgatgccgatgccggcggcggctggggaggggccgtggccgcgccgcgcggcggatctcggggtggcgcagagccagaggtcccccgccggcgggaagaagagccgccgcggcccgaggtctcggagctcccagtacaggggcgtcaccttctacaggaggaccgggcgatgggagtcgcacatctggttagcttcgccttgctcgatttccctcacgctgacttcctctgcttgactctgcttgattggagtagtaatctcttcgtttgtctcgtccaattttggcagggactgcgggaagcaggtgtacctgggtgagctcctatttctagtctcccaagctaaattcgctcgcatgactgctaaatttgggtctctacttagcttgattccgatttgtttgctcctgccttgttttttttttctgttttcaggtggtttcgatacagctcatgccgcagcgaggttactataaatggtcaccaattgtatcttaattgttgctctggtttgccctgtgtgctgagattgtagaaccccttgtgcagggcctatgatcgcgcggcgatcaagttcagaggcctcgacgcggatatcaactttaatctgaatgactatgaggacgacttgaagcaggttgtttggaatatagttcaattgtcatgtgtgattctttaggttctaaggggaggttcattcaccggcctgtgatggtttatgatggattggttcgtgctgtgttgttagatgcgcaattggaccaaggaggagtttgtgcacatacttcggcgccaaagcacaggatttgcaagggggagctcaaagtaccggggtgtgacactgcacaagtgtggccggtgggaagctcggatgggccagctgctcggcaagaagtaagatccctgaaacattgattgttcttgctagtaacttacaatacaatacattttagattagttcaggaccatttttcatgccatgaacgaaaactgtgtcaagtttgcttttcaaaaagggaaagaaaaaaaatgtgtcactaccaagctggagaatggtaggctacccctggagtccacatccacctgaagatttgatgttgactcttcacacactagccatttactattggaacaccacaggtgttcaatgattatagattgctagcttctttaggaaagaactaagtgaatcggaatggctcctcggaattaattgaggggaaatgtttttgtttccttggggattgtgttttgcatcctaagtcagtgataggtgaaaagcttcatttcaatgctcttggttgtttttgccactaagaatgttctgcttatttacgttgaatttttgattggctgttcgtatcatagttgtgcatttcctatatattacaatctttgtgaactttagataattctggcatgagctctctctgtggtattgttctattaacagaagtatcattctgtcaattccccactgataagtgatcttttgtgcaggtacatctatctaggattgtttgacagtgaaattgaggctgcaaggttcagttagtagtactttgctcttctcagtttgatatgtgcttgctattcctatacttctctcactttcatctactcttcaacttgtagagcatatgaccgggcagctatccgcttcaatggaagggaagctgttactaattttgatcctagttcttatgatggagatgttctacctgaaaccgacaatgaaggtatttcttttgtactatgtatattgtgctttatccactagaacgacaaatccaaattttatattaacaaaagcacactggggattgtcttagcagtggttgatggagacatcattgacttaaatctgagaatttcacagcctaacgttcatgagctgaaaagtgatggtaccctaactgggttccagttgaattgtgattctcctgaagcttcaagttctgttgttactcaggtaaatatgctacaatatttggtgtttgtaaccgctataccatttgagatttgaccgtcttcagattcttttgatcaggtggttagtcctttttcataacattatactatcactttcaaaataattagtacactaattgtatgtgtcactagaattgttgtatgaaaccatctgggaaccatcttatgcagcttattgacaaatgacaactcactgttgatgtattcccaaatcaagaaaagccaatctttttattcaatttctccagttcattgaattgaaaaagaaattgccgaacaactaccacctgaagagactggctagatattttgtttatctgtgtatttttataacctataacagttccaaagccacaaagctcttttaccttgattctgataacgttaactgaggtatcattttgtgattgttttctgtagccaataagtcctcagtggcctgtgcttcctcagggcacatcgatgtcccagcatccacatttatatgcatctccttgtccgggcttctttgtgaacctcagggtatatctatcatcaaaacttatatgcaatttgaaaagacagttaaacttgtttcaagttaacattcgattgctaattagctactacttccatgctcctatttcttgagatgacgaaccatatgtttgttcctttaattacataatggtagccgtagatactgtttgccttgtgaactgtcagatatagcaggaagtaaatctgtcagcttgcaactttccatgaaccacagctgtccaactttatacagtggatgatgacttgcatttgatacatcctagtactttcttgttgcactctgcagctttagctctgaagatgctctatatttccatgaatgctcacgttagctctgaaatttcgaactttcactccataacatgctcacttaggctgtgtttagatccaaacttcagttcttttccatcacatcaacctgtcatacacacacaacttttcagtcacatcatctctaatttcaaccaaaatccaaactttgccatcaactaaacacagccttattcattgttccaccttttatttctgccattgctaaggtccaatcttgatacctcagagagctgcatgatgtgtagatagtcctaacttaggtccgttggttagaatcatccattcatgtttaggaaaagtgattaacaacgtgtgctgcattaaccattaatgtggtcaactctgatgcttgtgctatggtcactgcaggaagtacctatggagaaaagacctgagttgggtccccagtcgttccctacttcgtggtcatggcaaatgcagggctcccctttgccattactccctactgcagcatcatcaggattctctacgggcaccgtcgccgacgccgcccgctcgccttcctcccgcccccatccatttcccggccaccaccagttctacttccccccgaccgcctgactgccacctattctggtggaggcgacacctcaccgtgcatccaccgccgcttgctgataacattcgtcgtttgtccagagagggaccttctccatatgatatccctctctatgttccacctggttatgatcagaattctcacgctcatgattcttttatcttcatttttgagtgcgaaaccacgaatcgtgaccgtgctaccaggtaaacacccttgtacctctttgactctacaataaaattaatgtaagatattctggctaaaagtgattggccctccctactgtatttttacagagttgtaatttgaacagtgggcactaaagctggggcccactcgcaccagtgtctagtggagcgaagctttgcccttttcttgctatccagcaactattcctccgcctgcctccattgctgacagtggagatagcttcccagtggtcactgttccactgtactctgtcatagtttctgatcacccctattgtgccttgtctctttcacctcctccctcacttgtgctgcctctggccactagagtggcgccctgcactgttgccatgcatggctgccacttcgagagtggagatgggggttggcctttgggtgatttctgtgtgccatcttttggctcaatgtcgttttgggactggtgcatgtactggcaataggtgagatgagatatgaaatgtcctctgctgctttttctatctaaggagtagcttagctatcaccagctgcctttctcttctcaaataaggttgttaaaagggggggtcttaaagctaccccaactgctgccaggggccctcttcaatgccctcccagctgccgtttctttctttattggtttgcttctctgctgcttcttttgcctggttggatggatgtttgtttgttcgtatgaattgggggagctactagtatcattcatgagtagaggcaggcagggcagagcaggctgctggctggccaggcactgatgtgccaacagctatttccagtgaaacggctgccatttttctttgctgggattgtgatagtggtaggctggtagtactagctagcagtgtattgggggaaatactggtggtccatttgcctgttagccaatctgatgcttgcctttccatccgctggtgatggtccatttgctttggcatcttgcttgcctgttagtactacaaaagttgcatacatatgctattgaggttagggtgtgtttagttcacgcaaaaattggaagtttggttgaaattggcgatgtgatggaaaagtttgaagtttatatgtgtaggaaaggtttgatgtgatggaaaagttggaagtttgaaaaaaaatgtttggaactaaacacggtgttagagttgatctgagtacctgacaacttcatggcaaatgctctttacaatgacatcaacagactttagttttgcagcagttcttctctgtatctgtgtttcaatgcatgggtttggattgtgaataacagtattatatttgcctgcccttccttttttggtttaaaaagaaaggcattgtctatggtggcaaggcttttgatgaatagactatgcatcctttctttggtacactttgttagaatagtatgtggaatattagatggaccaaatctatcaaacataataatagtacaattaggatgtttggtagagatttgagatatccttttttttgggagagtttgggtgtggttgatttaactcccatagttaaattaattaactaatacaaagaaatatactgaaaggaaaatttccaaggtaggagtttttgctaaatttccttcaaattctctacaggattgttcatttcatatgaattccaagagataggataggattcaatcctttgttttaaagatcttcataggtaattttcatataggattaaaaccctccaaaattcctttgtttttcctctaaatcaaaggaaccctaaaacacatgaatatgagatgttttgtttggatgcttcaaatgaaaaatacatagaaaagacatataggaatttggtagattcatttgagagtagatagatggagaagagttgcattggacctttcaaaaagtgaaagaatgaagtttgagcaattgagctcatcgtttaagtttcccaaggaagtggggcataggaactcaatccacaggggcatatgtataggaaattttcttagggattgtaatccatgctttctaggaaaatcatactgttcaaaggagccattaatttagtataaacaaatggaaacaaagtcacttgagctatttacttgtgcaaaaatttaaaattgcaaagagtatatctctactatattaaaagtagggtcatcctctttccatccccttctcccaccgtgcgcagcgcgcccacgtgcatcatataagtaatgacctgatctaagttttaccctacaatcacacttatagtttatccttccttatacatgtctgattcgttataacataggggtatgttactagtattcaataaattagggctatgtttagctcctaaaattggggagaagtttgagaaaaattggtagtttggaaaaaaaagttgggagtttatgtgagtaggaaagttttggatgtgatgtgatatgatggaaatttgagagtttggggaaagtttagtgtgaactaaacaggactaggagtacatagtcgatcatcatcctctctctttcccttaaaccccaaagaaccctaacgatggatgtcctctctctttcccttaaggacataggaactgctcatctttaggaggatgtttttggagtcattgcctactgccaaggacagcaaggcgccagcgccacttttacttccctcccagatgacagctgaacctctcctatcatctttagttgcttagagcataaacaatgccacttctagagtgatggccagatggactaagggcacacatttaggatgggcctttcctcacaatgcaaagtgacagtaggggtggctttaaaattttcaagacaacatgtgacactatctatttaagcccacatattttttttaatttacgtggaagtctaaaattttacactaccagccaaatactcgtgtgtgcaacggattatccaaaataggaaaaaaaataagttctcttggttaaaaaacaatgttttatgtttacttggtttaaacaagatttttcatcttaaaaagaaaaaaaagctagctggtcttgaagaagtaggttggtacactgacctaatatagtgtaaatcatagttccacctgtcagcaatggcgttggtgacaaactcatcaccaccactagagtgtttttgaagtagtataagaaacacgatagaatccatattcaaatacactgctaaaagaagaattttgctgaaggccaaaataggttttcgctggcggccagcattgccgccagcaacctaaggccagtgaaaacaatgcatgttcactagccgtcggctagtcgcgagcgaaaaccgagtttcgttggggcaagcgaaagagatccaccagtgagaatgttttttagagaaaaaaaatgaaaatgtagggggggggaataggtcggcggcctggtgtggccatcactgagccctcttcggaacccttattgtcgttaccggatctactaccgccacccttcccttcggtgccgtaaaagtggacccggcgatcccgagcaacctccttcaacgatgtcgtccctcatcttcaccgccgtggaagttgacctggcgaccccgaacaccgccgctaccagacccacctccttcaccaccaccatccctctcttttgccgccgtggaggcgaatccagtggtcttgagcaccgccactgctagatccattctcttcatcgttgccactggtctccttcacactgtggaggaggatctgctgaggggaagccatagctgagacgaagtcatcatcgtcgaatccatgcccccgtgacctaccgccaccactgctgttggatctatacatagccggccccgctcctccggtcagatctgggagatggaggggagggcaaggtcactaccgccactccctcggctgcgtggcctccccatcatcgatgccacgcgctagaactagacttagcagccatcgagcttctccgtggcttagcaaaccggcgtcaccttggacaagaactcaacaccaagattgcgggcgctgagacgttatagctcagcgctaatctcgatggcgatgaactataggtttatttttgttattagtttttgccacagttcattcttcaaagaaattttttgaaagtgtcattttgtcaaaatttcagcccctcccctgcagatgatgggcccatttgtcgtcgccaaatctccgtttctcatactgtaaggatgagcacgcagcggcacaaatcagatgagggcaagctcgcaatagtcgatcaagacgtgtagtcaagctctttgtcagggcaaatctacttagagcaatggcctcaacaatagatctgctcgaggcggtggtatctatggaggatctgcccggacaatcagatgactcaccacctcatcacattgtttatgcccctatcttcttttctccgccaatcatagttagaggcaaacaggagccaaggctattggtctagttgctctccaaaagttcagtggatacgtatagagagcacaaataataggaaaaggaaaacgagagaagatagagaagagaaaagaaaagaatgcaatttgtacctgtatctcgcttaggctgggggcactttgggtccccgtaactgcccctatagatcaatctctccctgtctttctctcgatagatcacagtcatctctgccagtgtgtgtgtgtagctcggctccttttggagaacagtggtaggtcctgtgaatggcgagaccggctttcatcactcgagtactagctagctaccccccctatctagcgtcgcatcggctgaccagtgaccaggacgccgtacgccttgctcttgcaggggtttggggtttgggttcccctttctctttgagcagaggcagagtcagactgtctcagagactcagagtctctcagacccagagagagagaggtggtactgtcctactgtacagtattcatgtgagtgatggagaggggggttgcagctgtggcgacatgccggcattggtacgacaggatactgtttctttggttccctgatgcgtgttttgctacgcgcattcttcctctcttccataagaaaacaaacgaattatagatagatttgtagtattaaaatatgtcatatcgtatactaagattcttttatggtactatagatggagtataggaaaatgtgcattatttccctaatgattgttgagatatttttgcttgatatgtgtagttgttacttctttccttaataaatattacctctattctaaaataagtgtagttgtggaaatccgtcttatttaaaaaaattataatttttttaaaaaatagttacacataaagaattatgtatgttttatcatctaataacaataaaaatactaattataaatatttttaaataagacgaacggttatacgctaaacatgagcagtacaaaactgcacttatattattttgggacggacggaatagtaatctagtactccatccgtctccaaataaattttggttggatgggacatattctgattagtattacttagatgtgtcccatccaaccaaaactttttatattttgggccagagagagtacttgattagagcatcaacaattcttattgccaaaccatgcaacaagtgtggattccttgtgagataaagcaactagtaggaagacctcacaatgtgtgtatgtaagttattttttttaaaaaatgtgtgtatgtaagtgagggaaataaagtgggatccacattcaaccaatctatcataagctttggtgtgatttaaaaaagtgagatgggacccgtcacaacatattttatttccttactaccaataataaggctatgcactggtagtaattatttactgctctcataatgtttgttacttgataacaagcacatattccgttcatcccaaaatataagagattttaggtggatgtgacacattctagtactataaatccggacaagagcctgttcagatttatagtactagtatctgtcacatcacccaaaatcacttatattttgggatagagggaatatttaacacttactacatgttctaaccagggttggaaatttggggatacgatattaattcggatgaatattttgaaattttcaattttttcatgaatttgggtaatatttgttcaaattcaactaaattttgttcaaaattttggaaattttggactgaaattttcgaaatttcaggatttcggtgacccccgatcaaaaaccctaaaccgatataatgaaccctggttctaacactacattgtggatgcccttaaatattacctaggaatctaaatctggagttctggacaactatgttcagattcgtaagtgttaaatattccctctcagatccacagtgttaaatatgcgaagttatattttggcacatcttagagcaagtttaatagtatagcccactacaagccccaattcatctatagccgatctaatagtcaattcatacaatagttgcttactatactattaatatatggtcccacatatcatacacacattgtgtcttaaagaccgtgctacagccggctacagatctgtagcccgctgttcttctctcttatcttttatcttattaaaatatgtttatagctggctaatagtctgctattgtacctgctcttagacgcccgtgccatgcatgtaaactttgtgaaagcattttagaaacagtgtcttttcttgcatgtggtcgttagttgtgctaatgcaacatggcaatcagcaattggttagcactgtaggataaatacacagttgctttgcatttttcaaaaccactatggagatatatttgtttagttgtggatgggttatggggattggaggaaaacaaatttcaaacttactttgggcagggtatcagttaaatttggacagggaatgagtttgatcagagtaggtacaaatttttctactaacggtactaatatccttgcttatatggtcaatatatagtttcagtgtgtcacgatttgatctaaatatataggtgtaagtggcaagttaacttgcaaaattatgcaaccgcatcattaaggtggtattagtcatcagttttttctctttatattataagcatgtgtagtggtgaaacattcccctggtgtaaattaatttgtattgcatcctgagaaatcatttcgccttcaatgtgtgtaggataatatatgggatttctctattgtgggtagaaatccatgacgaacgcgtgtgatactttcaggtgcacattactcatgcttatgttttgatgcacccaaaaatttaaacttaaaggtctaatgtggtaaaaactttggaatgaagatttttcttaaaaagaaagtttgcaggaattaaactactactccatgtgagaataatataaaattccgacattcttgaggaaagatcacgaatgcaatgagaagggagaaattgagatagatggacgataactcacattgctaggccatgatgggcttttggagttttggaccgttgattcttttcattgctcactactcattttcacgaatctgtaggtcttaaatttaagtttataagatacaacgaggatgaacgtgactgtggcacacacctcgctccaagtcttctatcatacattagacgcaggcttggatggattaattataatgccaaaccattaaggctgtgttcatttcaacgagttgggaacctttccttccaacatggaaaacgacatagtttattagtgcatggatgttacatcctgaagttcttctcccaagcctaaattgaattaataaatggtcttaagaaattatttgtgtaatagcaagagagaaaccctaatttaataaatgcatttaataatcgaaaatggcatctgtaatttttcttgggttctacatgtcaaaatatgctaacaggatttttagtagaattttcagagctctagaaataattttaatcaattaaaattgagcacaagcaattattaaagccctggaaatcaatttcctttttctttttctctttccccccctcctttttcacttgttgggcccgntggcccttttcctaccgcacgcgttcgntgggtgagcctcaggacgaggcccgccggtcagcgcgccccctcgtgtgtgtctcgtggtcactgacacgtgggacccacctgtcaggtcctccccaacctgcggtccgccgcctcccgcaaatgcggtgccagcgcatgctgtccactctccgcaccccagtacacctctcgtgtctgcgattgcatcgagacagccgggattccatttttgaatcccgcctctctttcctcctccacctcccccacttcgccggtgaatccgcgccactcccagccgttcccgcactccccacccctatataaatggccctccctccttctctacctttttcctttttccaccgttcgctcccgaactccccatcgccctagcgtcgttgcccacctctccgccgtcgccgccactgctctggtcgccgctagccgccgtgccaagccgtgccatcgacgtcgtcgtgctcaccgtctagtgagccgcgccgtccaccccttcgccatcgaggtccgccaccggagcccgccgtccacctcgcgccggtgagcatcgccatggccgccgccttcggccggcgctccccattgtgttccctaggttaccacgaagctcggtcgcccgtgaccgtcgacatcttgccgcccatcgtcgccgttcgccgttcgccgtcgccttcctccatgccgaccgaatccctcggtgaggaccagcatctcctctccctctctccctctcccccttgtagcaccgccgcatcgccgccgctcttcgccgccagccgttcgccgcaggtcgccgcccgcgccgccgccgccgcgtcgccatggcgccgggccggcttaagccgcccgtgcgcgccggctgcgagccgcctccgcccacttggccgccagcgtgtgcgccacctcggcgccacgtcagcgtcacatggtgctcctctccccagtcccgtggactcggtccactgtgctccgtttaagcccattcaagtctcagtaaatcaagaaaaatgcaaagaatccattaaaaaatgttttgttctctgttttagtagtcttatagcatgtttgcattgtttgccttgtatgtcgcgtagattctggctctcccgacgcttcggtgtactttgaaatagtcgccgaggtccctctagccgcagagcaaggcaagtcatgcttgttacttgaacatattgatcctatattgcaaatgctctatgttttctttaaaattatgcattgttttataatgttactagatgagatgtttacctactattatcagccatactatttgttcatcttattcctttgctagcttaggttgtaacatggctatatgttggattaggaattgcatagctatgcttagttcaactagtacacaaagggggaaacacactatacatagactttggaatctagcatgactttggtttagtaccaccgcaatggtgttggttaattaaaatacactaaatggtgggctgtgggtgcatggttttgctggtcgtgcccatggcgattaaggaccggttcgcaggatgccctggaagaacttatcgtacttaccacaagcagggtgggcaacggctggagttgtagtgtagctttcctctagccgacacatccaggtaagggtgggcgtgatggagcggaataggccctgcgatggcctttgtcgcttctggattcacctaggcatgagaggtgcccattgccttttgaggagtgggggtgaaacttgaggtgtggtgtgcttggttagaggggttatgcgaagggtcctgtcacggcctctttttggtatgtcgtgatggcatgtcggctcacgggaatgtgtcgtggggctgtgtcttgtgggtatagttgtatacctctgatcagagtaaaactattcgaatagccgtgctcgtggttatgggcgatcaaccagattcactgtgattagtctcacccctagcttagcataatggaactgattagttcaggtggtggtttgggccagtctcaacgtggtgtagcgttgagcagtgattgggttaaatgatggataattattacaactgttttaccactttcaactactgtttataaatgctagctttatgcaaatgaaccccctttagctctctttggttatatcctgcatcataccctcagttccagtatgacttgttgagtatagtgggtagtactcagtcttgctctatctcccaaccccagagtttgagtatgcgtcagatggtggcttctcataggagtaggcttcgtctgtgccgtcgaggatgcctgtggaatggtgtctcccgctgctatccaagtcaaggcttagctctagttatccttttaatttccactgcagttatgtaagacttttataatgtttgtaagacgtagatctgtatgttaactttgtcgtttgtgaaccctggccggtcctggacaggggttttaatgcacattctgcctggaattctattcgggaatttctgggcgtgacaatggttaattaagtattagaaaaaaaattgaaaaatgcattaatataatttttacaacaactttttaatttcatagaaaatttttgaaaaaaatatattgttcatctgtttgggaagtgcgcgcgtggaaataaatgaggaagtaaagttgggaaggtgtagaaactaacgtaacctaagctactatggcaatctggcacctttctatgcaggcttgttcactttgttgccattgtcacccctaccaaacttttggtaatgtcaaattttagcacatttcggcgtcactaaaatttgatagtgttggatgcgcttggtttgaagctaatttacctaaatttggttgagtgtttgagagtggaaacttccagaattaaaatttttttagcagagttggaatggtaagggtatgtttggtttgttgctgccataataaatttggttatgttaaaatttggtagggttgaaagtgacagtaaaaagaacaaccccacatctcgatatcctcgttttgtttgttgctaaaccatgtcacgtgcccatgccactgtgatccataagtataactttgtttttgatggagttgtgcttgggtgtctgcacgctgttagtttctggaaaaaaaaactgtgcgcgcgcacatcttgataattaattatgttcaaagcacagcattttcttaaatctgagattttctttttgtagaaagcttgcttttccaaattaaatggaaggttttgttgtccttttttcataaatattgcacgcaaacagatcaaagacggacaccactgcacagtgcttgtgcaccaattaatcttaaatattaccatttcaataaataccaaaaaataatatgcatcactttcccacatgtgagcatgaaacaaagattcccgctacatttaaacttcatataaaattttcccttaaattacttatccgatctacaatccgattgtaccgttgtatttgtttaattaaatctttacagcaagatcttacatgattatattctaatgaagaaaatatatatgttgtaaatatcttttattatatatcaatattacttttctcataaatgtatttacttttaaatttgattaaattacttcttagaaattgataataccgtgaacatgttacttttgtagccgtctttattctgttctatactttgtgttgattcaattgaatttctagaaattgattatattgtgaacatgtaacttaagactcatgtttttacccctacaacggatttacttttagtgccatgataacttactttcatttcgtgttatgttagtatgttacatttataatatgtgtaaattacttttaggctttattgaatttactttaacaaatatccaggaagtaatttaatcaaatctaaaagtaatttacatatatgatgaaagtaatttacaacatgtatatctctttcatcagaatataattatgtgagatcttgttataagttttaattgcaacggatataatgatgtaatcggatggtaaaaaaataaaccagatttaaaaagatacgggtatttgactaaaaaagtagagtgtggtctacttaagcctaaacagtgcgtatgcactatttagattttgcctttgatacttttatttgagaggataacgtcacatgagctgaactgtcggaacacaggtggcccacaagacgagaagaggagaggaaaagtttcctcgctgaagagcataggaaaagtttctctgttgaagaatgatgggagttctatgacatggtgcagtgatagcatttgcttgtcaatagtagtgcgaatgtctatgcactatcccccaattcaaatcctctgctgtgctgcacatgcagactaacatgtgggccacagggtctatggggcccacatatcagtgagcagtactgtatgtgcagtactgcagaggacccttactcgctaaacccaccctcagtatttaaactttgtgctcatgcaacatggcgaattgacatctttaacatgttaacattgcactaataactacaccattgctttgcattttttttagaattcgtatgtacgtgtatttgtttagttgtggagggattatggaggattggagggcatgaggttgatcagagcagtcacaaatcctgctgcaaatgaatgatacccagatcctgacttatgtgttgtaggaggttgatattgttgtactgtgttgcggtctctgatctatataagtggattgggtaagttttgttgcaaaattatgcaaccacatcatcaaaacaattttactggtcagatttctactctgttacgagctgttggattcacagcatatgaaacctcttccatatcatgtctctagtgttgatagaatagtgcatacattaccagagcaggatggaagtgatatatggatcttcttctatcgtggtctaaatgtatattgggcaatgggcatggatacaaatagatgttctcaaggaacaagtacaatacactttgtgtgaactaattggagaataataattacatatgtttcatacactgctagtacaagatgtgaccgacttttccttgctggccgatggatggctttttgttgttgagtatgatgggtggctcgacatgtgatacttctagttgctcattactcattcttttgtcttgatttagtcctaaaatttaaatttaaaggtctaatgtggtactccctccgttcatctagttgacagctattttgaaacaaataagtgagcttggcggttaaagtttgttacgtgttattggttgttagacatgacacgagatttgcttggtacgtgttaatgcttgctacatgatatcaagaaatacggcgcattgcacatgccctacatgtaaactttgtgaaagccattcagaactgatcaagtttgtttgcatgacttatatcatgctgctgcaggatggcaacgggcaacatgttataaataaacagtttctctaagttattggttgagaataataataagccatatgtttttgttttagagggtataattagcgattggagagatattggaggaaaccaaatgataaatttaaatttggggtgtgtaatagttggtttgccagtagatgataaaaatagttgcgttaatgtcatctattgagttgccagtagatgatagaaatagttgcgttgcaggtgatctgggatcatcctagtcttgtacaaatgttgccatgaaagatgtggtcgctaagtatacattcaacaatcatgaactagcgatctatccaaacaagggggctcgccaagatcgccatgtcggactccgaggagcaccacttttagtcgaaggccgaggctggaaccatccgcaagaatgggtacatcgttattaagaaccgcccctgcaaggtggtggaggtttctacctcgaagactagtaagcacggtcatgccaagtgtcactttgttgccaaggatattgttccttcatcccacaactgtgatgttccacatgaaccgtacaaattaccagctgattgacatatcagaggatggattattcgtgagccttcttactgagagcggtaacactaaggatgatcttggactcccaacttatgacaatctcctgggccagatcaagactggatttggtgaaggcaaggatgttgttgtgactgtcatgtccgccatggggaggagcagatctgtgcgctgaaggacattggccctagtaacttcctcaagtgaaagactacgaaacagagggatgcttatgtatcaaacctaaactataaaaaacaatgatgtactatatcttttatggacaggacttcaccgacaaaggtctaataccagtgtttgaggacaggacttcaccgacaaaggagatagaaataagcatcctactaatggctttaagggtggtcagtattcactagttggcacaataatttaggtgatggtatgcgccatagtttcctatgttgatatttattcattagtttacataagttgacatataccagcctgtatgttgaagaagttgaacttcatcttgcaaataccgaaaaggatagggtacatgttgcaaatatacttatcactgccaaatatgctgaggacctatatgtgatttctgcaaacaatagtgctccgatgaaagattgaaagagtttcctaaatgacatttagacccagataccactatgtaatgtaaactagatggtacctcgcgcgttgctacggaacacttaacatattgtcggattaggaaacattttttttataatatgccatataagcaatctaacatggccgctgataacttgacaggcagttatattgtttagagactaaataacatgttaggaaggaaaaatgagataaattgtatcgttgattttaatcataaattaaagaaaatgcttctcactaatttggtagacatcacattgctaggtaaagctataatcacttgaattgtttggataaacagatgtcaatccatcccatgactccatgagggagatccattagaccaaatgctgatggtcgatgcagttgctgtaaccattgagaaaacatacatttactagctaaaatcaagtttacataccagcaagatcatgtaagatattaaagcccttccatagttccatcaaatgtaagtctgaagagcaagagactggctttggtttattccttttatctagtggtctggtgatgaactgaaacaattcaagttttagtgttttattatggaaaaacaaaatgcacctaaaatgcacagagctccgatggagggaggaccatggaaatgatgaggaagatggcggcaacaggaggggattcctcggcgacctactccacccgttatcgcgctgggagaggcgacgaccggcatctagcgagcagccggcggccatggtcgacaagcggcagcttcattcttgatgcactgcttttttcagcttcgtctttattttgtgattgggccgaacctagaaggccgtagcacgcttgtgggccgagcgactgaggacggaggctggattagcgatgccgttggatgcagaagaaacgatggatctggcatctacgtccctctgacgtagaggcattctacgtcagaggatcgtgttcccacctagtaatataaatctagacaactctgttcagattcgtaatactaattaagtggcatctaatcgaattctatgttgctagaatttgatacggaaggagtagttgctacataggagcaagagatgtggcacatcttagatgcctgtgcattgcatgtaaactttgtgaaagcattttagaaacagtgtcttcttttttttttttgcatgtggtcgttggttgtgctcatgcaacatggcaattggcaattggttaacattgtaggataaatacacggctttccatttttaaaaaccactatggaggtatatttgtttagttgtggatgggtactacgaaaaccatttttcgtagcagccattttatattttcgctggcggaacttagtgctgccacagagcaaaggccagtgaagattaacatcttcgctagcggttatcgaccgcctgcgataattcattttcgctggcgatcgtcttaaactagccgccagcaaagatccattttcgctggcgattggcttaagacagccgctaacgtaaatgttttttcgctggccaagtattaaaaaaaacgacggatggagcgacaccgctccgtccgcttccgtcaacgctccaccatttagaaatttcacataaatttaccccaagtattaaaaaatccacagaaatttacatcaacaatttacagtcaactgttttcattcaccaaagcattcaagcatcacaaaaatcaacacggaggagcgagccaggcagcacggtcgacggcgtcgaggtcggagaggagggagccgggcagcacggttgacggcgtcgaggtcggtgccgtcctcaccgtggtccggcgggagcggatccggcttccctgcggcccggcggcggtggatccggcctctccgcctgcgcccgcgcgccaccgcccgccgcccgcgcccgcctggtccggcacgttgttgtcggcgtcagctccgccaccgcccatctgccgtcgctgccacggcggctgctgcccccttcctccggctagatctgggagagggagagggatgggaggggaggggagagaggtgagggcctcgtcgcccgcgcccgtcatggacgccgtcgtcgccgtcgtcaacaggacgaggaggaggtctgggagctccgggaggaagaggggagagaggtgggggaggacgaggaggtgagtggagaggagaaagagatagaggagagatgaatgcatgggtgggtgggtggcagcctctggcagtgggtgggtgggtgaaggaatctcgtgtgcatggttttaaatgccgccaaaattttttagtgaggctttgcttttcgttggcggatctgtttttttttctggcagatctctttagcagccaccagcgaaaatcggttttcactggcggcccgtgaccccccaccccccgattttctacgctggtgattttttctcgtagccgccataaaaaatattttccaaatgccataaaaaatcgtctttctagtagtgatgggggattggaagaaaccaatttcgaactaactttggcgagtgcatcagttaaattcgcacagtgaatgagtttgatcagagtaggcacacattttactacggcgtttggttgcaggcggaggttatggacgactgtaaaaataagttttgaacgcatgtaaaaatgctttttttagtagtggtcacaaatcctgctacaaatgaataatacccagatcctgacttatgagttgtaggaggttgatattgttgtattgtgttgcgatctgatctatataagtggaatgggtaagttttgttgcaaaatcatgcaaccacatcaacaaaacaacttttactggccagatttctactcttaatgttacgagctgttggatttacagcgtatgaaacctcttccatatcctatctctagtattgatagaatagtgcatacacattaccagaacatgatggaagtgatacatggatcttcttctattgtgttctaaatgtatattgggcaatgggcatggatacaaatacaatacactatgtgtgaactaattggagaataataattacatatgtttcatacactgctagtacaagatgtgaccgacttttccttgctggccgatggatggctttttgttgttgagtgtgatgggtggctcgacatgtgatacttctagttgctcattactcatgcttttgtcttgatttagtcctaaaatttaaatttaaaggtctaatgtggtactccctccgttcatctatagttgacagctattttgaaacaaataagtgagcttggcggttaaagtttgttacgtgttaatggttgttagacatgacacgagatttgcttggtacgtgttaatgcttgctacatgatatcaagaaatacggcgcattgcacatgccctacatgtaaactttgtgaaagctgttcagaactgatcgagtttgtttgcatgacttatatcatgctgctgcaggatggcaacgggcaacatgttataaataaacagtttctctaagttattggttgagaatgaaaattagcatatgtttttgttttagagggtataattagcgattggagagatattggaggaaaccaaatgttaaatttaaatttggggtgtgtaatagttggttagatagtcagcaactctctttaatgtcatctattgagttgctagtagatgataaaaaaagttacgttaatttcatctattgagttgctagtagatgatagaaatagttgcattggaggtgatttgggatcatctagtctagtacaaatgttgccatgaaagatgcggtcgctaagtatgcattcaataataatgaactagtgatctatccaaatgaggtaactcaccaagatcgctatgttggagtccgaggagcaccacttctagtcgagccatgtcagactccgaggagcaccacttcgagtcgaaggccgaggcccggaaccatccgcaagaatgggtagatcgttattaggtttctacctcgaatactggtaagcacggttgttggcggatggcatgaggcccttcgaccaaatctgccgaaacccgtggcgaagactatggagcaagaacggcgtgaggcaaagagtcgtacgagtgccttgccaggccagaggcgtcttaggcgaagggtgcaagacgaagactatctgccgaaggaagacgacttcgccatggcaagttcgcccccgcaagggccgaggaagcctttccggcccatcaagcctaggggctatagggccggcgatcgccagacggcccatcaggggcccatgagcccctataacattatgtacccctgtaaatgtccctttcgcaagggtaatcatgtaaattcccctgtacaacctaaaccctagtagtaagaacctataatgaggctataaatagtcccctagggccatgtaatggggggatcccgaagaagaaattttaaattcaatacacttcgtttctttccaaccattgttgagtaaccacgtccttcgacgtatgcggttgtcatttcgacaacagtggcgccgactgtggggacctccgagcgaaaccactgagagcgaatgccaccgaagagagtcgtgaaggagaaggttgctaggcggaaggaaagcgacgccggaccgggcatggccgttgaggaaggagcagagccatcggcgcccatggccgaagatggaggaggacaagcaccatcacaaccgccttcggcccctgcaacctccgtgcaagtgacgaacgcggccgacgtggtgaaggcggctgcggcggcaagggcactccagactagggcggagatcctttcgacaagccaactggtggtgccccaagccgctccatcgcagccggtagcggccccaactgcgctcgccgttgtgcaggcccaagacagccctgaccccgaagcacaagccgaagccgacatggaagccatgcggcagaacatgacacggctccaagacatgcttcgccaaatgcaagaacaacaataagcatacgaggcggcaaggcggaccaaggccacgtcgactccaatccttcagtattcggcaggatatgtcccatctcaagtccatccgcaagtgacgacccagccctttccgccacaagccgcacaggcaccggtgtacttcgacgggcagcaatcggccgcagcagtgtattcggcccctcacgtgcaactgcaagctccagtcgctgcccaagtacaccatcaaccacctggtcaagcgccacaaacagtggcagaagcggcttcggctctgcaggcgcaactccaagctttccttcagcaactcaaccaaccccactgcatttcaagtacaaccccatcggcccacccggaggagaatacaagtcaaggtgcgcctaattggttgccaccgattcagccgggcctgggagcttcgccatggaatcaaggaccgcagttcgacttcatcaatgctgctcagagaccaaccgttcggcagcaagctccaggcttcggaacaaaccaagcaccaatccaagctgccacgacgtggtcgcagccaatttttgacccatccatggcggctcagcaagtacctccagttggagccaggcagtcgaatgccatggcacaacctcacgcacaagatgcgattttgcccttcgccacaccgtacccgcagcaaagtgcagtaaacagggcgggaggcgaaaaggggctaccgctgagcgggggaatcaagactcgtccaatcccaccgcagttcaagttcccacccgtcccacgctattcaggcgaaactgacctgaaggagttcctctccatctacgagttagcgatcgaagcggctcatggtgacgaaaataccaaagcgaaggtaatacatctcgctctagacggcatcgcccgttcttggtatttcaatttaccagccaatagcatttactcatgggagcaattgcgtgatgtttttgtccttaactttcgaggcacctatgaggagccgaagacgcagcaacacctcctcggcattcgccaaaggccgggggagtccataagggagtacatgcatcgcttctcacaagcctggtgccaagttcaagacataaccgaggcgtcggttataaacgccgcttcggccggtctgctcgagggcgaactcacaagaaaaatcgccaacaaggagccacagacgcttgagcatctacttcgcatcattgacgggttcgcaagaggcgaggaggattccaaacgacgacaagctatacaagctgagtacgacaaagcctctgtcgccgctgctcaagctcaagcacaagttcaagttgccaaaccacctcccctctctgttcgccagtctcagccggcgatccaaggacagccgccaaagcaaggccaggcccccataacttggagaaaaagttcagaacagaccatgcgggcaaagctgtgatggcggtcgaagaagtgcaagccctccgcaaggagttcgacgcccagcaagcgagcaaccatcagcagccagcccgcaagaaggtccgaaaagacctctactgcgcctttcacggacgctcttcgcacaccacggagcaatgtcgaaacattaggcaacgtggcaatgggcaagacccaaggccgcagcagggaacaactgtcgaagcaccccgcgaagtagttcaggagcaaacacccccagccgaacaacgccaagatgtacagcgaagtgtaatccaagtgattacaagggctgacccgccaagccagttgtccaaacggcagaagaagatgcatatccgtatggtccacagcatcacttcggcgggtgaaggggcgccgcagtatctgaaccagctaatttcttttgggccggaagacgcagaaggagttatgtttccgcatcaagatcccctggtaatctcagctgagatagctggtttcgaagtccgacaaatcctggtcgacggagggagttcggctgatgttatcttcgccgaagcatatgccaagatggggttgcctacccaagcccttaccccagcaccagcatcgctccgcggtttcggcggagaagcagttcaagttctcggccaagcacttttgctgatagcctttggctcggggaagaacagacgcgaagagcaaatactgttcgacgtcgtcgacatcccgtacaactacaatgccatctttggccgtgcaaccctgaacaagttcgaagccatttcccaccacaattatctcaagctcaagatgcccagcccgacagtggtgatagtagtcatggggcttcagccttcggccgcttcaaaaggcgatctagccataatcaacagagcggtgcacagtgttgagaccgaaccgtatgaacggccgaagcacacgccaaagcccacccctcacggcaagataacaaaagtgcagattgatgacgccgaccctacaaagctcgtatcactggggggcgacatgggcgaagaagaagttgagagtatcctagaggtgctcaaaaagaacatcgatatcttcgcctggagccctgacgaggtggggggtgtcctggcggatctcatcatgcatcacctagcagtcaagccggacattaagccaaaaaaacaaaagctgcgcaagatgtctgccgattgccaagaagcggcgaaagccgaagtacaaaaattgctcagggcgggggttatccaagagattgatcatctggagtggttggcgaatccagtgctggtgcgaaagtcaaacggcaaatggcgcatgtgtgtcgatttcacagacctgaataaagcatgtccgaaagacgacttccccttgccgcgaatcgaccaactctgggggcgaagaggggcgcgaagtatcgctcgaactcttagaaggagtaagggtcgaagcgctcgagcacatgcacaagtacgccacaagcacttcggcaacttacaacaaaaaagttcgacccacgcagctgatgcctggtcatcttgtcctaaggaagaaggcgaatccagtagtggttggtaagcttgaatcaaagtgggaaggaccatacctcatcaaacacaagtctaggacgggatcttttcgcctagcgacactcgaaggcgaggagttcgaccattcctggaacgccgcctctctcaagcgcttctatgcctagaatgggtgtcacccaaatcgccaacttgtaaaaatgtacatacagttatgtaagcccttcggcaccatgtaagccattcggcactatgtaagcctttcggcaaaaaaaaaaaactggatgtagggctattatccaccatggaggcccaaaccagtataaattctctgtgccctccgccttctttttatttttcgtgtgattgataatttgtgaaaaaaccccaaggcaaacgcctgatcagcgaaaaaggccagggggagaaacgaatcggtcgaagcatcgctcgccgaacgttgaaaccgcaacagcttgtctcggaaaataactagccgaacgacgttacgattcgatcaacataaaagcaaaagtgtctctttcgacacagaatgctacaggtcgaaaacgaacgacaaaaagctgaaaagtcagtacacctatttcgctaatatgcgcataggggccggcatgttccgacctaacaaaagcacaaaatgtgacaatgcgaaaaatagcgaaaaggaaataaagcacgttctttattaacttcgaaaaaataatcgaagaatacaaggtctacaacacgatacaactcactttacaagtaaattacatcttcgcccccgtaatcattatccctccctaaggaatggacagatgaactaggttcgtcatcactactaatatcatacacaaccttaagaggagtagggggcgaaacgcagaccaaactgtaacgacgctgaaagatcatttcctgacgtttagttttctgatggtttcgccaaaagcgagccatatcctccaaacgtcttgaatgaataagatcgtaatcttctaaggttcgcccggggtgcgcccgcagccagtcggcaaccttgaaaaccttatagctgcgaccgtttatctccatttcgcgataaacagggagaaatggacatcgcacctttggtaggtccttcaatgccacaaatttctcgttttgacttcgccagctcccggaagggggccgaatgcacaactttcggtgaaccccctgatagacaacgcagaaaaagcaaaacacagcttacatagtaagaataggcggaaggagggggaggtatggcataatgcgagatgagcgaaataataatttgccaaagacctcgatcatcaaaaagcaattaagattgtgtcatatattccaaatgtacaaaaaagcctttttaaggttcggcggcagcctgccgaatgtacatcattcgccttctccaggcaaacgcaaaatcgggaggaaaactacaaaaatcaaaggaaagggcggagggcctcacacctctaggtgatcctgggcatcgcctccgaccccttcgcctaccgcgccctcttcttcgccccgatctgccgcctccgccttcgccagttgctccagaaagcgcgctttggcagcggaccggccatccttctgccagaactgttttcgccacgcgcgaagagcgggcgaaatgttctgcgcactaatctcccagtcccccttcgcataggtagggaactcggcgacgtgctcgcagccgaactgttgcaaaaggcctaaggtaaaggccgccgatacgcgtgcacagtaatcgccgtacgcggtggcacagtccgaaaccgatccgccagcctgctgggtccactcggagaagtcgaaggctgaggcatcctcggcagggaccccccgcaccttcgcgcccatgtcggtaagggcgaggcggagcgtttggcaagccgttctcgcggattcggtggtcttcgccatctcccgtgaaaaccgctaagactcctccgctgcgctcgcttcggccctgccagccttctggcgaagagcctccatcttcggctctgtaaggttgtagtaatcaatgagcaccgccgaatgggccttctccttctccagttcggccttgaggcgatcaacctcggcctaggcctctttccctttgtccaattcggactgaaggcgtttgatttcaattttcgcctccttgagggtgtgggccagggactccacctccaagttcttgcggcttatttcatcatccttggcccgaagacggctcttaaaatcgtcaaaacgggcccgcacggttcgctctatcgaacagtgagccgcaagaatctagatgaaagataggagcgggcgaaaagaacaaaaggttaattgcgaaacgtaaaaaaaagagggaagaggaaaacgaaggaagagaaggcatacccgaaccgccaaacttttaatggaggaacaccccttgttgaactcgttaagttcggtgaacaggctcggggtgccggcgggcaagataagattacttactccctccacaaagggaaaaaggttcgcccgggtctcgaagtcaccaggggcgaagtggggcgccgcgagggaatactctgaggcagatgcttcggcggccgcacacttccccttcgccttgaccagcggcgaaatagctggctcgcgcacagggctcccgaaaaccctcgccacagccgacacgatccgttcggcggaggcggaagccccggcggcggcgctacgcctgccccagcaacgctgagcggagcaaggggagcagtcgaaaaggtccaaactgcggccagcaggtgaagtcggagtctcgtcagaagactcgtcgttgctaaaaacgcgagcgatgtcgacgagtcccttcttttttgagatcttcttgaccagacctcctttcgccgccttgcccgacgagaacgcaactaaggccttcgccccttccaaatcctttcgtcgaaggggggagctgttcgactccaccccggtctcgttgtgacctggacttggggtaggagtgtagccgggggtgtcgacgtggtcttcgatcgcctcgttcacggccttatcagccacagcctccacctcctcttcttcctctccttcctcctcgccgtcacgttcttcggaatcatcctcatcatcggcatcagagtccgacgaagcaggaacccttcgcttcctgggggcaagcttcacttgtccacgcatctgctttcgcgaaggccctgcatcgtcgtcggctttttggggattcgctcggggaggcagttcgccgttgtaaacccggttcgcccgcccagccgcttgtcgtgttagcagctggctatactcgacgaccgaaacgtcgccgatcatcctgcgggcttcggcttaagcctggtcgagggtcgacactgcaaaagtaaagggtgtggctgcgttaaagatcagacaaggcaaaataacaaagcacaggagtgtatagcaaaagaacggtcttactattcgtcccctcaggaagaaccaagttcggcaaaccgtcaggctcttcgcattgctcgaccgtgacttgccatgactgggagaggggaaagatacgaagcatacaaaactcctccaccaagtcacggcagctaaggcgggagcaaaccttgcgcagtaggacgaaccgcgcctccatagcgccgtccacggcgatcttgggtttccggttcggcgcaatcgccctacgccggcaccggagggcttttgccgagttagaaccagccgcgaaggggatggtgtgatagaaccacctcgccatccaatggaggtcccacttcgacatggcagcgttcaccggccagagatcggaccgctcggggcgaacgttaaagttcacgctcccgaacactgtcttcttcgttccagccggggtaatcaccgtcttcgagttcacggtggtgaaaaatatggcgccaaagagctcggcgctgggctcaaacccggaagtccggcacgcccagtcaaagatggagatccgaactagcgccgacgggctcaactacggaagctccacctggaaaaggcgaaggatctccagcagcaacacgttgcacggaaaccatagccccacctcaaaaaagacggcgaacaccaccgtccgattgtcgataggcttcagcaccacggctttccccggggcgaaagcttgcccctcaaccaacaccctagagttgaccaacttcgccagctcgacatcgtccacgagagaaacccccaaaaaagcggtgctgtcatcatcgacctggccgggatctggtccttttgccgaagctgggtttggcttgcgaggagccatggcgaacggcgtgtatgcggtggcgaaggaagagaataggcgaaacacctaaggggtcaagaaatgctgtggaagagaggaatggaagaagagaacgcacgcggtaaaaatggcaagcgtaccggtgaaaaagaaagaggggtgggaatatatagctcacccgggcaaccgttcgcctactcaccagtaataaagcgccacgtgtcgcaagggtaggcgaaatggtaaattcccactgtctgagcggcacagtaaaaagcccacgatgggaaggcccaatactgttccgttcggcccgggaaaagaaaaatatataaccaccaatcgcaggaggcgaagcgtggcaaaataataccagccgcacaagtaacaaacttcattcgcaggaataatgtaggtttcggcacgagtatcggtcgaaagggggcgccgcataccataccacatggtttgcacggtctcggccgaagctccaatctcacccttgcccgtgaggggcttgttggcggatggcatgtggcccttcgaccaaatctgccgaaacccgtggcgaagactatggagcaagaacggcgtgaggcgaagagtcgtacgagtgccttgccaggccagaggcgtctcaggcgaagggtgcaaggcgaagactatttaccgaaggaagacgacttcgccatggcaagttcgcccctacgagggccgaggaagcctttccggcctatcaagcctaggggctatagggctggcgatcgccagacggcccatcaggggcccatgagcccctataacattatgtacccctgtaaatgtccctttcgtaagggtaatcatgtaaattcccctgtacaacctaaaccctagtagtaagaacctgtaatgaggctataaatagtcccctagagccatgtaatggggggatcccgaagaagaaattttaaattcaatacacttcgtttctttccaaccactgttaagtaaccacgtccttcgacgtatgcagttgtcattttgacaacaacggtcttgccaagtgtcactttgttgccaaggatattgttcattcatcccacaactgtgatgttccacatgaaccgtacaaattaccagctgattgacatatcagaggatggattattcgtgagccttcttactgagagcggtaacactaaggatgatcttggactcccaactgagacaatctcctggggcagatcaagactggatttggttaaggcaaggaaggaggaggagatctacgcgctgaaggacattggcaccaagtaacttcctcaagtgaaaggctacgaaacagagggatgcttatgtatcaaacctaaactaaaaaaacaacgatgaactagatctaaggagaggagttcactgacaaaggtctaatgctagtgtttaaggacaagacttcaccgacaaaggagatagaaataagcatcctactaatggctttaaggacagtcagtattcacaagttggcacaataatttaggtgatggtatgcgccatagtttcctatgttgatatttattcattagtttacataagttgacatataccagcctgtatgttgaagaagttaaacttcatcttgcaaataccgaaaatgatagggtacatgttgcaaatatacttatcactggcaaatatgctgaggacctatatgtgatttctgcaaacaatagtgctccgatgaaagattgaaagagtttcctaaatgacatttagacccagataccactatgtaatgtaaactagatggtacctcgcgcattgctacggaacacttaacatattgtcggattaggaaacaaattttttatataaaaaagccaatgaactgaagtaattctacaggttgatggggatataatatgccatataagcaatctaacatggccactgataacttgacaggcagctatattgttcagagactaaatcacatgttaggaaggaaaaatgtgataaattgtatagttgattttaatcataaattaaagaaaatgattctcactaatttggtaaacatcacattgctaggtaaagctataatcacttgaattgtttggataaacagatgtcaatccatcccatgactccatgagggagatccattagaccaaatgctgatggtccatgcagttgctgtaaccattgagaaaacatacatttactagctaaaatcaagtttacataccagcaagatcatgtaagatattaaagcccttccatagttccatcaaatgtaagtctgaagagcaagagactgactttggtttattccttccatctagtggtctggtgatgaactgaaccaattcaaattttagtgttttattatggaaaaacaaaatgcacctaatagatcatggcgatgaagggtttaattcacaaaatataagtatcaaagacatataaggaattgttttacaatatctctagctatctgaatatatgtagcaaaataatgatgggcagctttgcaatttcatatatacatatggatgaaaccaccctagtccctagagtaatgaattacttgatcaattgctccagaataacacaatgcctttcatagggatgattcttacacctgaaataaaaatggacattagaatttaccttgacgtcccccacacaggtagccaaatcaaaatgtacacagaaagtagagacagaatgataacaaaatttcatagctatagtcctacaatctgaagaaaaccaagattagaaaaggcaagaagcaattatgatttaatttaaaagggaggagagatgagggagatacacaaataacaaaggggcatgggaggaacaaaaatttcacaatagtactgcattctgaagtgaaccaaaattagagaaagcaagcaaggaggatgggaggaagatgcaaggcaaacagaagcatgagaggattttatagacgggtgtactatcggctaacattcgatcatagtggagttgatgatgaagcggactgaggatatgaagcggaccgaggcgatgctcttggctgttgattcccttgctcgggaacgggatgggacgggatggcgcgcgagtgttaacagtgaaatttggtaagcccccaaagtcatcatcggcctagagtcattatcggcttcagagtcctggaatcggccgatggaaattatcaagtcgccaatagtcgggttaatgctatattcagttaaggaaattaatcaattaaaggaagttcattcagaagagaccgagttcaaagaggatgcggtaaggtagtttatctattaattaggatgagtttgttagtttccttttatctttaggaaattatgtttagtgtccgataaggactttatgttttccttttatctttaggaaagtttctttctcgtctaacaaggaccaatatctacctatgggtataaatatgtacacccggggtgattgtaatttatctccacgatcaatacaaattcggcgcatcgccacctttttttacttttctactttttcaacgaatttattcttttcatcggcggggatagggcttcaacactctgatcttgtcaatgtaagcacctatctaccatatatctttgttaatctagtttggtagttcaatttacttgtatcggctaagattcgttttagggtttataccggaaccggctaaattgctttaccaaattagattagctaaagtatctaccaccctgaaaatcagtcaagagcatgattcactacaagatatcttatgatagatgacgcttcatttacgtcacaaacattgaatttttcgtcacgttttgtaatctgtgacgctcgtgtgacaaaaattcattcgtcacctatcatgcgtctctaatagcgttctatgacaaaaccttatttttttcgtcattaatctagtgacgatccttctgtcgtcataactttgtgacgcttatattcgtcattatctagcctaaaaaacgtcacaaaatatcagatagcccattaaaatccatgtattgagcaccctgtttatgggcttagcccaatggcatgcccaactagattttagcctgacccatctatgatgtagcatattttcagcccaattttattatatccatttgctttaatatcaaataataaataggccaagtccattgcaaaagcccatataagcccaaacattataccacaccattttcaacccatcatattagtatcaaataacaagtgggctaagcccatataggcctagcaatcaaacacaataacaacccatatagcacaaaggttacaacccatatagcaactggttcttctgataatgcaccattacagaagtcttacaaaccgaaaaaaacaaaggtttcaacaaactgcatgcaccatcaacaatcacctacaaggatatgttgtatcaaactagcaaagatatctgattctaaggttgccaaatgttcatagcatgtatttctgagatatttcaccactccagatggcaaaatcttcagctgcctccatcctgtacatttcttctcttgaaaatcaaccaatggcatcaatgtatctttaccctttacaagatcctacccaacagacatcattgtaagtacagagaaatgcagtactgaaatgcagtatacagaggagagaaatctaatctagttctcaacaagctgacatagtatacagtagagagagaagtacagagaaatgcagtactggatgcagctttatcactacaggaaagaaactcttaagttaattaatttcaggctaagttaaaactactggtggaactgggtaaatttggaccactcatccaaccaaggattggaatcaaaccagcaagctaaagtctaaagggtagcctctgatcaggatcagattcttcaccagctaattgaagcagaaatgctgaatgctaaattgcttgcttctgtaaagcgcactgaactgaactaaatgaattacagtgtgaaagaagatacagtagaagtagcagattacttctctgttttagcagattagctcatggcaagatgtttagataatggaatagatatctagtttgattgccagatgcaagttgatctctttgcccagaaattgagcatgaacatgcacagtgcatgatgcactcactctcattcatcagtcatcacctacatgaatgtaatttgtttacaggtggttcttaataactactaattaaagtattggtgtaagcatctaatgtatgcagactgcatgccaatattcttagggatcacatgaataaaaatcattttgaggtagcaaatgtttgtgttcaagaataggaaaaggtagtaagaaggtgggaaaatgacacttatctttctagtctatgggatctttgaacgcagtggcacacaaccttctgtagcttgcaattcatatctgcaacagagcaactgcaagcttgcatccttctcttttcatcagaaacttacagctccaaatgaatatgcaatgaaacaagttcagaatatttagtctctacctatgtagcgtggcaagaaagctctgctacataaattgatttactttctgtaggacaggggaataagacttaagtacacatgccaagaattaccattgctgagaggagttgcaactgtactttgatctaagtatcatcatacgcaagtaaatgcatccagaacttgcagatcgagggaacagtgctaccggatgaatcgtaggatcaaccatcattcaacagagacagatagagattaaagcttactgttgtggctcgatgatggcggatgagtgctcgacccatcggcgtgtcacgaccgcctctctgacagactctgaagctgcgacaatggacagggaacaggagaaggcgtaaagcttaaaggcgttaagcaatggaggaaagcgtaattatgtgggagaaagcgtatttatgtaataaaggagttggtgtgtgtgtcacatggtgtgtgggccctgcgtggtcagatcgggaggggaatataacctcaatgagctgtcccaaaacaactatgatgaaaaatagaaaaacaatccctcctaccaactctgtcttgtcttccttcctcctccgcttcccttctgttcttcccatcttccaagcaatcgatcggtccctcaactccggtgagcttcgccaacggatttgggtcgtgacacggcgctccacgggaagccacttgagcaccttcctgcccagcggctcgccgcgacgccgccgctgagtcaccgatgcggcaggggactgcgacgcggacgcactacctccggacctccctgctgcccccgaagagaaggcccgacctcgcctcctccagccatcgatggagggcaggccggtgatgcggctgctgcggcgtggatcggggatgtggctgcggcattgaggaggggggagggtcgccgccgccggccgtctccgtgcccgccgcgtgccgagctcctcggtagggcggcggatccggccctcccaaggacggcgccgccggatccgccgccacaggccgtcgccgagcccgccgcccgccgccgtcggggaagggaggccaccgccgcgcatgggaggtcggggaacgaaggccgccgccggtgccgagcgggtcgccgccgagcccgccacgccgcacagctcccgtcggtgagagagagaggagaggaggaaagagtgagaggctgataggagaggataggataggataaggacggtggaagttaaaatatcaggagaggaggggagatagaagaggagaggaaaaaaattgaatggaggagggaaaaaaataatttcaaaatattaaaatttctaatcgaattttatcatactaaataaacttatgtgaaaaagttgtcaaaaacaaagttgtataactcattgagatctaccaattttattttggtcatttcgccattcgattttgatttaactatataaaatttgaattttaaaatataagtaattcaagaaaacctttcaggtagtaaatgatttcaaatggaaaagttgtcaataacaaagttgtataacttatcaagatctacaacttttattttcatcatttttctatgactttgtatgcacaatttgaatttgaatttcaaattatgataacttcaaacgacattttacaagtactaaatgatttcaactaaaaagttatcaataacaaagtgctataactcatcaaggcctataacttttatttgggccatttcttcatccgacaaagtgatttataacattattcacaaaatgtacaaatctcttatatagtttataaactataggagagatatgtaaattttataaacaatgttactatcactttgtcggatgaagaaatgaccaaaataaaagttatagatactgatgagttatacaactttgatgttgatgaccttttcagttgaaatcatttagtatttgaaaatattgtttgaagttgtcataatttgaaattcaaattcaaattattgaaacagagtgatatagcaaaatgaccaaaacaaaagttgtagatattgatgatttgtacaactttgttgttgatgacttttttagttgaaatgatttagtatttgaaaatgttatttgaagttgtcataatttaaaattcaaattttatataggtcaatcaaacttagatggagaaataaccaaaataaaattggtagatctcaataagttatataactttttttttgacatttttttcacataagttcatttagtatgataaaattcgatttgaagttctaatattttgaaattaattgagaggagggaggcaaaatgaacttctggttggttggagcgcggcccaggaataagttcactttaggtccctcgatttgacgcccagtctgactttcgtccctgaaccacaaaaccaggtacaactcgtcccccaacatacgaaaaccggacaaacgagatccctctgtggttttgatagcggttttggttgacgtggcgcatatatggctaatttgactcggtcttcatctaacgtggcgcttacgtggcaattcattcccgaaaaataataaaacacatgggacccacatgtcagtttgacacacaaaataataaaaaacggtgggacccacatgggcccccacctgtcatcgtcactcctttcttcctcctctctccccatctcctcatcatatatgtcccctttcctctctcttctctctccagcaccaccaccacgactccgccgcaactgccgctaccaactccacctccaccaccaccctcgccacctccgccgctgccgcctgcgcctccaccatcgcctcgtagctctcctcttgcttctcagtggtcgtctccgccgtgggaggccgtggcgggcgatagcaggaggccgtctccaccgcggccaccttgacgccgaggagccctgcgatactcgatgggagatgtatttgacatcgattcttgttgccggtggctgcaccgtggtcggtgaggcagctatgacgggttctatggcggtcggcgacgtggttaaggcggcttttgcttatatcggcggtgcacaaatggcggctcctgcagccgtgactaggtgcggatgagcttcatgtgatttttgcattttgtgtcgtttgttgatttgagcattttaggtcgtttgttttttgtttttttttgcagttgatggagcatgtagcttgtggtgctagataggtttaagtttattttttgtatttgtctgaaatggatcggagcctgcaacctctcaccgttggccaagagcgtagcttgtgacttttctgggaggacggggaggtggcggatggcttgttattgagcttgaccttggcaaggagagccttgttctcctggtcaagtaggtgtgccttctttcgcagtggctcaatcttggcgtagaaggggaatgaggcgtgaccggaggagatgctcccgccgatgccgccgacgcccttctccacaaccactggcagtcgccgccgtctgcgctctatggccccgcgcaccgcagacttgacctagcccgccgtcagccgctgccccgccccgctccgccagccagccgctccgtcccgcccgttgcccgttcctgccggccggagagagagaagggatagagagaagaggggacagagaggatagagagagagaggagggaggagtgaggatgacaggtgggcccatgtgggtcccaccatttttttattattttgtgtgtgaactgacatgtgggtcccactggttttattatttttcgggaatgaattgccacgtcagtgccatgtcagatgaagaccgagtcaaattagccacgtaggcgccacattagctaaaaccgctatcaaaactgtcgagggacctagtttgcctggttttcgtaagttgggggacgagtcctacccggtttttcggttcaggaatgaaaatcagactaggcgtcaaatagagggacctaacgtgaacttattcccgcggcccatggaggagtagaggagggttgcacagcttgggccgaggtgggccgtgggagaaaggagggagagggaagggaatgggaggaggaaaaaggccgagcgggctggcgggaatttgaatcagactttggtacggatttggcccaaatgacaaaagaggattgtttttagtttttctttttaataaattctgttaattgtttttgttgcttagtaaatatttcggtgctttgaaaattcaagtaaacatccaggacatattttagaccgaggagaatttatgaaaaatactttgggccacaatcaaattttttcttacatgtattttagtgtttgccatttacttttaggattttagttaattatattattcattttagagaacaatttttaatttgggtgaatttatcaggatgtgacaattatttagggcgttacaaagggcagttcaagcattcatcaattttaaaaagaaaaaaacgtatgataaacgaacattgttaggaacttgtgacttttgttggttggtctctgatgacaaaataataacagtcacaatacaccattagacaagtttatgacgatctgtatttgatcttagtgacgaccaccccatttttgtcactaaccagcaccaccccctatcaaacgtcataaaacgaaatggcatagtgacgaaaagcaccattgtcacgaggaattcgtcacagaagatgacatttcttgtagtgattgtatattatgttttttttcatactttgcgctgcatcagccctagctatgattagaaccataatctctagcctgctttttgattgccaataagggtttcatcggggtttcagccgatgagttatctggacgttgcatcggcttataaggattacatacaagttggatttagtcgatcgcaacaaagattttactgtttatctagtcatttgtattttatgacatcgaacctccagccgaagtatgctttaacctttggatcaacacttgtactatcatgttattattagacaattggtttctactggattatattattgtttcattacattattatcagcagattgtatttataccattatttattcaagtatcataatctatattggacatatagccgatcgctcaaaaccatatcaacatcggctggtatcggcactgactagtatcggcatcgactgaaatgactctatcggcttgtcagccgattggctcattgttctgttatttgtatatcttgtcagttgcaggatcaaactgtcatggttatggatacaacatacccaattgtaatcaactaagctcagtggggcccaccatatgccaagtcttatacggaatcatacctcgtatgtagaaggggttccggataaggaaggacaagtagagttctatatggaaactataaggactacttggattgtatccatattggtctcactagttttacttggtcaagggaatatctatgggtataaatataagaccccgtagggggagagacacacaagccataacagaccaatactccgccaaacatcaacatcagagataagcctagacagatccaatctggtgcctacgaaggccgacaagagggatctagcgccacctcttatctctacgagtttgtattcaaggaggaagactaccctgtcatcgactatgtgttggtgatccatgccgccaagtcgatgacagctagataggttatcctaattattgtacttgtgtgattcagatgaataaagagtaacactggcttcgaccaacaggagtagggttgttaccttcctatgaaggggcccgaacctgtataaaaatccttgtctctatctctcttacctcaatctcgcatataccctggtgccagtgatccctatatcatacaaataccgtagtcgtgacctaaaatgacaacagtggcacgcctggtaggggattttggtgcttcaaggtttcagcgagatgagttcaagagatggattctccgacaacaaactacttgacgacttcggctgtacggggatacgactcgagcgaagtgcgttctccgacggattggagccctcatcacctcaagttgattttacgacaagggatacttcaatgacttcggctatagggggatacgacccgaacgaagtacttcccccgacgagatcggaatcatcatcatcaacaatttgatctatcaagaccatccaaacttcaagacacgtggcgtaacaaaagatatcaaattgtatgatgtcgaacggatacgcaacatggtaattggtagattggttttctaaattaatctgctaattttgtagatacatctagcatgtgtctacaaagaaaaaaattttcaggaacaattgagcactcgaataggttaaggtcaagtacaccccataatcgagaacgttctcgacaaaggccgagtggtcggaccaaacctaccaatgaagaccgacgacttatctcatgtatagcgtcggccatggctggactatttgagaataggttgttaacgaataattcctcgcaaatgttgtcggcttgatcacccgacataattgtgaacgcacatctagatatgctacaagttgggtatgttagtcatgctggccacatgagatgcacatgtaataaccaactctagcgcccctattggtgatcgagagatgcctactcctagttcttgaccagtagattgtagcgatctcttgccacctatcaattgccttcaggtgatcaagaaatgcctactcctggttaccgaccagtcgattacagcaatctctaatcacctaaaagttgccttcaggtggtcgagagatgcctacaactggtttccaaccagtcaactgtagcaatctctcgtcacctataagttgttttcaagtgatcgagatatgcctattcctggttattgaccagtcgattgtagcgatctctcgacgcataacacagcaaccgacgcagttgtgataacaacaaccaagaccgataggatcgccgtagtcaccaggacgacaacgtccaagtgtaggatcaaggaggccgactagaggggaggtgaataggcggtttttaaaacttttggctaaaaccgagttttgcatgcggaagcataaatcaaaatggttttgcacaattcaaaatctaaatcaactagtctcaagtaagtgcacaaagaagctagcctatgttgaggtttgcaccctaatagcacaaataaactctagtatgtaaacttgctcaaagtaaatttgcacaaaataaaggagacaagagacaaggaatttttcaccgaggttcggaaactcgccggtttcctaatccccgttgaggcgagcccaactctaccgctcaaccacgaagccatcgcacgccccctttgtcaaggggtgggcaagacgggagccagcccacggagaggactaccaaagcctcaatcactagggtagttcttcctacactccgaaggtggtaaactccaaaccactcacaatcggcgccgggcctcctccacaatctccttggagaggtcaccgggcaacacctccacaagccatctaggaggcggcaacctccaagagtaacaagtctaggatgcttgctgaggatgatcaagtgctgcactagctataacaatgaagcaatgcacttggattggcttaactcactctctaatatctcactagataaactaagtgcacaagggtatgagagctcttgcaagggttcaagataatgcaatggagtgccaaaaccttacccttgctgctggggagtgggtatatatacccccaaccaccaaaactagccgttggaactgaaatccccaactcagtgctctgccggtcagaccgccattgtgaggccggtcagaccggactactttttaacggctagaaaactagccgttacagggcaatcattgagcccactcaacctggtcggtctgaccgcagtatagtggccggtcagaccgtccacggctcggtcagaccgccgtcggcttggtctgaccggttgcggctctgatagatctgtatcgctaccaaaaaccagaccagtggggccggtcagaccggccttaccacgtaggtcagaccggctaacagccctggtcagactggcctaaggcccacggtcagaccgcatgtcacttttcagctcaaccgaccgttagtaaaacggcgatctctcttgactcgggtctcggaatttggcgttcttggactctatggaaagcttattcaaagggccatccaacccataaaaaaaccatccaagaaacacaacttaagacaaggataaagggctcacactccaaaggatatccaccggacatacccacaagaggctacccaaacctataggattttcccacttctctctttggttaggacttgagaaaactcaccacacttggctagacaagcccaccaaatacacctacatgcatatgaactaatatggtgcaagatcatccacatgctcgcttcatagacccctcttgatagtacggcatctatctagcaaatccggtctacaccaaacaccatgaacgggaaaagactaagaaaacattcttagctccattataccttttccttgcgccatccaacttggggtcaatgcttaagccaagatcaacacttgtgaccatccggttgaaccatgtttatgccgaggtctttaccatcctttgtcaagactttattctcatcacaattttgacttcattcttgccaacatgatgatgtccttggcttggtgaccattaacccatggtgtcattcattagcctcattatggtggaacctattccttttcacatctcaaaggagaacattagtctcaacaaatcggttgtcatccttcacttgatgatcaaccggttgcatatgaaagatatggatatatttgttgagtattcatttacaccacaagtgtcatatactcgtatgcaagctcaagtgcaaagatccaatatgaataataggtgaataacatggatctagaacatgcacaataaatgtataggattcactccccctaaacatatgcatacaaataaatttacaagagaggcgagtgtatgcataagtaatgaataaccaatggggtttatcctatacacatagagaaggcatgtagcaatgataaagataaacaaaaacacatacctacatgatctctatgttctcaatgtaaaggagactaaataagataaggctcaagaaaacattagtctcacacttatataacaatgacatggaaatcatatatatgaacctatcaaaatgaaagaaataagaggtagtacatatcgctttaatctccatgcatttcatccttgtcatgattaaggtcgatcaccaaagaatacatatctaccacatctcatcatcgggaaataacctagttgacaacttatgaaaaagagaggttaatcccataaacatcggtttatcatctatcaccaaagtaacaattacacaaattatttaatccaagatctttcaatcttttctttctttggtgacagaaaataaccggatataataacatagaaagatgacatgaacgataatttcaaatcaaactagagatcttataataaacaaaatatagaataagctcccctttaagatgtgcatatatatggatataaaggaacacatatgcacataatcaatcaagatcaatgagggagctcacgctatattttggatccacaagagagaccaagttagaatatgtgaagtttaatacatacctctcatcatttttattttcatatccaaatgagactagtcaaagaaaggctcataaaaacgttagtctcatataattagatttgtcattaatcaccaaaaccaaattaagggacttgaacttacaccaagactgatgacatcagagtgacaacagacgatgttaacgacatcacgacaacacccggtgaagacggaactcaagatccctagacttccagagggcccgaggacgaggccataggtccaggagccgaacccccgactactataatcccacatcgtcttcatcgtcgtcagaaggcggttctcgcaggtcacaaggacgccatccatctgtctcttcgaattctgttcgaatggtcgagagatgcctactcctggttgtccaccagttggttgtagcgatctcttgtacctcgacttctcatggtcgagagatgcctacttctggttctcaaccagtaggacgtagcgatctctctcaccttaatctctaattgtcgagagatgcctactcctggttgtccactagtaggatgtagtgatctctcgcaactcaatctctaacggtcgagagatgcctactcctggttgtccaccagtcggatgtagcgatctctcgcacctcaatctctaacggtcgagagatgcctactcctggttctcaaccaatcagatgtagtgatctctcgcacttcaatctctaatggtcgagagatgtctacttttggttgtccaccagtcggatgtagtgatctctcgcacctcaatctctaacggtcgagagatgcctactcctggttgtcaaccagtcggatgtagcgtctctcgcacctcaatttttcaagtggtcgaggaacaactacgtctggtctttggccaacagcgtagcgatcctagatacccacattctcgagtggtcgaggaacgactatgcctggttgttgaccaacagcgtagcgatcctagtacccacatcttgaatggtcagagtatggctgtatacctggttctcgaccaggngtcacaacgattctcccactgcttctgcaaagtgatggagaacaactacacactcggtcttcaccttgtgtggtagtcacctcatgaccccatatgcatcaacttctgtaagtgtttatatgtgtaatatttgtccgttgatccttttttcttctatcgcctcgtcttgaagttgatcatatcgtcctttacgctattctgacaaagcctcaagaaacctaaggggattccggctggggacgcccagagctgataaggccttgtcagatgctatagagccaaatgatcatgtcatatctagtcatgtcagagtgctccttggatgcgtattaactaagctgtgtaatcaggaattggttttcccaacttcatggccgggggcttcgatttcatcagctttagcttggtttgttataagatttaagctgcctttgtggaaaacgacttttccataaaaacggttgggggctaggaagggtaccatactccgaccactgagggcagctttagcgagaatactcttttattgtcacatgcaaattcaatttattcttaattttgaaatttatattatatcgtttaggggctatttgtatctaacaatctgttctgagttttgatttcaggaaagtcagacttcagggttttgtcgcagactctacaactacttgattactcgagaatggttagagtttgacaaggattacagaataaagcagaggtgtacccgccgagtccgaattttttaacttcaatccaaattctcaattacagtaagacaaggaatttagttgcatactccacaccttctcggtcatccgagaacggttaagcgagcatgacgacttttgttccatggtcttcggtcgagaacatcaactcgttcatttgcattgaagtcgggggctattgtcatggttatggatacatacccaatagtaatcgacaaagctcggtggggcccaccatatgtcgtcttatatggaatcatatctcgtatagaagggattccgaataaggaaggacaagtagagttttatatggaaactataaggactactcggattgtatccatattggtctccctagctttacttggacaagggaacatctatgggtattaatacaagaccccctaggaggagagaaacacaagccataacagaccaatactccgccaaacatcgatatcagagattagcctagacagacccaatatggtggctacggaggcagacaagagggatctggtgccacctcttatctcaacgagttcgtattcgaggaggaagactaccttgtcatcgattatgtgttggtgatccatgctgccaagtcaacaacagctagataggttaccccaattgttatacttgtgcgatttagatgaataaagagtaacaccggcttctgccaacaggagtaaggttgttaccttcctttgaaggggctgaacctgtataaaaatccttatctctatctctcttacctcaatctcgcatataccctggtaccaacaatcctcatgccatacaagtaccgtagtcgtgacctaaaacgacgacacaaactaattggcatgcttgcatctcatcaacctttggacctacactagagctaagcaaacctcccaggccgttgctgttgtcgatttagttcacgccaacatggttccggcaccatcagccaaatgcggatttttcgtcaacagcgggacgcgtcttttccgctggacacggttcggggagagagagggtggggctgaggcgccatgccggacaacggcacagtgcaagaggagtgcatgcgatggcgagcggtgcgtttcttgcggaagaccgagagactgaacatgctagggtagaaaagtgaggacgacggatggtatcctatggtactatacaagtgatccacactaactcaatttcctacaatcaatttcctacctatttctaactataggtgccggttttcgattaagaaccaatatctatagtataggtactagttttttgtgtaagccggcacctacgagtcgatacctatgtgggttttgtagaagtgagaactccgatacagtcttctacaaatgtatcaaatcgtagtaaaatctgttaaacatgccatgctcttggcagatcgggccaaaccgagacaattcttcttatgtttccgcttgcaccattaaatatgattttactatgccatccgagactacaatcaaagcttctaatgttgcaccagagagtgaggccaaggtagaagatgttaaatataagtcaaagccgaggacggctttgtttcaaggaagggaggatgatgagcccatgactcatcaagatgttcatggagacatgactagcgataattcaattattgtagctggtaattctctaatatcatctggttttcaatttaaagctatttattttgatgagaaatatggcaaaaatatggagaaatttactagcgctggtctatcatcaaatatattttttagaggagttaattttcacaagaaaagggaagaaaagaagcaaagaaaatatatccaaattggttgcattcaggtcgacgtcacatgagccatttttggggaccgaaaatgctgcatgcaagtgctagtacgaggtttataatgctaatgctaatggtgagatttgcatcgtggccggatagtttaatatatgtttctatctgttggtggtatcaataatgattagctatattttaattaatatgggtctggcatgtctgttatgggccagctatgcgctaattagagcctagttgggccatggtagagtcctgagtggtgtttttgtgcctgcgtgcatatatatggtctaggtctggccttgtaaaggggagattggttttttatggtggaattatttcttcgtcgagccgccgctcgggataccctagtggtttattgatccggatccttcggtggatttgcgtgaagtgcatgatcgagttgctacggctcgggtgcgtcgcttggaattatcggagttccccgtcttctgatcgtggttcgtcgtggccgcgggtggaaggattatcctaaggtttggtttgcatctattgtaagctgatccctctatctatcaataatattgctactgcttgtgtctggttgatcagttatcttggtcaatacgtgtgagattgatatacttggaatatttatcgtggtttcctgtggtcatcaagagggtcagtgcctatattgttgcattatctaattaaactaatgtccagcagccctgacctaattgaaggaggttgacatcgattctgctgctgctgctcatgctaatctaattgctgatttgctctgctgctgctcacgctaatctgagagaggattttagttgttgtttcagaaaaggttgtttgctgaatattttattgctgaaattttgtaccgtgaaagattgtgcaaaatattttggacatcgtaggcgtgtccttatcacagtgcaagttagatagcaagcttaatagatttattaaggtgtgatatgattgcataaatcgatagatataatagatcaggcaaagaaaaacatacaatcttaaaccaagaaggattatattaggtaggatcggctgaaactccgatacaacctttattggtaactatagggcaagtcagttcttacaattgtaactacaacttagtagatcaaacccaactgatgcagcaccaagttataattaaatttcataggtctaaacgagctgataagtgctatttagggtgatgggtacatcaatcaatctaagataacaatcttgtttagacagtatcagcctaatcataagtgaatcggctgactggaataaacaataatgttggcttagattaagcaatgtatatgataaataacgcttacactaactgggataaagtatcagacccaaccgagaaagccatagccccgctgatgcaagcgaaattgacagaactgaccttgtcatcggagatcgaactcaaccaatgcagcccaactcaaaaataaaaacatgttgagaaaaacctagaaaaactagggtggtgatgcgccgaaagttgtattattgaaccgttctttacaaaaaccttgggtatacatatttatacccgtaggcaaaatcaaatctgattctatcacgatcggatcaaactagaactccatctctaacttgaggaaactattacggagtccaactcctacacgacttgtattggataaacattaccaaaacatatctgagtccgattctaacacgactatattggctcagaaaacatagaaactaggatacattttccttaatcctgaagctagcttacccaaacttggatatttccgaaatcacggtgtgaaatcctcctttgacttgacctttgattaatgggagaatttactatttgccacactctcaaaatgccagtgctcaaa

SEQ ID NO: 23499 - DNA, 12667 bp, Oryza sativa
ccaaattttcattcccaaatgccacccgggcctacatgtcagcctcactctccattcaaacaaaagtgatgtgggacccgatgctgagtgaggctgatatgtgggctcgggtggtatttgggaatgaaaatttgggagagtggcatttgagcactggtatttttagagagtggcaaatagtaaattcctccctacttcgactacatcctcatcaccatggcttgtggcaacaatagcaatggcaacagcaccactgatggtgagaatggcaatgctagtggttctgcttccaataccaccgcaactaatgttgtagcaccgtatgtccgtattctcttatgtttaaatgtgttagatatgcttgtttcgatggtttacaattatatatagcatgtctattttgcgtaccactatcattgagagtaataagtttacggtttatgtttatatcattatggttcacattttttaatttctgaattaaatattatggcgaatttgtttggcagccactaggtgagagcaagaatattagttaactataatcaagctatatacttatgtggaagagagaggtaaagaaaaaagggagtgttggctctcatgcaagagctagctaaacacaagctccaaaaaatatatgtgagagaaaaagagatgatgacaaaaataaaactaaccttgtagctaccctattatacatatttgctctaatattgacttatagtaagtaatgagttctactattaaacttgctctgatcaggtacatcgctttttcttaggcttggcgctcatgttgaatgatgtcaggataaagattaagtgcgcacgtaaaacaagaaagccgttaacgcatgattaactgggtttttaattattacacacttaaaaatagatttatttgatatttagagcaacttctatatatagttttcacacgaaataaaccatttagcaatttaaaaagcatgttaataaaaattaagataaaatttgcatcttaattagaaaaggacgggccataatgtgttcattattgtatgaagtcctccgggcgctctgcattcaagtgaactgatagtttatctattcaaaacggtgtatacactgtgcacagccagaaaatccggccagtcactagaagggataccatcatctcaatcgagcagtaaaccccatctcaatcgggcacggcgtccgtcacaggctagaagttacagatgtgaagagttatctcaatcgggcaaacggccgtcacggatgaatctatctcaatcgggccctaattaaagcccgtcaccgatagctttgacccagacgaccagtcaaactatggcccgtcacagatgacccttatctgtgacgggcattaactatagcccgtcacagatgaccctcatctcaatcggacctaatttaatgccagtcacagatgagtataatccaaaaaaaactaaattatattttttggctagtctcaggcctcctaggttagtcttttttttttgtcctcacttgaaattcaaacttcccgatcggtcacccttcccgaaattgctccaagccaaacatgtttaacatcaaagttatttggagattggcttccaaaaaagtagttgtaacttgttggtatgagtattctattaatcttattaagtcctaggccaggatgtcaaattggggttattaaatgatttcaaatggaaaagtcaccaaaaccaaagttgtagaactcatcgaggtgcaaaatttttattttggtcatttctccatatggctctatttaaacaatttgaaattcaaagtttgaaaagttcaaatagaattttagatcagtgaacggcttcaactgaaaaagtcataaacaacaaagttgtataactcatcaagatctataacttttattttggtcatttttctatataacatttttttgaaccgtttgaatttgaatttgaaaatatgataacttcaaacaatattttcaaatactaaacgatatcaactgaaaaagtcatcaacaacaaagttgaataactcatcaatatctaaaacttttattttggtcatttcttcatacgacaaagtgatagtaacattgttcacaaaattgacatatctcttatttggttttataaactataacacatatatgtaaaatttgtgaataatattactaacatttcgtcagatgaagaaataacaaaagtaaaagttttagatcttgatgagttattcaactttgttgttgatgaccttttcaattgaaatcatttagtatttgaaaatgttgtttgaatttgttatattttcaaattcaaattcaaactgttcaaaaaaaatgttatatagaaaaatgaccaaactaaaagttgtaaatcttgataagttatacaactttattgttgacattttttctatttgaaatcatttactacctgtaaaattattttgactcataaaatgaattattatactgcacttaattattttgctatagttcaacttacaaatataaacatttcatatgaaaaatgaaaaaatagttatcggtgacgggctttagttaatgcccgatagagattaactatatagcccgtcactgatgattcatctgtgacgggcctagttgctatctcaaacgggcctcaagttggtgcacgtcacggatgatggtcatctgtgacaggccacaacttgaggcccgtttaagatatgaaatattatctcaatcggatataaagttagcgcctgtcacagatgatggtcatctgtgacgggccacatctttaggcccgtttgagatatggaatgttatctcaatcgggcctaaactgataggtgtcatccgtgacgggtttaagttttatatccatctaatatgtctgtgcgaccatatctcaatcgggtattttttggcccgattgagatgacttctttgtgacggcccgctatttctaggcatatcagagcccgtcacagatagatgtttggacactttacctagacaagtctatgtgcagattggcattttatttcatgggctttaccattacacgggcacacacggccagtttttttttattttcatttcagcccaccattataatccatgggctttgaatagtctaattcttcctgcaggattacacctgtaatttatttgaactaatggtgacgtgttcactagctttggcaggcaagtggattttatcctggcatacgtgtatactaggaaatccgcgcggcagttggggcgctgaaaatttatagctcatgtatgttttttttttccatactgcacgtaagacatacacagacacacacattacatgtaacattacattcacatcctcgcaaatacatcccttaacatatactctaacagacataaacgaatagtacatctttgatttcacttaaagttatgtacctaatgtccacctgcacgtgcctaatattcgtgaatattaggatttgaaccctggtgggtggtgtcaaacacccacgactcaactaccacaccactgatgcttatctatcaatcatcttgaacatagaaatttgtataatttttacatgatttagttatatatatatattagtttttgttaaagggcatggagcctagtggttgcagtgacctgagtagcaccctaaggtcgattgggttatttagggctaagttccctatttgatgggctaagttcctaattaaaaaaaatgttatatatatccggttggatatagaggccgggtaaaaaaaaaaccttctctgaataaaaaaaatatgggttagtttaatcaattcatgcacaaatcatatattcaaaaggatctttagtggattttaattttacgtatgtttgtcgaagtttgagatggatcaaagtagattagtgatttatgcgtcagtaattatccgggtagagattgtgctgtttaacttaatgagtatacaggtgcgggaaaattagcaagtatatatgttttcttaaattgcagtgatttcataaaacttgtaagttcgacatattcataggaaactagcagtaaataaatatttagaaatgtagtttataagaatgcaaaaaactttgatccaatattttacattatttacgttatttatgttagtttctttattaccttttttcttttctaaaaatatacgatatcaatgtagagtactcgcatcaattataacttaatcgtagttatattttatttatcttctgacatacgctgagttcggtagagtatttggcttttgcaattttctcatttaccataagcacgcttcctattcctttgcaaaacccaaatgctctctatttcatctccaattttctcctttgcattatttagtctcgggggtatgaaagtgattgagtgagtttttataggtgcacagggaatttactctaaattattaaataatatgttcttttgcaaaaactttttacatagaagatcttttaaataccaaataagaccgattaaatttataataatcaataatggttgccttgtattgtgtgccatggaaactccaaatttcgaactgaacgtagcctaatccgtatattgtatttatttaagtattattttgaaaattagttgtacttttctttgtttaaaataattgctcgaccaagttttcttaaggtgtattccacattagttctacccgttttactatagcacactttctaaactgctaaacaatttatttttacataaaatttctatagaatattctcaaagttctactcatttatttttagatttattttagctaatacttaattatacgttaatactaatgattcgtcccctctccattgacttgcctacaagcctttttttcacgaagcaatctttaatttttctccacgtccattcacgattttgtatggtctatttcggtatttatgcctatgatctactcggtcgtttgacacaactttaactctcaactccaacttacttagagttggccacgaaattgtactagggagtggagctggctttctgccgctctactgtcccactccacccaaaagacccatcgcctctttaatattttcatgtatttacgtgatatgttactaaaataccccttcacacccatctcctccggttctgtctctccttcccatgattcttcctcccttgatcagctagggctattttcatgtatttacgtgatatgttactgaaataccccttcacacccatctcctcccgttctgtctctccttcccatgattcttcctcccttgatcagctagggctaggacggctgggcggcgatcggtagaggcgactgatggcggcggttgggtggtgtggctgctgggcgattgggcaacgcgcgagggcagcaaggcagtggcggtggcgtgtgggctaaacgtcgatggcgtcggtagggtgacaatgcgcgggctgagcgacgacaatgttgatgtcgacagggtggcgcgcgggctgagcacggtatagtgcaaaccgtgggacccaaaaccatgtgttcgatgaattggagacgcaggacatggtggcgtggagctgaccaatctagccaaacacttttatgagctacggtgtgactagcttgagctcgagccaagcataggcttacgtgacttagggccgaacggcccatcagctggttggttttttttctcccgtagcacaacgcacgttagctcgattgattaagagggtgatgaggcacacagcacacacgttcttcaattcgcttgcaaattcactgcgccacgtagaccaatcaaaatctcaaagaacggctagctttagataattagatatgcccccacgttgttcaatagctatataaaatataaataaataaacaatatttcttagttgtatttcttttatttttatctgtgttcttagttattgaaatttgacactatgttacctttaaaaatgaattttaacattgcattattgtgactttgaaggaccatgtgaaacaataatacatgtttagttttttttttctcattgcttccatctccttgaacttgaagatgtgtgagggacacattcgtagttatatatgtgtggatgtacgccttcgatttattcgtgaaaattaaggttgatatggcccatcgatttatttgcggattgacacacttacacctagtgtagcaatagaacagattgtccgactgtttaatgtcgtgggcaggcaatacatagtaaaatgtgtggaactaaaagtaagtgatgaactagaataaccacatttaaacgaaatcgaattatatcgtcttcatatccccccggccccgccgcagacacacactgcaaacagagtactccatccgtcacacaatataagtgatttagaaaggatgtgacatatcctagcactacgaatctagacaggaagcctctctagattcgtagtcctaggatatatcacatctctctagaatcccttatatttttggacggagggagtagaacataaggtagataaaaatactacatataataataatcaagcggtaccattcatccctagatacaatatttctagagctttgcttaacactaacacacagctatataacctagctagcttcatgatgacttcaatatttctcgaccttacttaatactaacacacagctataacctagctatagcttcatgacttgatctaccaagctaggcatgcatatgcaagaacaagaaacagattagtcacaccataatgactaactaattatagattcatatcagctagtaatatagttcttctaggccctgatcagatcatgcaaaattaaattacttacctagtttggttccatgcatgcatgatacacacaacatatataacactcttctagttctaggattctagattgatttttcttcttcttttccccatgaagccatgcaccatccatgcattgacccattctgcatatgcctcatgacttgagtcatcacagtatatttccagacgttgacaagtcaaacgccggcaggtcggaccacccgccgccgccgccgccgggagcagcactgccgccggcaccatcaccaccgccacggtggccgccgccgcctccccagaactgcaagcttccacggagaccgaggaactcaatcggcgagctcgccgtcgtcgttgccgcagacggtggtgggtggttgtcgatgtcgtccatcttcaccgaggccatctgcgtgatgagcccggcggagccggcgacgctggcggcgttggccggcatgtcgccgccaaggccgcccgccgcgacgtcgccaaatggatacgataccccggcggcggtggacatcagcggcggtggatggactgcggcgttggatcgggctaagaacgggaagtgcgggaggcgctgccgttcgagcccgaggccgtcgccgccgccgccgccgccgagctggtagtcgacggcggcagccgcgtgcagcgagctgagctccggaaaccctaacctcgacgcgccaccaccaccaccaccaccgatgatactaccatggccaccgccgccgccgccatcaaacccgaaagggagctgcagctgcgcatgcggcggcgccatgacgccgccggcgacggcggcggcgggcttcttggagttagagggcttggttccgcgcttgttgcggcggaagccgccgccgacggggacgttgcggagggcgccgccgcgggtccagtagcggcggcaagccttgcagaagtggcggggctgggtgagggagtagttgttgaagtagcagaacttggtgttggtggagtcgcagcgcggacacttgagccccggctccggctgcgggatcttcgccatcctggcgcgctccgccatcgacaccggccgcgccgaggaggcgccgccgccaccactcaccggaaggatcccggcggcggccatgtctggcgaccgaggagcaagcagcaagctggccgaggtcatcggcagctgattcgcctccacactttggtgaagctgatgatggccatggtgagcttgatgctgctagtaacatgaatgaatagatataagaagtaattagataggaaaacaaaaggatgatagtagctaagactacaaccatatgagctagggtttgtgcaagagtagcatgagaatatattggcttgtaactttctatctatcataaattgataagaacatatatttgttttgcatattcttcccttttgctttacacatgaaaagaagtagctaagcaacaagctaatttttcacaaagaaacaaactttaattagggagtaataaggagttcagcactctctcaagaagggtaaagttcttatgtacctgattccacatgatggatcaagagaggtagtggagttgatcccccttttgatctttttctaacccctggattctccttttatgatcttcttctttaattttcttttttggtcctcccttgcttctttgtgagatatgtatgtcagggtgtatgatgagaatgctttaagggttcatgaatgcatgggggaggttcaattgttcaaaggagtggagaatgacatccactataaggtgatgaagaaggggatgagaacagagagagctagtgaaagggtaagatttggacaagggaactattctctctctctctagctttctacctcctttcccccccccccttagtgctgtgtgcttgtgcatcttttacatgcatcaggtgagagagatagagagggcaagaagagttccttagcttgtaagaatatgtacggcttctgccttcggcaccatagggttctgctagctatctttgtggataaagatggaaaccctagaagtatattgcctccattatagatgaatgatactagatgccatggtgcgtgtttctaaggaacactagttaaggttgtgttctttagcaggggtttctaactccccaccctcgtttttccgtgcacacgcttttcaaactgctaaacggtgtatttttttacaaaaagtttctatacaaaagttgcttaaaaaaatcatattaatccatttttgaaaaaaaagcaaatacttaattaatcacgtgctaatcgctgctccgtttttcgtgccgggtcccgaaggctctctttagtacctttacggtgctctccactggtattagaatactacaagattataagtagtattacactaatagaatttatctcaaccattgatttatacatatgagtagtgtaccatcaataatgcgataatataaatagatataatccattagatagaaaacaaaaatggtctagattggttataccaccagtagaaaacgttgtataacacccccccttagagaataccatagtaacatctcaccatcctcaagtaggttaattagatagccataatataactagatgatatcccacacgtttatgcgagaacttgtacaaaatgactgggataagatgtttttttcaacaatcagcaagaataattggcaataactaagtttatagtgggtcctaaataagctaagattgtaggtttataaaaattaatggagaatataataattgcacgcaacacacgttaacggttgtgattgagcataagagagatctaatggttagcttgttgtggctcactcatgtttagcatttggttgactatgtaaaagaaattattatgaataattacacgaaaataccattttttgccctcgcagtaccaaaaagacatagtaaaaaaaatatctatatatatttacgatggaaaaattgcccacacataaaaatttaataaactactccgtcctaaaatataagggattttggagggatgtgacacttcctattactgcgaatctggacaagagtctattcagatttgttactaggaagtgtcacgtcacttcaaaatctcttatattatggacagatggagtagaaaaaatgcccgtgcattgtaacgggtaaatgttattttaattttataattgttatacggtttagctagggtaaaattcactgtggggattcgcttgaatatatttttttagaaaatcataagctgcaattaggagtccacatttcatctcaagttagcatgatttttttaaagagatttcttatacgactcctttgtatttctaaaagcaaacgagcttaaaatccaactcaaacacgaatttgtatttccaaaagcaaacaaacttaaaaattgactcaaacacggataacgtaccaaaatactggcaaaaatatcttcagtttttataatagtagagattagggtaggcaaagttcgtggatacttgatcaacaacaagcagcggtagatgtgggggcaaaataagagaccagtagccccataaccaatagtccaattaatagtatctccggcctaaaatataaacaaatcatattagtatttgtattggcaaaactattttagttttgattgccaatatgtacagaattacatttgtatatgattgatattactaggttcacaatgaaaaatagtactttcgtaacatgtatattctttcaaataacatatttttcatagaaatcaaagcgttatcttggagagcatggtatgcctggaacgacttatattttatatcagagcgagtaagatgtcaaaactagataggaaaaaaatggttattgcagtagttggtctatggtgaaggttgtatccacatatgtgattggcaactaatgatagtggggatggtgccagcagcataattgcagcatatatatgtgagaaatcgcgtataagtacgaagaactttttttttggggggtgtctaccatgcaggtgcaaagaggagcaacatatatatatatatatatatatatatatatatatatatatatatatatatatatatatatgtatgtatgtatgtatgtatgtatgtatgtatgtatgtatgtatgtatgtatgtatgtatgtatgtatatatatatgtatgtgtgtgtgtgtgtgtgtgtatatatatatattttgaagttaggccgtgtttagtttccccatatttccaactttccatcacatcatatcacattaaaaacttttctacacacataaactttcaacttttttttaggaactaaacacacccttatttaaagaatcaaactggtaaactttttattgtcgatcgtgcaaaaaaaaacatgtggttgactattaattaccaggaagtcccatatatgaaaacaacaacttaatttatatatggccatatccacaatcacctgtactaatatataataaatctggcttagttactagtatattctaagaccctgcagctttctctgatcaaagtgaacaagatacacagtcttatgtatgctggtatatctaaccacatgtaacttttttcctttgatacgactattagcttttgtaacaaagcgataaagctggtatgagtaacttagctagatgctagatcgatctcttgggctcttgcactacgcaggtacaagcacaatgtataattcgaatcgttttgtaggtaaaatatatacatgctgactcacctgacctacatacatcctgggctgcgagcagagtctatctttagttctgtggtaaaaacttgttctaaaaaaaagttttgtggtaaattaaaactggtccttgttggtttgtccaaaaccaagaaaaaccattaaaagcgaccacttacgatcaactctgtaaaatttaaaatagctaaaatcgcttggtttttacaaaccaatcctactgtggtttcacgaaaagcgctcggttttcgtggaaacagatcagaaagctaaaccatgggtgtagtgccaggaagcatcttggtagcacatgttcccaacaaacgtatggaacacgcagagaggcaccatgaaattccttagtactaaccatcaatttaggtgattaaatttaatttgtaaatattttaaatattgttcaaagtttttgagatgattttgaaattttggatgattcccttccatgcagaaactataaaatcctattcctgatgatagagacttcacttgctcttccttattacataaccttttgggtgagttggctggtggctaaaaatcattacaacacatgtgatctattttaatataacatctggtacacgattcacctcgtcattttacttatccgagcatactacttaattaattaaggaggagcacgtgtgtataacatgtagcatcgagagagacttatatatatagcgatcgcaacacacatgtgcttttctttcttttctttttgcaagagaagagcatattgcatagattttttttaagggaaaaaggaacatttgatgttacagcaccacatttctatcaagaaaatttcatatactttccaaaaatacaaaaacttagaatgccacagattggcactggcgatatatggtactagtcgagagaaaaataccctgcaccattatttgttcctaacggcccgtgcaacacttctccctctttggatacataatcaaccattcatatggtagcagcgagcgacatacatatcaggaattcgttagcaagaaatccatcttgagaccccattaatttcgaaaatcctttattagatcggtcgccccggggga

SEQ ID NO: 23500 - DNA, 9288 bp, Oryza sativa
ccacgtaagcccgtcaacccggttagaggtcatttggacctaaatgagtcacttaaataagatcagggaccctaatgttgattttttttcaagatcatggatctaagtgacacctcactccaactttaaggaccggctgtgtattttactcttttgactatattggttcggttgaagttttacttacaagtgtttgctcaatatttgtaagtatcaaccatcatatcattctctctcttttaatatggtatttttatttctccaaagtattgatacaaagtcccgtagcaacgcgtggggtttcaactagttagtatgggcacatttatagtaatctctagcacgaatcataagacagatcaaatggtatgaagaattctttttttgaaaaaaaaaattctgccgacacaatatagccactccaagatatttaactatttgccacttataaatgggggcaaataactattgctattagacccacatgtcatagacacatgtgggtccacatgtcattgagataggggtggcaaataattaaatgccaaatctacaagtggcaaatagtcaattccagggtttcctgacccggtgacctagtcgtgagttcgcccgccgccgccgccatcccccatccatcccgcgagcgggcatgggcgccgtcgttcgtcctgctgcttccgcggcatcctggtgggcacatcctctgcctccaccgccgtctgcgccgatccccatccatcccgcgagcgagcaggggcgctgttgttcgtcctgctgcttccgccgcatcctggtgagcacatcctcggccgccgccgccgcctgcgccgatccccatccatcccgcgagcgagcagggacgccgtcgttcgccctgctgctgcttccgccgcatcctggtgagcacatcctctttcccatctctctgtacccgcgcactttttgtcgaatttgcgttaaccctagcttctgccttaaccttaatactaataacagtttggttgttcccaaaaagtttaggggttcccatgttagatccgcccctgatagacatagacatactttggtttgcagcgtatctacaagtatgcaaatatgtgcctggagcacaaccctgaggaatatagaactaatatgaattatcgcagatcaccgatttgaaaatcgccgctgatggaagggatgctgccatctgatcctccgggcagtgatgatgatggaaatggaacgaacatgtggacaggacagaaggacaagctggccctagacccttgtgtttccggtgacaccaatgagaatgcacatgcctgcacctcattgacagctgtgcatcaggttcttgaagaatctaccaacaatactgtgcatgctatggacatgggcgtagttacaaggcaagatgatccgctgaaagcctcagaagaagatatcaatcaacacaaagatgaacaagagctttggggcccaaacgtgcaaactagccaggacgactactttgattacgtcaagcagttgtctcccaacagtcgtcgcatagacaaatggtccttgctgagtcatgacgaaatgattgaggttaaggagcggcatgcacgctatcgcatcagattttgcaaggtttaatgcttttttgttagctaattccatcctctgtttaatttgtgttaatatttttttctactttctatttccagatgctaaacaaagaatttgaggatacgatgaaggatccagcagagtactctcgaggcgaactgttgaaggagaattactttttgcgatatgagcgggatgaaactcttggttggtacttccatcctgtccacacctggcttgcaggcttgaatgactaccagaagctcgtcctcgtaaatcatgtaagtgcttgccatgtatgcaaatttacaaatctgattggatttaataaaaattcttgtaagtaactagagttcattgttcatagctgtgcgcaccgtagcacccacaaactggctgtatggctgcttaaatagtaagatagttcttgggtctgaattgtgcacgaaaacatttagctaatctacatatattattttggattgaagtacttcaagtactccaaatgtgaacaatttaatgccttccccaccgcgttttacttgatctttgcactgaaacagcaacccagtgctgagtgctcttaaagaaaatgatgggaagcgtacaaccatagtacaataaatcctggacagatgagtgacagaaacatgtatttcagtctgttaacgttttggatttgaagtctgctagttacctgaatacctggtgcctaataaagatcagcggagtattccttgctgaaattaagcaagaagaattaacaaatcttcaactctctccctccctctctttctctctctcgtgcgcgtatgctcgtccagattctacccatcatacatctcctttctccgccatgcaccctatcctcaaagcacagtttttctttctagctgccatctttagcctcttctgtggtgtttacgattatgtgctaagggacttaactaatgccttactgttggaaagctggtctgattcaaatcaactaaatatgttttagattaaacatgttcatttttcatttagggcctgcttgggagttacagacttttttttctcccttgtaaagaaagacccctgtaactttcggttaccaaaaataccggtgaaaatcaaaaccctcatgctggctgtttgggagaaaacaatggcaaagcctatgatttgaataacaatttcatatctgaacatcaatttgagagtcgggaccaaaaactggggaaactgacaggtaaaatcagatcaaataatcaaaacaagttccccatcatcaaaattggtccaacaattgtgattcaacaacagatctaaaatataattttttaacaacaacatcagaatggcagtcaacataagaacatcagtatgtcacctggacggatagatcagaagtagatattggagggggacgattcagcatccaagggagatttgagggcataatgagaagagatcatgtctagaacaacagcaacgacatagatttgaaagcatagccacattgacagcaagggcatggctttgaaaccaatcttgtgcgtcgtggatctgaaaccaatcatgtccaggatggtgccaacttcttggactgtggccgcaacatgccagctagagaggccggtgccggaatattgttgtggttgctcaaagggaggtcggagacccgaagagacgttggtggcttggaggaaggtcgggatgttgtgagaagaacggcgatggcgctgtgaagaaggaagaagtcgactcaacgtgcttggaccttgtagacgaacccgataagtgtcgtaaaaaaattgtggcctctgcagatggttattttttcttcgtggaatgggccaaaaccagtgtaaagttatttgatttccaacccatccaagcgcattttttctggcccagtccataaaactttttgggcttgtattttacacctgtattgggccaaatactagccttccaatcaggcccttagggtaaattgcaatatagccctcccccctcaaaacctgcaaggttgtctcacctggcaccctcaacttgcattttactttggtggccccttatattctacccttgtaggtgaaagaaacgttacaagtcactaaaacacattggaatggatctaacatggcttagttcatatactgattccattttaagtgttgctgagttgtgtagacctctttgttttcacaaggttgtggtttaagctttgaatcctcttgctgtaagttgaacaaaacagactttctcttttttctctttctttttgcccaaatagtccttaagataaccaggctctggtctcctatgtcagacactgacctagttcagttccaaatgtagttttgtcatatctttacttgcagaaatattatagaagcaggacagctactgatgaactccatgtctttctcccctaacaaaaaatgcttttaccatcggagatgggtggtcaaacattttatcattttggtgcatctttctagaatctagatgttcggattggttatattgcaatcatatgatatgataagagttggcacttggcacacagagcatcattatgatattacattaaactgttattttttatgaacatggctaggtcatgtcgcataccatgagaagtttagacaggaggtttttcttactgtggggtgcaagcagaaagtacccttgtgatattaaactgttgtattttttacgaactcagcttaagttgcatacctcagaccatttgataagatcaagatctttttgctagaagttgtggtccaacatgttcttcagcacatgccttgctcttttggagtttattaattagaaaaattattatcagctgcgtggtgatggacactgctctgttgaaacttgttagcattttctattattatcatctatgtcttttccccttctgaatgcaggatgatagcactgaattccttgccagggatgactaccactcatgttttaatacatatgaagttgatgaggattatgtcaaatattgtgaagaactaccaaagaaaatcaaggtatcaaccatgtgatcaagttattaatagttggtaaacttagccagtaacatggatttgtttttgtgctaataatcttttatccttggacagtggattggagactatgtagatttggatcggtcttctcaggaggtactaatataaagctggcctatagaaaattatgatttataggtgtatttgtccatacatagtgcatatcaggatgattaactttgctctttagtggtcaaaaatggacaacactacgtttttccaagcgttaaagattgcaacaaacttttgccatatgactgttggtttagcccaatttgcatacatggtaagaatttttctgttctatttagttttggttttcatggctggttttaacaattatatcctttcaattcaggagtatgtatgggacctgcgtgaaattagtcgccttaaggaatggccttatttcttacatgagatttggaagctagttgctaagcaaaaggttagcatcctagtttaatccattgttatttataaataaatcactaatgggtgtctatcagctggttatatattattgtttgtttcctttatatgaacatttcagatgaatttcaatgatgctttgaaggtagtctatgaaatggatatgtttcatagtttcaaatttgcagtggaggctgaactaaatggggacaaattgtttggattggaatatagggtaacttttattttggctattctgcaagctcatcttttaagatccgattaataattattttgctcatcttgctaatatttaatttttttttctccacgtctagttctctatgtgctctaaggatatttctggtgatgtaagtacaatgtcgtatagcatatatgtgtagttgaaatacattttttatgacgataatgtcatataatataatatattgttattttaggttgaagagggtaaagctctagatttgattacaaaggcagtttacagagaagtaatcagtgaaacacttaagctaaaaatgtttcttattctacaccctgcacagttctaattgattttgttttcagtttcatcacactcagaccatgtgtgggtatgcggcgaagaagatggatatggcgaaaaagattggtttggtctagctggtatgttattctcaatttcttataaagttaatgctactagcgtgggacgcgcgctgcacccgtggcattaaaaatggcagtctgtgattagttttgactaatatgattgggagaatttgctattgtaattattttttttagtgtagtgaggaaagaagtgttctgttgtgatgtatataagtcaatagttctgcaaggtatgaggggccaatttacatcatgaaatgaagtagtatgaaaaataaaaagcgttataagcgggaataaagattccaagtttctaggcccgaccatcctataatacactaatttcagcatgctattttgttgtacgaaagacttattaggttgatgcattgcaataattgtttcagatttgccagagaagaaagaaagaacattcaacaacagaagatcaatcctattaaaatttaaaatgctaactgagatgcattatgaagtttttaactaaatatttgtacattagatcactggcatatatcttgttctatctatgatgtacatataaaatgaaaattgaattttttgcagaatatcaacaatacatcatattgatcaacagaaccaaatttcaatagtaaaagtatgaaatcatgagcagtgcaaatttgggggaacatagcactaaaacataaagatggaacatttactttcgcttccttatcttcttctggtattgagcacggatgaactgtagatcatggattaaaagtaaacacaggtgggcatgaaacaatgaaatttatgtgtctagataaatgaagatgcacaccaaattttaagaagcaagcatgatggcagaagtgcatgctaaatttcatatagcagtggcctgcaaacctgatttcattgcaattatgtagctggcaggatagagggttgatagctagatatgtgtcatagttgcctaatgttccatgtaggacgcagtacttctattagtaaatacatagcatatgttctagcaaaggtgaccccagcatgaccacttatatacattaatattaggatgtaggtcttcagcaaaagagtcttgcttttaactttgtagctttattttggatgcctcctttcttctagcatgtacataggctttgtacaaacacccaaaatatctgttggatggctggacacaagcatctcattcactgcatggaaaaaaaaattagagcctaaagcttgtctatagctatatattgcttttgtattatggctgtcaaaatgcttaggtactgtcaagaaataggaggattacctttgatcctttgtgtgctgggaatgttctttgaatagcttcttagcaggtggagctggaactgaagctatagtgttggtcctgtgtaatattaggttataacagtcagttaaattaccaatattgtaagcatctatcactgatgcgctgtaggcaagcagtccataggtacctttttttgcttgcacttttgctaggcacagaagggctaataggtggatcatcaggtgtattgacaaaagttcctttgatcttataagatagataaatgtgttagtatctaatatgttatatggaagcaaagagatgtgacagtaccttatgttcagattcagattcagatggtccagctgcaggaagagatggatgttccaaagttttctgtccactctttggctttgtggccttgcaaaattaagtaggagattagattgcttgtaaggtagtgctgaaaataggctgaatattagtataactggtggaatactaaccttatcatcaatggaaggctgcattgtttgagattgcataggatatgctaagacaacatatttctttttggtggatcctgaggggttggacttgctagttggtgtgtcatctgctgcagcgctaacaacatattttgttggtgttgatagacttggctgtagagatgcactttgctttcctctggttgatgactgtgattcaatactgctttcgcttgctgcgggtggtgtttggagtgaagtgccagggctcagtggtacgatagttgaggtgcgtcctgaagcagacggtgagataggcaggaagtgctgttttggggcaccagatgatacaatgctattgacctgtaaggattcttgattccgtttaactgtgtgttcagtgaagctgacattccatacaaaggcttgatctacaagagcttggatctcagctgggataaagtcaggtggattttcttcgattagagactccactggtctgtgtattaggcgatgtgcaattcgtccgaagaggacaaatgcagcttcagaagtgttgtctgcggtagtgagcacaactttgtatctgtatgtgtacaatatatatggtcattacaatttgtattgggaattcataaatgtgtagaatattgtgtgcggtgtttttctaaccttggcactggcattcctatataacaacagctagagcatctataggtagaaccatatggctttgaagttctgcagcatcggtcacatgaattgtaccaccagcagttttcatcatgtatgctcttgatagtaacattgacaataaaacgtgctcgctgtagagaaagagaattgtcggttatacaaaacaaagcaaaagtatgaaatgcatataaaaaatcatggagtagaatagaccttatatttgtgcggatttagttttagaatttctttaatggttttttcctctggagtgtcttggttgaatgcaggagcagcattttcaacccatttgattggctggaagttgacactgaagctgtaaagaaaagcaatggctagtttttaatctatgttttagagccagcgagaattaaagcactgcaaatgaacctgatatatgaaaaaaataggtgataatagtacctttctttcaatttgagcacgtcaggtatgtccagattgatataccatttgcatggtgagctaccagttattgttaagcctgtatacaatgagctagagattcagattgtagtcattgcatgcaatatatagtaattagcaatttagtatgcatagggaaatttacctatccctgcataatctctgacaagtgttccaacaaacacgacaacctggggtttagtttggccatccttatatattttctctgcatcaaaagcagttgatcgatctccccacagtgtgacaggcagtgttgagttgctgtgttttgcattaacagtaaaattagtgtagctataattggaatataaaataaaagattgacacttcatcgaactgctatttaaatgaaaattagtgtaaatattagtttataacataatgcaaagcttatttaaatgaaaattattctgttttacataactaaccttgcatcacagatctgcaatgttctttttaaactatcagcatcccttgaccttggacgcacgatagatgtggaactgatctcagtaatgacgcccataatatctgtttgcacatgaaaatagaataaatcagtcttataaggcaatgtacagat

SEQ ID NO: 23501 - DNA, 7730 bp, Oryza sativa
gccctgcaaattttgaatatgatatactattttagtaatacgtgtggtatactaatgtacacaaataataagaggcatgagtagtgatttgataagtaccacttcatcaaggcgaagcggaagagagtggatgggacgaggagctcccccgtgctaggccgccgccaccgccgtgcccccgcgggtggccgacgatgctaggagaggcaccaccggcgggagaaggggaagaggcagaggaagcgattgtttcttggtcgccggccgcctccccctccctcccaaactcgctggccaccgcgctcgcgctccgctactctgtccacggcctgctcgcgctccactgctcggcctgccgccgcgctcgcaccttccgctgctccgttgctgcgctcgccctccgctacgccggccgcatccatgctcgccgctccgcccgctgcctccgctccgccgctggacggccgcgccgcgtagcctcgcccacggcgacgacgacggcggagagccgacgacgacggcggccacggcgcgcggctgctccgcccgcagcctgaaggagaagagaagaggagagaaggagaagaaaagaggagaaaaaagatgtgaagctgacatgtgggcctcacgtgtttttttaatattttttttgctgactaggatgccacgtcagcaaaaccgggcaaaaatactgccgagggacctccggtgaacggtttgagtgagtttaggggtacacatttctggttttgtggttaagggacctcaaaaaatctcgctgttaagttgacggacctccggtgaacttattccgccatgtaaacactagctagctggcctggcctggcctggcctgctattgagttcaagtcactgtgacaaggaataagttcatttgaggtccctttttatgccaatggtttggaacacgtgacgcctacgtcttcgttcgtatcacgtggcagatatgtgatgcttacgtagcaattcgatatcgcaaaaataataaaaaaacataggcccacatcagctgcacacacaaaataattttaaaaatggtggggccatgtgggcctcatatgtcagccacactcctcccttgttcgctctgccctctctttcttcttcctcgtctcactccactcttctttcctattccctctagggaggccaaggtgcgcgccgaggtgactgggcccgggtgggcggcgagcaacgcggtgacggcgcccggagcgaggccgccgccgccgtcgaggcggagagggcgtcagcgggaggagatcgcggcggcgtcggagcagccggcgtagacgtggtcaaacccgaggagcgcctagagcatgcaccacctgccgaggcaggagcgtgagcgccaggagccacgcgtcatcgcccggcacgcagccgcgccgcctcggcgtccgacagcgagcagtacaggttggcggcgcgcgacatggcgttggccacctcgaacgacaggatgtcgaccttccgtcatccaccccctccgccgccgcacgcaccgcccttgccgctgctcgtcactggcttcatcttcctagacgacgacgtcgccatggacaataccttgtgcacagctaaccggccaccatggcgatttcttgattttcttcttgaaccaaacaaagattcaccaaaaggaggctaaaacgtagtaagaaaaatatctccgcttttgcaccaaatccagctaaacaagaaaccaaccacgagcagtcaaaaaagacacaccgatttgaattcaaacccaaatcctccgatttcttcgttgtctcgctagtagcaagcagcaggagcaattaatggcggggagcagagcgagcagagatgtcaacacatcgccgcaacgccattaacaaacccaagggagcaaacaaacaaattaaacaaccaagtgacgagaaatggaaaaacaaaaaccaaaggaatttcctcgggcggtgttccagtgaaagaaaaaaacaatggagaaaggcgaccacgaagacaatcatggcctctcctcccgctgccgcccttactgccatacatacaaaacacatatactactactatattacctccatctcatgacgttggtcgtcaaacaaaaagaaatggaggaggaggaggaggaggctgccaataaaatcttgcaggttcaaatcatgccaggtgacagcgaagacagattatactggaagcacagtaggattggtgactgcaacacaaagagtgcttataaggaattcatgaagagagataaccctatcacccaccaggtaagtaggcaggttattgctgtgattaaacaaatttggaaacacaagataatccctccaaaagtaaaaatttttgcttggaggctcatcagggaagcacttcccagagctggcagactccgtcacaggatcaatgacatttctgaaaattgttgcagatgtggacaggttgaaactggtttgaatgatatctgacctgaattgctttattgatagatttcctgataatgcaccgatggctcacatcatttctttcatgataaataatggcaatggcaatataggtctttgcaggattctagcccttatgtggcatatctggaaagccaggaatgacttcaaatttcaagcaaaattcagagagccctctcaagtgtgtttttaagctgaggctatggcgaatagctaccacaaatttctatctaatgattgtttacaggatgaagagcccccaggagaacagagcaggaaaaaagagccaattccacaagggaatggatgctgcattgatgctgcttggggagagggtttgacaggagttggtgttttctttcatatgccaactaatcataatgcaatctttattaaggccttcagcacttctgctagctcgcccttgcaagctgaattaatagctttacagtttgctttggaggtagcaaaatgtcttgactttgcaggtacggttttcctcatggacaatgcaacgattgcagataccatcaagaagaaggatttcgaaccagactcaggacattggagcctacgaccgttatggtcccaaatgataattgactttccacaggattttatgaaggtttactggattccaagagagattaacaaaatgcttgacaaattaacaaaagaagctagacttttagaaagggcaaatccgatctttgattgccaaaacatttctcaccttgcttatcccaatcgaatgtgctttgcttcagctctcaagaacaattttaagggagcaaactgtgttatcaagcatgtactatgcttctagttaatataaaagcttggttttcaaaaaaaaagaagcgataaacctcataactactcatttcttccttcacttcactaggacacgacgtccaaaggaaaaacctaaaaagacagctagtataatattgtggactggatttggagcatgtgtaacagtaatactactccgtacacggcagtcaaaaaagggataaaacaaaaaaaaggatatcgtttcctttttcgcagaaaaggtgttcatgctggggagaccagcatggaaggcatgtactgattacatcatctgattgtcttttcgcgaccactgccaacatctattttactgaacaaaaatactggcgtttccactaaacacaggacttgttaaccaacaccagctcgaggttcctgagcggcacctgagttccttcaatcttcttactgccaattttctcatagtaatatcaacaagaccattaggagagcatcggcaatagttatgtattcaatacaagtgatggtaattatgtatttactgaaaaatgatggtacataacctaagtaatacactaaggtatacctggtcaatggatattccaaaaaaaaaaaaacagatttatcatcaggcaaacaacaaaaaaaaaaagtgaatcctaactttgattggctaaaggcccctacatgacaatacaacattctcataattacatatttccatctgacttcaaatagttctttactcaacatccatatatacctaatttatgagttcagttattcaataaggagatgttattattacaaaaaaggaacttaataaacacgagtcttataaggagataggaggtataaagggatgcataagtccaaatggtctgcaacaattggtcacaagggcagtatgatcaaaacataacagaataagtgaatccagattgaaaaccacaataacatgagaaagctgagcgcatccactaaactcaagctgttcaagcaaacaaacaaacgataatacttgtccatgttgagaggaaactacaaaaatgtcatttgatggcaataaacttccttattcatcagtaactgtcatgtgccatatgtgtcactcaatttattatatactactagaactctttaacaaacagagcatttgataaatattcatatatacatttttatgacataataaactaaaccaaagatagaaatggagtccacatacctcgggtgacaggcatttgtataggttgaggcataacattggttgctcagattgaacagcttcatcaacagttgaggacatcccattaaatgtaagatcatcctataataacaaaattttcataatataccataacttccttttgtgattgtatcagaccaatttatatttgtgtgaacaaatatacctgcacctcctcttcatgcgtgtatgctccactcacaaatttcacattctgaattgggtcatttccatcataagcaggcaaattcaaatttgttttcctatacctgttcattgagcctagaagtccgtgatgtggctttttgtcccattccagaacacatgtttgtcctctgcggacattgttacagaatgcagcatcttttaaggcctttgggatatcatagatgaagaatctcttcctcctttctttaaaccagaaaaaaacatgatctagaatcacgtctttgattgttcctatttgctggctgaaaaaaaaatgtgtgtataaggctaacatgcaaagactaggcagacaatactgattcaatgaacgcaacgtacttacgtgtttgcaagaaactccaaattcattgccaggtgatcaactaacatgtatcgttctgcttgatggggtacgcctatctttgccagagcggaaatagacttaagcatcctaccaattgcattgatatcttccaattgtgctgcctctttactcattgcacctggaaatgcaagttttattatatctgtatgtcaaactatctcgctaacataccctatacttgttaataggttcacctttgctttggaagtttgcaagtttgatggtgatcttttcattatctttgcaataatatacattttccaagcagatatttccatgataaagcccatttactcgaagctcctcccacccctcaatgatttgcctgcaatgatttatattttagtgcatatacacataaattacattacaaacattgagagcattaggcacagttttaaagaaaagtaagtaagttttatctgactacgtcagcaagctcaaccgaaggaagaatgtcagacatgccgcccagtttcatttttcgaagcagtgctggcaaacgcccagtaaaagattcaacaaacatagctagtactggtgtttttgcctctccaattactatttgtttcactgcctccatttgcaaaacgttcctgtgcttaacattttgcataatcatcagacagtgtaggttatctggtttattcacatccaaacctatcactggcaagtgcagaggtaaagtggaaggtggaatattagaaggcttcttgagctttagtctagccacataactagattgatccacctccctcatatctaatcgggtgatatgcaatggaatcacctgttgatgtacctactattagatcccatattacaaaacaaaaaaaaaaggaaaggggagggggtgggcatgcagttcatattaaaaaaaaactgcaatagtgcatataccgtttcttttcctttgttcagatctggggtaatgttgaccttgtcccgacttttctccatgtggctgtcctgtcaatacgaagtaattgcacgcatcagcttatgatgtattttcactatcccgtcattacatatatacgatagttaaccacccagacaccgggttatcagctcaccttcaagaggtctggaacacgtaaattaaacaagcccatctatacaattcaggcaaactgccatacaattcaggctgcgaagcagaaatcttggcaagaaaaacgtagaattacactcacccacagctccgccgctcaacgcccgcaaccgtcgaagaacccgcaaaacctcgcccccaaatcgccccgccaagctccgccgcagaacgctccgcaaccgtcgacgagcctgcaaaatctcaccggaagcggcgcggttcagcatcaagaattggaagtcgctgctgtaccacggcgagacgaggagtcggacgctcaccggcggcgaccggcaagcggatgaagagtactagtaaaaccctagactcggtctcggtctcggtcgcgtcgccgaaatgaccctcctatccttttgccaactgtcaagccacggtgcgcgtgattaaggcgtgggacccctggtcagcctccctgctccttctcatttcttgtcggtttctcccggcgtggggctggctcgaggtcgagatggaggcggtggctgggcggagcgagaatgatcgatgtcgacgagaccggcagtgtggtgcgcgcggaatgggaaacgccaccagagccctcctgagggagggtgggcgtgcggtatgtatgtgccagctgtgaacacacatgtatttttttttaagataataaaatataatatcccagcctttactcaaaaaagctacagccaattattacatattagttttcatgatgaatatagtgtaaatataagagaaaaacaaagaaaccaacctaacgtacggagatcacgattattgaagtctacttgtaaatctccaatcataattggcaaaaagttgtataaccgtgctctccaattttcggcatacaactttcagaaactcttcatcttcatcacacctctgtagttgtgcccaaaaccggagccaataagctgtcctgaaaatgacctgcatatagaaaaatgatggtgaacacacatgtatagggaagctaagtagtcaaagtgtgtcaatcgaagcgctagtatcagagaggattttaaactcttaaagatagtttaaagctccgcaaatatacaagttaaaataagtcacaacgaaaaaaaaacaaattaaactacagctagttaatatatgttcacaactaaatttattttttttgcaatatgtaaaagttaaaattgatatattgcatgtttatggagcgatctatcacatactcctattaaactatcttgttgatttttattttaaaaaagtttgataatcatttaagtcacatataaacaacgagtaaacattctctcagtattctctcagtttagaatagtttctggctagtatcgtgtgtatgtcattgattgcttgcttgcatgcatgcaagggaaccgaggagccgttcttgtgtgtgcagagagcaacaaagccaagacacgctaagggtctgcttggtacaactccaactcctaaatataacttcaggaattaagtctggagtggagttgt

SEQ ID NO: 23502 - DNA, 21061 bp, Oryza sativa
  unsure (1)..(21061): unsure at all n locations
accgcaccttgatgacatgtttagtgccggttgggacattacccgggactaaaacttagtcccggttaatgttaccaaccggtactaaacatgttttcaaggttagttaaaaagaaagcatctctatccaagtcatatatgtgtagtaggtgggatggtaacatgtgtgaggactgaggtgagagatcttgagtttaaatcccacatcccacatatatttttgatttagtatacatcaatctagcggtggagcttgttatactactatggttaggatattattatgaatctagtttttttaacgaatataaatctgttttctatagtagataggatcagtttttatgtagggcactttttcactatattttatctgtgtaccgaattccagatgctcatgagcataatcaatccacgcgcgctctctctctctctctctctctctctctcattatacgcttttacaactcgatcacagattcacaacaggtggtgatcgtgccgccgcgcatgcactcgatgtagaggtttttttttaaaaaaaaaaactcacgtacgatagcattttataaaactagtacttatcaatgatatttattgaaattggatgtttatcaacgatatttcttgaattttcttaatgatgaccatgtggaagtatgctgcgaggaagattgaaattgcaaaacagattgttttgattgatcaaccactatgtatgcgcgcgcgctctctctctctctctctcttatcaaaaaaacatatgctgttgactgttgtttctctgccctatagaaagagtataatttacacttgttagcgtttttccaaaagtctagttttcacttttcaacctgaattttgaaacctctcaactttgttatggaaatttcagagattgaagtgatgctttggaggaggcgcatcaaatggagaagtttcacgaatacaaacatgcagtggagactgatacgaagattggttcaaaaaattcagtagtcccacatgcttgataaacggattttgactggaatacaatttccgtgtacaagaaaattttccaagctggttgaatcccttatttatatcacacaaggttgcaaaaagggtaggaaggctgaaacaagaaaactcaagaaaaaaaacctcaaaaaaatctttgctccatctgtctcaaaataaaccaatctaaaattgaatgaaacaccatccaatcttacaagctttagcacgtggaaattctttctaaccatagtccacgccttattgctgatgtttgacgtgtttgtctcctacgtatacaacacatctcaccttccggagaagaagtaatctttacaatgttgatgtgttgatgtatgtgtgggaattaattatagttcagaacgtttcaagtagaagattacccccatgctggcaaccgcaactgcaccagctgcgatgcctagccggagaaatgaccgccctgttttcaccggtgaagtatttacaagcgatgtggtgtgctccccattgctccagggctcatccatatgcagcctcagaacctgaacaggaaaaacaacctccaaaaattagcggaatgccgcagctaggaggctgcaagaacagtaacaaactaataaaggaatgctcagttgtgaccttccatccagctgatctcgcatgctgaattgccgcactgaggtcaccgtcggtggtcagaaccaccctgtcaccttcatcgtcatcatactgctcaatgcgattcaagtaagggtgtgtttagttccacgtcaaaattgtaagtttgactaaaattgaaagtttgaaggaaaatgttgaaagcttatgtatgtagaaaagttttgatgtgatggaaaagttgaaagtttgaagaaaaagttgggaactaaacaagggctaagattcagattccaagacggtaagatgtaaaagctagagaggtccgataaacagattccaaccacatgcttgcttggcttcttgttcacttggagtaacattgcataaacaagctcggtttaaaagccgttttgtagtaaaagtttcctttaaaactactgaaaaatatattctgaatgaacagggaaaatgaagtgccaatcaacaaaacagaatgggcttggttttaacatgttcgatcttgtatatcttaagcactacatattactgtacctaaatcgcgtgtataagtacaacgcagttctgctcttaccagaagattaatcttctctttttccattcccagtctgtacgatacggcagaaacaagctcatctaagctttctgaaactgtataaaggaagggcgcaatcaagtagaaaatcataattttatactactgtatcaacaaactgcaatcaggaaataacgatgagaatagaccaaccacaactgaatctgtgcatacgcccttttctatcttgtagtttaaaggagaatgaattgccaacatgagggggtatatgtttcccttcagcattatctgatgttgccattcgagattcttcactgcgctataacagaagactaaccatgaggctattgaaaatgaatcgcaaactattcaactaagcaagtaaaaaaagaaaagaacaaacctacgggcatccgattcctctgcaggctgcagggcaagagctgaatcccagaacttctgcatcatagtatttgccatactgttcgcttcagaagctccctcaacctaacacaaacaaagtgacctttagtacatccaaactccaaagtactaaaaataaatgcagccacagggactaaagtgttacttcttttcattcagaatggatcatttatcttgccggaaaaatactgttttcttagcatgatggaacaccgaaaaaaaatgtacactggcatgatctggtaacgaaaacaaaactgtcccctaccattgaaatagctgcatgggttaattgtagagcatccaaacatgcgatgatctgtccatctattcaaaagttaagttagatatgcacatcgaaaaaagatttccctgttgttagaattcggtacttgcttttgtcggcaacaggaatatgcagatatttcccgtcttgcattgaatgcagggcctcaaggatcgatgtatccaatgtcgcacaatcagggtttgtagtcataaccttcagaaatgtaccagcatattgaatcaaattgtgaaaataataaaaataagacatgaaagcaacatgatttaaaatgcagaggtttcaactttgtaaaggtaccttttctacaagagtcacatctggggataaactttgggccactaatcgcaataccaaatccttggaactacagtatatccagcacagattccattaatcacttaaatagaattatatcatagaaagcagtctacactatcctagtgttaccattgagcagataactgtgttaagaaaaagaagttttatgtaaagaaaaacatacgtaagaattcctagcaacatgttccctgtcatgacaaccactgagttgactcggtattctctcatttttttggcagctgctattacaggatctgaaggagatactactggaacactagaaaaaagagcggtgtgaaaattcaatgagaaatagttcaaaacataagtcttcctgggaatatagaactagtacctgttattttctgttatgatggttgataaggaaggcttgaacagctggtctcgcagattttcgataaatgaatgtggacctgaagtagcccaaagtgtaacatcgtttaatcaaaagaaaattgagtggaatgcaccatgattgttatgtagaaaatagataataccatattcaaataaaactaaaacaaattaacctggaaagtcatttccccactgtcgttcaactccttccatagcagctgctattgcactgccttgttctgcagccttttccattcttgaaattgcatcataaaggaacttggtaatgtccagcatggcaattacctcaccgtgttccactacaggaagatgtctgaactttcctgttaatgaatgccatgttgccacaagagagcattcagacccaaaaagaaaaggaaaataattcactcagaagaacataagaaagaatctatctaactttgcaattatcaggaaaaaaagaatcttactttctcccaaaagagcctaacatttgtaattttgcaagaaacatttttatcagacatatgatcccttagcctatatagctgctgagtgcctgagtttcaacatggttcataggccgtatttgataagaaaaaagtaaattatactccataaacaacagtaaagcgaagaacaaatgatgatgttgagaagcaaaaatggtatcaatacctttgaccatcttttgtaatgcttcaatggctggtgagttggacataacaaaaactgggttacgcgtcatcgctttggccacatttgtttcgtcaggcctgagtccctctgctatcacccgtcctgatatgtcctacaaaacaaaaatacaaaaaatccttccgtaaacttgatcgtcatcattaacagcattaaaatgttaagcacatcttgttctacagtaaaaccttcaaaacttatccgttttatgttatcaagtcttaaagcccaatatccctgaaaataaaatctaatttgtctcatgtgacatgacaatgagctacagtacccaatcaagctcaggttgcataatcgtcaccgctaaatctgaatgactgatgaatttctctgtaactcaaaactgattgaacacaaaataaattgcatttggcattgatcagttcacgacgacaaggcaggcaaataagtgattcagacctctgctgtgagtatgccggagagcatcccgttggaatcagtgagcaacgcggcatccactcgcttgagcgccatcctccggcacgcctccgacaccgaggtggcctccggaagcgtgagcgccttggccaacctcagcttcttcaccgtcctctccggcgacctgcgcgccaaattaacaagcacaaaaacgcaagctccaaatgaatcagcacggggcgaaggtaggtaggagccaggaacgcccttccttgcggcggaagccatcgcgatcgcgaggggaggggcggcggcgcttacggtgcctggacgggcgaggcgggcttggagttggaggccttctcattgggctctggcttggccgcggccgaagaaggtggcggcgcgcggcggagcgaggtgggctggtggctgcgaggctgggaggcggcggcggcggccatcgcctcaggcctcagccgtgtacggacgcggcggcgatcgccggagaaggtgaggggggaagcggaggcggaggaggcaggggatttgaaatggtggagtccaaggcaagctgcagaggaggaggaggaggaggaggaggaaaaaggctcgttgcgtgcggcagcgggaggggaggaggcgacggttggtgggccagggtaggtgtggggccgacctgtcagtggctccgtgggacggtgggacccacctcgactagacgggtagtgcgcgccaagcgggtcataggaggaggaactggttggcacggacggtctacacgttgtgtccttccggatcatctgtgactattttgattattactactagttgggttccagtaatctccttaatttcgtttttttgttctttcgaacagactctgaatacatgatattagtgttgtatacttgtagtacattgaggtcctcatcggtaagccaaaagctttggctaattagttaaagttggcttcttcaattcaactaaagaaaatccgttgattggcttatttgacttaaatggcttgatgaggattttttttctccaactcccttgcaggccctacctatgttcggctgaaagctctcagcccaataagcgagacgatggactttggctgtaaaacttcaacccaaacagccatccgatgagactttgataaagccatcgccagtagcttcattcacaaaagagcatgttgtcttgataacttgattgctgatacaataaagttaacaatgaaagtaggctcggtaacattctgcaaagtaaaactagatggtagagaaatcagtttggaaattatggattgaaaaccttttattattaaaatataacttgtacatattattctattaatagactaggttgtaggaaatgaatatgattataactacttgctcatgtggttagaggaatgtatcatggaataatattttatttaggcaatgttgatttacattattgaacgtatgattgttatggattatttacgtgtatatggataaattaaataatttaataaataaacttaatagatagttcaaaataagtggtctaactaattaatgcaatagaagaatttaagaaaaatatttttcaatgtgtgtagcaaataatctatttcaataatccaatgaataagctgaaaataatatgacaaaaaacttagtctaccaagagatctactaacacaatatatctcttaatatacatggcacgtactatcgcaaaagaaaatggtacagcgtacatatatatatgttgtcccatacttgtactactaaagttggttagcaaaatagtacatagcatagtcatattgctcatgagttaagtttcctctcttgatcgaagacacgtatagctaattgtacaatcgattggtagctagtctgatatacactggatagttcaaaggtaaagggtatatggttttaactctgagatcatgtgtttaatcctcaacatgctcaaatttttttaaaaaaattaaaataaatctcattctttagtaactaaccccaatggatacactctgttctccaaatcatccaccaacacaaaagcacacgcattacccacggtccacaaagaatcaaaatgaagtggagaaagtggcaacagagagaagggaagtcatgtgttgagatgctgaggaagctatttttctccacagaaaacacgctgacgctaagctggaaagcaacttcgacatatgattctgaacttttgcaatgtagcacaatgcatttgcttcaagtcatgtaaagcctgaagaatacataggacattttaaaaaaaataaataaataaagtgctggttaaaaaatataaattattctagttaagcacatgttgctggatttctagaagagggaagggagatgaagcctgattgaccagacgtgacaagaaactgtcatcacctaagacccattctgtggtactttgccttgagcatgattctccatcaaattaattaattaagatggtaatatatccgaaactcaaaaggctgtccttttccagttcagaaccacaacaattcgagtatataaaaggagaattacaggctacagcacatggtttcatgtcggacaaatgcacgacttaatcttcgttgcagaaagaaacagagaaatgtcctgatctcttttgaaacgcacgcatgcctatcgcaaaaaaacaaacaaagaaagaaaaggcttatattttgatttgtttgacaatgtcagttaatgatatatgagtgttggcgacataagttttggtcagcgtattggttttttcaatcgatgaccgaaaatgttaaaacacagaactgttgcaaacggaaatccggaaatttgacctgagctacaggtttttgcaaacaacggcacgtttgagtgtaccaaatccaaaaggaatgttgggccagttctctgattatatatgggctgacattttgacgggctacactagcttgtactgcacgaaagcccatatattaatcctgcatagcaatatttgcctattcggcatctgtctgagaatctctttcttaattatcatcagggaattagggcccttcactccttcaggccctctggattcatttcaacgagaacctcatgctccttgtctacctcctcttaatctgtttttcttccggcatttcatacgtacattcattaattgcttctctttggcttttgctcaagtaaaatatggttaaaaattaatggatttacaacagaagacagtttgtacatcctaaagcaatgtacatataaggcttttatcgcgggaatttgaacttccaatcaagtgaaaccgattatatatcttccaatgaagaaaagaaattttacttttaaatgggaatcgggaggtgctatttcttatcagtctgttaaatttgatctcctaagtatacttcatttgtcttgttaataatgacaatattttcccatcataattaacctagagctagatttgctttgtatacctacttcttaattagccagcaacatatagacaaatgcatgggcatggaatgtttttctttgttttgtgtgaggaattaatagagagagggatttattacaaccaaggaaaaaatatatccagagagaaatcaataaagaaatatttccatggatagagaaatttgagacctcatcattcatcgagacaaacatacgatcggctacaatatatcgaggttccttctcaaggaagatcgatcgagccaccggccaccatgtgtgtgtccatgtccactatacgtgtacacgtacgtactctcggcgcaataattaattcatttctctctatcttttttttcatttttttttgctgacatatatagttaagcaattgttttcagatacttattattagtggacacaattttcaattgcgaccttaatttttaatcatgaatttgttcaatattattattattgtacataaatatttgtacatacctaacactcattacttaattagtcataatatatcagctagccatctcggcaagatcaggatatatatgaaggattatatatatagaaggatgggattttataacctccgtttgatattatagatgcattgttttttttctaagccagttttttttaaatatagttaaccatgttcacagacaaacttagcatgaaattagtttcattgaatgtgatatgaattatttttttaaaaaaaaatgttgatacatttttctagaaacttgcttaaaatttagagaaagtttagttttaaaaaatcaaagcctcttataatataaaacatagagagagtagacgttaaaataaattgagcctcaggataaaacaggccatcactgtatcatgtcacaatagtgatttgcctggaatttaatctatttctctgaaggaagatcctaattaaattaagagaaaatccataaaatgccatcaacaagcaccctaatcccagaaatgccatcgacaaagacaactttccaaaaatgccattgcacaagccactttctcccaaaaatgccatcactgtcaactccacaccgttacaaccgttatttttttaataatgactattttgccctcagtgcaaaatatacctagtttttactgtcaaagaaaaaaaataaaatttctaaccctaaccctaccactaccgatcccgatcccgatctagcgctctccccggcggcgtctcggcgacagcggctcggcggcgatcccctgctgcggcggcgcggcaagggcgtggcgaggaggaccatggcggcgacgcgacaggatgcggcgaggaagaccagcgcggcggcgatgcggcaagggcacggcgaggaggaccgcagcaaggacgcgacaggacacggcgaggaccaggacggcggcggcgcggcaggacgcggcgaggaggttcacggcggcggcggtccccgacggtggctcgatggcggtcctcgacggtggctatggctcggcggcggtcccttgctgcggcggcgcagcgaggaagaccatggcggcgacgcgataggacgcggcgagggcgtggcaggatgcagcgaggaggaccacggcggtggcgccgcagcagggcgcggtgaggaggtccatggcggcggtggcacggcagggtgcggtgaggatgtccacggcggcgcggctattgcaggatgtggcgcgggggccgtagacgccggcgaggagggggagaagaggcctgcagccgcagtcgctgaggtccgtgaaggaggaagctgtagtcctagcaggtgttgcaactctgatgttgaaattttcccttttgtttgattttatttgaagactttgtttgatttgatttcagtggatttaattatgaaataacttgattgatagtaaaataatgatgtttgtgaatttataaactaacagaaatataatttattgtgagcaagcaatgcaaaatgatgatgtgtgagtaaatggttgtctaggggtaagattgtcttttcatgcaacttaacggaaagatgctaagggcagtttgacggtgatggcatttttgggagaaaatggcttgtgcaatggcatttttgggaagttgactttgtcgatgacatttatgggattagagtgtttgtcaatggcatttcatggattttctcttaaattaatctctaaattcagaggatcgatcgatctttaattagtttgtactgtgaatagtcccttgtttttgttaacctctgtattcactattcagcttatatcgttcagagacctgccagtactgtattttgaatctttttggtagttaaggttgacgcatacgattacacacacataaattaatcatagtttggaaaactgtaaaggggaacacataagaaactaacagctagctggtacgtagtgaaaaacgtatctttttgaatctcgatgaaatatatcatttgcatatagaaggagagatctaaatcaatagagctatccatgcatgatatggatgcatggacgacaaattaatttgcattgggacctccagacaaacatgcgatcgatcagctacaagatcgtattctcaagggaagaccaccatgtgtccatgtccactatacatactcagagcaataattcattttgctcctcttttctgcatattttttgctgacatgtatagttaattacggcattgttttcagatgctttattattagtggacacaatttgtgttgcgaccttaattaattcctaaatcgtgaatcttgatctcaatagcattcgtattgcatacgtacgtatatatgtacctaatactcatatatattattacttaattagtcataaacaatttgtgttgtgaccttaattaattaattcctaaatcatgaatcttgatctcaatagcattagtattgcatacgtacgtatgtacctaacactcatatatattattactcaagtagtcataagatagcaatcatttcggctagacctggacatatatggattatatgtagggaaagatggaatacataatactccctcaattaaaaatataagtctattttatttcgttaagagaaggttttgatgaccaacattatccattaggatattattttttatacaaataatcatgattaagtaagtgtgtttcaatacaaatttaatatatttcagttttatataagaaaagtattacatacgtcccaaaatgtatctaactagtggacgattagacatctcttacctattactgtaaatctggataattagtgtccaatcatgtactaggtagctatattttagtacgaagatagaatatccaaatagagtatttattggtcaaagtttatcttaatgaaacaaatatgttcgatacatatattttgaaacacgatggagttaaacaaatcgaatcccacgataaaacagtccgtgcatatatgctgccacaatatatagtgatttgtctcgtatttttaatccacttctctcaaggaggaccctaattaatctctaaattcagaggaaatgatctttagttaatttgctcgatctatgcataattcaccccttcctgtttttgttaacctctgaattcgaagttcagagatctgccaaagtgccaatatatagtgtattcttaaccattttggtagttaaggttgaatacgattacatacagataaatcaagatcagcaaactgaaataaaaaaaatcaaatgaacgcacaagaaaatattaaggggtaaccagtaagaaacatatcttgaattaatctcaatatatgtctcttaagatttaagaaacatatcttgaacctcaatgcattcgcgaaaaaatatcttgaatctcaatgaaataatcatttgtatgtcgccacgcaattttaatctttaccatttctcattaaacaatcaattgacatatccatatacatgcctctaattgtataaacagtactcaactcaatttgattctcagacaaattaacgatgtgatgattatttaacaaaggcaaagcatgatcgatctgtgtagctcaccctagctagtgcctgtcaagcctggacatgccgatcatggaggccaccaccggcgagtagtagtacgtcgtcgtcgtcgtccttgatgcggccgccggcgaagacgtcggcgtcgtcggccggtgggaagccatgccggacaaccgcaccgccgcgaggatcgccgcgccgagctccaccgccacgcggaagacttcctgcagcctgcagatgctcctcctcaggaccacctgcatcacgatctggaccactgcgcagtccatggacgccgccgccgcccccgccgccggccggccggcggccagccgtcgtctcgaacaccggtagctagctagctaggctagctgatctgagcctggatctacagctagctagctagcaggggaaaaaattgccctttgggttacttcaattcaagctctctctctctcttgtttggaagggtagctagcttagcttcttgccaagcgatggcagaaggtgaggttggatttgtcatctaaccatccaataataataatgcaataataattcaataataacttggctgatagcaacaggcggttacaaacaggaactgatataatgtgatttggacgtgtcttatattatcgatacgatgcaattttttggatgactaaggatatatacaaatatgaatgatatttttcaagttgtagcaatggggtagtttgaaataaaaaggatacattgagctagttgggacctcatgagatgcatgaaatcacgacaaaccgaaaaagaaacagctaagcattatacatcagctgacaagtagctatagcagcgctgtagaaaattgcatacaccaaataaaaggacggctatgaatacatgctgcacaggaggtagctttaatcgacggtcaccggtggcagtgtgaattggacatttgggacacatgatgagctcatacccatgtggttgtaccccggctgtactgtatctttctttttctgtagactactggtagtaaattagtaatttgttaagcaaagttgctgaatttgtaacgatttaggtatgacctgtactaaaagaatgatttctcaatcttttttctcacaagtactgataagaatatgcttatcagtacttaaaaacatcaccagataatttgtactatattcttcgcatatacgatccctatataaacatttttataattcaaattttatacgcgatactggttctgatatacgggaattcaaacatttcagtcaattaggttcttaattaggaggaaaacccaagcaatttaaaatttggcaaataagattttgttgaaaaaattctacgggaatccttcttttccttcacttttttggtggatttttagcatgatctcaaatctcatgcatggtttaaattcctttaagaaatcggaggcaccatgtctttatctatctgctcaattagtctaatgatatttctcctctaaaattcgtacgagtttcccgcggagtatctaaacaaaattcaataaaatatgttttaaatatttatgtagaataattttatgtctctttaatttgtcgctaaacgggaaccacgcgtgatgaacttactatagcttatcatgtgacgatcattggcaaaatatatatggtcggaagttcatcgacggcgtgtcggcgagaattaagcagacagacattggctttaggctttgtttagttgaaaaaaataattaaccagcatgtcacatcggaaatacggatacatatttaaagtataaaatataatctaataataaaataaattacagattctgttagaaaactgcgagatgaatttattaagcttaattaatccataattagtaatgtttactgtaagagcaagttcgatagtatagccaactattagctccaattcatctatagctaatctaatagctcattcatacaatagttacatattacactattaatatttagtcccacctgtcatacacacactgagtctgtgctacagctggctacaatctgtagcccgctgtccttctctctcatcatttatttccttaaaatatgtttatagctggcttatatgtttcatggcgaactatgtaattaatttgttttctatatttaatactacaatgtttcaaacattcaaggtgaaagcgtgcaaatttttgttttggactagacatgccgttaattagcgtatgcatgcacacagtacctggtggggcccagcagcagtggatgaggacagccatgtgctcatcccgcgttcctcgcgcggtggcacgcatctcgaggccccgctccgcccggactaaccaacgaccaacaacgaaccaacgaatcagcgatcaagggggtgtcgacatacatggcgccatcacgatccatcgatcgacgattttttttcttttttttttaataaccatcgacgatcgaattgatcatcatatatatcgatcgtcgtttgccggaagtcgtcgtaccgttatattcgatcgatatatagacgacacgacatgccgggtccatcagtgcacacacatctggctgcattctttaatttgcttgctcaactttgtttatttcgattaatttgctactactaattaagtagctatagatcgacagatgcattgcatcgattggtgacaataacacagagcagctcgatcgaatataatcgtcgttagtttaataaatcttgtgagacaaaatgaaggtatatatcctctcatcatctcagtgatcaccagccagttagtggcagacctatgctttagctccatggctgcagatagatacagtatatgatactccaaatcaccggtaggcaatggatgaacagtaaatatactgctgctgtttttatataggtagatctgtatagcttagggtcagctagccgccatgtgaaattattcccttcatcattgtacgtgcactaccttcgatcgatcgatagatatgatattccattcatcatgtgtgtgcatgcctatatatttcaatatatgcatacgtccatctcagtaccatgaccaagtagctcaatcggttaattaatctctgctacttataattataattaattgattattagtcacaatccagttatatcaagctagcttaattaccggtaccaggccagtataatatatggcatccgaccatgaaaaccacacgaagaaaggaggctggatcactactattccgtttctcgcaggtctatataccatctcccatgcacttgcattaatttcattttgagtaattagctagttattatagctacacattagagtatacacatgcactacatggcttgacacgttaattaagtttcgtcgtacaaaaatttgtgcttttgtaggtgttttaataaaatgttactacgacttaatgtatgtgtgcaggaagcgtggtagggttggggatggcgatgagcgcgacgagcagcaacctcatcgtgtacctggtgcacaagtacaacgtgaaggccatccacgccgcccagatctccaacgtcgtccgcggctgcatgcagctcgcccccgtcctcgccgccgccctctccgacgccttcttcggcccctatcccatcgccgtcgccggcctcgtcttctccctccttgtaagcatgcaacctcatcgtttttttatactccctccgtttcaaaatgtttgacgccgttgactttttaaaacatgtttgaccgttcgttttattcaaaaaatttaagtaattattaattttttttcctatcatttgattcattattaaatatatttttatgtagcatataattttatatatttcacaaaagtttttgaataagacgaacggtcaaacatgtgctaaaaagtcaacggtgtcaaacgtttcgaaacggagggagtatatgtaatcatcgtcgacaccaaataattaaggatttactccctccgtctcataatataagtgattttaacttttacttgcactgtttgaccacttgttttattaaaaaatttatgcaaatataaaaaagaaaagttgtgcttaaagtactttagataataaagtaagtcacaaataaaataaataataattctagaattttttgaataagacgaatggtcaaacagcgtaagcaaaaagtcaaaatccattatattatgagacggatggagtaaatagttaacctgcgtgtggttcgtgggttaataataaccaattataacatactaagtacatatatcaatttttttagtgccatccttaatttattcttcacgggcggtccaaaataatatcgtagtgagaatgtttgaggctgtctcaaatcatataccattaaaccactagtgaaaaactgaaaacctacatttacacgttctattgtgtctcgtcatcaataaaactaatatcgcaacgtaaatgtttgaggttgtctcaaatcataaaccattatatcaccagcgaaaacctatcttctgtgttctattatgtcttgtcatcaatagtactaaggggctaggcggttaacctgcgcgtaaatatcactgcaaaaatgtttgagctgtcccagatcgtaaaccacctttgaaaacgagtaaatccacctgagaaaatatgtctgtggaatcaataatgtcgtgatgcaaaaatgcgcatgcagtcatttgtactgttcacgttgacggccgcgctcccgtcgctactcccgccgccgtgccagcgtggcgccggcggcgggggcgccaccgcgacgtcgtgcgaaccgccgaacgccgcgcaatccgccgtcctctacgcggcgctgtgcctcctggccgcgggcaacggcggcacgcggtacaacatggcggcgctgggcgccgaccagttcgccggcgaggggcagccgcggcggcggcggcagggcggcgggttcttcagttgctacttcgcgttcctgtacgcctcctacgcgaccggcgacacggtcctcgtctacgtgcaggacggcgtcagctgggccctcggcttcggcgtctgcgtcgccaccaccgggctcgccctcgccgcgctgctcctcggctcccgccattaccgccggcccgtccccaagggcagtccgttcacggccatggccagggtcgccgtcgccgcggcgaggaaagcaacggtggatttgggttcacgagtccaatattaccatggatgcaatcgtgacgacgcagtgccacgagctgaccaagctccaagtgacagattcaggtatgcaaataatcaaattcagattgttcaaaaacgtatgtacatgaacgaattttgaagaaatttgttaggtttttgaaccgagcggccatggtggtggcgggggagacgagggaggaggacgggtcggtggcgaagccgtggcggctgtgcacagtgcagcaggtggaggacgtgaagtcggtggtgcgcgtgctgccgctctggtcgtcggggatcctcgtcagcgtgacggtgaacgcgcaggtgagcctcaccgtnctccaggcgctcaccatggaccgcgccgtcggcccgcgcttcgccgtcccggcggcctccatcacggtcaccgtgctcgccgccttcgtcctcgccgccgcgctcttcgaccgcgtcgccgcgccgctctgcgccgccgccggcaagctcgcgatcaccccgctacgccgcgtcgggctcggccacgccctcaacgtcgccagcatggcggtcgcggccctcgtcgagcggaggcggatcggcgccgcgcgcggccgcgccgcggcggcggcggcggtcgtgccgatgtcggtgctgtggctggtgccgcagctggcgctgaccggcgcggaggaggcgctgcacctgccggggaacacggcgctgttctacggcgagctgccggcgtcgctgcgcggcacggcgacggcgatgccgccgctgttcatcgcggcggggtcgtacctgagcgcggcggcggtggacgcggtgaagaggggcacgacgtggctgcccgacgacctgaacgcgtcgcggctggactgcgtgtactggacgctcgccgtgctcgccgccgtcaacttgggctacttccttttgtgcgccaccacgtacaagtacaacaattacggtggtgacgatggcaatgtgaaggcccagacacagactgacgacgtttcatgactgactgtttgacttatctttagtcaaggtgttttgcgagatatatataccttaatctgtacatatatgaattgtgtgcgatagcacggcaatgatgaactggatatgaattgaagctcaattgttatttgaattgaatctgatctgatagcacaatacaaataaagcactcttcaaaatcaaaaaacaaaaagaaagaaatacttacagtccatgacatgtaatgggcctgaatgtaagaaatacttacagtccataagatgtaatgggcctggatgtaagaaatacttagtccatagcatgtaatgggcctaatttaggcccagtaatagattgtacctttgggccgaacctagtgcgggttccactacccactcgtctttcgtgcttcccaagacgagtccgaatccacaaagccaaacccgagcgctcctcctcctcgcaaccccgattcacaaagccaagcccgacacaaacaccaagccaccgccgcctccgcctccgccgccgagagagagagaggaccagccagcgattcgccgccgtcatctccagcttctgcgggagcaacaccgccagcgcgctctcccctccccgccacgcctcgcccattgggattcgccgccctcaccgcgagctcccacgtcgaggtcacacctagggttccatcgccgccgccgctgccgccagcgaaggaagaggaggatacagcgagatggtatgctgataatggattttcttttttcggatttgttttttgctagtgttttgttcttgttaatccttccccttttagaacttagccccaatgtcgccgtgcttctaatttacccttttttgaaactcctaatttgtcaggctgctaggcttctcgcgaatctcctcgtcatcggcggcaccgtgctgggcagggccgcggtccaggcgtatcgccaagccatcgtcagtgagtatcccatctcttcctctcatgagctgttcttactcaatctcaatcttgctgctggtaccccttaacatgctgttttacaaatcgtgattgatggccacagtaatagttgttgttaattggattcgttgtgacctactcattgttgtgcagcgcaaatggtattttgagtactctgaacatacgcggcatgttgcactgttccttgtggtttctttgttagcacggtttggatgctagtatggtggtgctgggcactattaaacacgatttttttgccagtcaaattgaggataccaaaaaataacttactgtcaaattaatggacaagaaataagcacctaacttgatcctgacctgtgttatttttcttgttggcatctgtaacaagcatgtgctatttccagtctgttagtttctttcatatatttatcactaactgcttgtactacaaatatgtgttatgttgtgtattgattattgaagtcatctgatgatttaaataaccatttgataaaatcaaaatgatgccttcaacttgattcagcttttgcatcatggttctttagtagttcagttcacatccttgttatgcctatgtggatcatacaacaattttaggctgtgcttttaacctgtaacttttgatgattctcgatcatgactgagttaatgggatattgcatatactgttccaaatagtttgcttgaagattagcagactgttgattgcatatgattgtgaactgtctgataattttccagtacagatattgttgaacatagctttttcctgccataaccttctaccaatattcatgctaaaacatctaattcttttattattatctaaagcgacatctgtgaatttgtgactgcattgctaaatgttccatggcacacatttttttctgaaaggcaatcaatgattttgcggtccattctaaatgttgctcaacatagcttaagtagcctactttatatgcttccaatttatatggaagcatttgcttcctttgcatctcttttgactataccatccatgccacgcattccctaatgaaattaataataaattctacctttgtcctgtagatgcaaacaaaactggagctgcccaggaagctataaatggtattcgaagggccagcaaggccatgactgagcaagaagcccggcaaatactaggtatcagcgaaaagtcgacttgggaagagatcgtccaggtttgtgacaatgtgctttcattaacttgatacattccagcaaatcaattttctaccaattaagactgttaaaagcacatggcagtcatttgctctagccagaaactagcattgaatttctgtcttgttgaaatactttgcagaaatacgatactatgtttgagaggaatgctaagaatgggagcttctatctccagtcgaaagttcatcgggctaaagaatgtctagaagctgtatatcaaaagcccgacgtacctagctgaggtcgagtagcttgcatttgaagcgtttgagatctatctaattgatcaacctgccagtgtggctgaagatcgcgattattgttaattggttgtaacgggatgtcacttaacttgg

SEQ ID NO: 23503 - DNA, 24093 bp, Oryza sativa
cttcagcgtgtcattattattattattattattattttctttttggtatttttaagcaaaggctaattgctgccatcgtcagcagcctaacaagcagacttgcatccacgaatacgtgaatactgagacttgaatttttcagatttcgagcttctgtttggggtttgaaactcactgaaaactcaagttccaaactgtaacattagtactccctccgtcccaaattatagggcatccttttttttaaaggaaaatcaaactcggtaacttttgactaataatcatactaactatattatgcatgttatatcactaaattcatattttaaagtactctcatgtaatgctaataatttcatatttgttgggatcatagaatggaatacaatactggacaaagtatgttatttaaaaccgtgtaaaaaaatataggcattagggacagagggattatatttcatggaaaaaatatattataataacctttttaaaaccaccaaattaaagtgccaaagattgattgggccaaaaattatacaggctcctcggcccggcccaagccgaggcgtctccttccccttctccgactcgcacatcgccacgtccaactttttaggtttcccctcccctcgcgagtcgcgatcctctcggtcctgacacgcaagcgtctccgccaattcctcgccttttaggcctcgattcgatttgcgtcgggagcttgacgacggacagcaatcgcaatggcggcagggagcaagaagaatccagaaccttcctcttcttcttcttcaggcgatctcggcggcaagaccgtacaagagctcctcgacatggacaaggatgccgtctctgagctagtgtccgaccacttccatcagctgtactctctccagaaccatcttgatgttgatgatgatgatgatgaccattggtctgaacacaatgagcaagaggatcgatctcagttgcaggagcggctagccttctaccgcatcataggttatcaggtagtgtgtgtatctaactatcccttactcttaatcatcattatatgtagatatgatgagccaaatcctgtgtatgtgttttttgttcgatgcatcttctcttctttgtgttaaaattactctatgatgatctgtcttctgttgcagttatcaatgggtggcaagattgacgaactggacattgcaaaactgaaggagaagtactctcctgaaatgctttataacaaggggtatttccagtactatgaggatagtcttgaatggtacttcgatcctgaaagatgcatgttgactagccttgatgactaccagaggctagtgctttgtgataatgtaggtatcgtcgtgtcaaaattttgattcctccatgacaactacagaaattaatgcttgcttatttctgtcagttcttggtacaaccaactgtgttgctataatggacgatgccatagtagatggccgcttgtgcaattaatggaccatgtattattctttgtgtagggtttgtacatggactgggatcaataccactcaaattatagtacctacgagagtgatctagcatatgtcaaattctgtgaagagctagcaaatgagactaaggtatgactgactcaaggtgaaaatactggccatatgccatctaatcatccttgtctgatgtcatttattcacatggcagtggtttgaagattatttggtactcattgctgttaaggataaggtaaccattggtcaggtaaccatcccaaaagccatttgtgcctaataaactgttgtgcaatgtatatttatgttataatgcgtcaattgatggcaactgtttccattgtttagtgggacaaagttaaaaatatagtttaccttcaagcactgaagatcgcactacgcattcgtgttgtttctctaatgcaaattatggctggtttccaggtaatgcctcctgttaattttaattggcaagcataagtggtgatggtatttaacaatagtactatcttctaatttaggaatatatatggagcatgcggtttgattgttgtaactacagggattttgatggtgtgtattttgaggtttggaagcgggttgctaagcaaaaggttagattacttcaatgtgcacaaccatgcaacttatggtgcttctttttctgtccgtcatttgctttatattcttacttagtgacgtataattatgctatttcatcttctatcagatggaattcactgatgctctgtcggaactctatagagaagatatgtttcccttgcgcaatgttgatattaaggatgagcttgacaacattcgagtgagagcgggattccattcgatgaaggaaaatgtaggttcctcttctcagttttgttacatcaggatgattttgaactcgtcaaatcatttcgtcaatccatccatccttatcacaattttgtttctctgttgtccagtacgacatctacgtggcttgcattgacgaaacggtaagcctgcatttgcatgagattcatccctcaactggaatatgttcttcacataaatcacactgatggaacatctatgtgtaggtgccagaaaatgaagctcgtcaattgatcaaagaggccgtcataaaaatggttagtggatttatttccctatcaagcaaacctatcctgggtagtagttgataattttcctaattgattatggtgttgagtgccttctccgaatcggtcctattttgctaattctgaggcgaactttatcttcagaatcgaaaaccagagacttatttggattacgccaggaacaagttgcaaatcgcacaagatatcggtttgatcaccaaaagtacgcatacacttctcaacagtgggacatgatttatatacatctttataatggggacaaatctgtggattctaatttttcttgtattatttacttgtaggtacacaggactagagccaagatcctagaggtcactgcacaaaacaggggagacaatagtgaagcaaagcttgccatggacaactaagcaaaaggtggccgaaagtgcaattcttttgctgtgttcgcgaaaaaaaagatggccgaaaaactattttctttagtactaagaagaaaaaggatattgatgctacggtttattatctgtagttttatccattgttacactctgcaactatattacatcccgatgtaaattgaaatttatgcattggccatatgtcactggaaatctggaatgctaagaatgggactatgggagctgtattagctgaggtctcggtagattagcttgcattttaagatctggggtaccaaattgatcaatctgccggtgtgttataaattaattggttatatgccgggacgtggttcacttagcacttgacacgatacacatcgtggtgcttaattcctgcctttgacatggagaatcaggtgcaaatgtagtgtgatccaatgtatccaccaattgaacagtaattataatttcagggcttcttcacgatgtaggataggaaaaacgtaagaacagaaaaggcataaaaatatgataggaatatatgtgtaaaccaatatattcctcgtgcacaggatttttacaacaaaaaaactttagagtggattccttttttcatgtgaaaacatgggcaaggaatagtgttcctctggaattgaaggtagccaattcttcgaaatgaatgcatctgcagtacctaattcaaagaaatcatcaatcctctatttttcgtacacatttcctccattctgaacgagccctgatcactaggggtgctcctggcgtggtggtttcctgcatgagatgcaatcatttaactacacatcacgatccagcagttatggtcaccaagcgaaacgacatatctacgagctaaaaataaattatgaataaaacacacacatatatatatatatatatattaataatttaaaagtaaaggctgaaaaataattttggacgaaagaacaatataatcaactcaaatttaagggggaggaaagatgaggccgcaatagttagttgtagatgatttttgttcgccttcagtcatataagcgcccgtggcctaatggataaggcgtctgacttctaatcaggcgattgtgggttcgagtcccaccgggcgtgttttttatttcttttttttttaaatcgagggcgtgtattttttgtgggtttgaatgttttttatttctttttttttaaatcgaggtgttttttatttctttttttttcaaatcgagggcgtgtattttttgtgggtttgatactaatattctctactttttttttgtgctcccgaaacatcatcattacttagtagtaccatctagcaaaaaaagagaatgtaattaaagatgacggtaggggcgggttgagtgtaccacaaaaaaagcgaatttcttgaactacttttttcgggtaagaagattaatacgatgacacgacgagtgtgtcgtctttgccatcatcttgcgacgtgcggcgtcgtctaatatgtcatcatcgctctcgtgatggttgctttcacgcaatgttcacctaggagtatctcaatcaaactaatttagcaacatctaaaatattaaattaattttattaatctaaaattgaaaatatttgttttgtattaaattacaattacatttttacatgaatttaattaaaattaaagatgtttaactaacaaaaatatagatttataaacaagggagtactccctccgaaaaaaaaaactaggttttcgtgtccaacgtttgactgtccatcttatatgaaaattttttataattaatattttcattgttgttagatgataaaacatgattaatactttatacattacttatcttgttaatttttttaaatataacggacggttagaaacctagggtttatgggacggagggaggagtaccacataagcagccttgttcgttgaccattcgctaatccagctcctctctctctctccagttcagactccagccctcgtgggttccttccaccacttaattttcagaatataacacccaatacgcactacttctaggatttatcacccaattcgcactgctttcagaatacaccactggaatgcgaattttcttctttccgtaacactccgtcccctagcgtcagtcggcctgtcgtcctccgtcctcccggtgccgttcgtcgtcagttcgccgccgctcgcgcccgcgtcagccccgccatcaccggtccatcgccgcccgcgtcagccccgtcgtcgccggtccgtcgccgcccgcgtcagcccgccgtcgtcgcccgcgtcagccccgccgtcgctcgtccgtcgccaccatcggcgcacgcggtggagggccggcggagaggggagcagcggtggagggcggagggcgtcgagctccagcggcggaggttggaccggcgccggctcggggcgcggtggcggcagcccggtgcggcggcggctgagctcggggacgagctcgctggcgtggggaaggacgagctcgccggcgtgggggaggacgagctcgccggtggggggagtacgagctcgccggtgggggaggacgagctcgccggcgtgggggaggacgagctcgccggcgtgggagaggatgagctcgccggcggccagatttgtgcgggcaaacggcgcgagatggatgaactgacgacgggcgtcgttgggaggacggagtgttacggaacgaagaaaattcgcactctagtggtgtattctgaaagtagtgcgaattgggtgataaatcctgaaagtagtgcgtattgggtgttatattctgaaaattctcccaccacttaattttcacaccacttaattttcacaccacttaattcgagtgtcccccatgtagtacagtagtatcttttccttgctcttccttctgcttggctgtggtggtggctgtggtggtgggcaaagcaagggcaaagggcaaagggcaaagcaagcttaattcgagtgtcccccaacgtacgtattgggtgttatattctgaaaattctccttccactgccaccgcacaagcaagggcaaagcttagcttagcttcgctggtagtggtggtggctgtgccgtccagccgctgccatcttcctcaccagcagcagctagcagcggcgcccttctccggcctctccgtgctttgctgttctttgctttggttcggggatccgatttccattccatccatctcttgctcccgcgggtctcgtctctgtctgtgtttccctggtaagtgctaacatatgcgtctttccctttcttcgggattccttgtttctgttccttaattatttaggaattattttctgctctgttctgcgccaattcaatttgggcctatgtaaatcatgcttttagagctcgtaactggacgagtaatactactagctgaatgatttcaacatgaattttatatatagtttcattccatctgtgttccaacatgtctcgccgcgccttatcgatttctacccatcataattgttgttaaattagggttaagcagcttataaatttattacaacgtttgcttatgtacaagtgcctctcctgtcccccttttgatttggcctttaatttgtagcgcaccatatttcaagtggtcaatccagaacggttctctctctcgaatcgatttttctctctgtttccatccaaattactactaaatgtctgcaaatttagctgaaaaatgtactcctagtttcttctgacatcgataattacttgtggatatgcttgcagatcattcattactggtcatgtggggcgatcggactcatcacaagcactggaatcaagctcatgttccctctggaacttctaaggacaaattccaggccaaagggcaaccgaagtttattcctgacaattacagttcagtggatgaggtgaccaacttaccagcaaatcttttaattagtattcttgtgttcatgtctcaagtctaaacaaattaatctgctacctttgatctctcctttagatataagtttattctccaaaatttcttaccaatatttttcaagctcgaatattcttcactacaggaaaatgatgcctgcagcatctgcttgtacgtaacctgttacctgttttgattttgaaggttactgctgcgttgagagacgctggtcttgagtcatcaaatctgattcttggtattgacttcaccaaaagcaatgaatggtcaggtgatgctacttctgtattgatgttacatacattggctgtttcctttaagccttgctatcaattttactcgaggatccgttttggtttaaacaaacatttttttccctgctgaatttctgtaggcagatattcctttggaagaaaatctctgcatgccattagtgccacccctaatccatatgagcaagcaatttctataattgggcgaacactgtctccttttgatgatgacaacttgataccatgttttggatttggtgatggtaagttatatctggatttcctcttttccccttacaaatttgttttcactagtatacttcctgtatgaactgctactatctaattcattatgtagcttctacgcatgatcagtccgtcttcagcttctaccaagacagtcgttcttgctgtggttttgaagaggttcttgaaagatataggcaaattgtcccacatttgaacctttcaggtaagaagggcatcatccccctttattcagttcagattgtagaatgataacaggttatgattttcacttactattttatttcagtaaccaccaaagaacagttcagtcaatatttagctgttcttttttttttgcggggaatatttagctgttctttcttctagcatggattatgatttagagtaaccaatgttttggtgtgccattttatttgtacaagttgtttttaaaaatattcaatatttcttctatcaaattgttatagcatagtacacacagagttgtccttgagaatgctcagcaatttggaaactagttttcagtcatcacttttgcagctttatttgctcattattcacggcatcatgattatatacttcgttgttctattatttggtcttgatttcattgaattttgaataactcctgtaaatgaaaggtattgtctaatgtagctcatttgctgtgtttcaccgaataataataactcaataagctgtttgtaagtagtaggtaactccactagcactgctgttttgtgctttttgcctggttcattattttgttcgaccggtgtgtgcaggaccgacttcttttgctcctcttatctacgcagcaatttctgttgtcgaaaatagtaacttgcaataccatgtcctcgtcatcatagctgatggacaggtaattgtttacagccactgaaaattacttatatagcattgccagcatgtgacttacctaagcaaaaactgtaggtgaccacctcaaatacaaaggatggaaaattaagtccgcaagagcaagcaactatacaagcaattgttgatgcaaggtaaattaaattcgtccttggttagaacttggtgttaaagttttactgaaacccatttggttgctcagctactatcctctttcaattgtgatggttggggtgggagatgggccatgggatgcgatgcaacacttcgatgactgtattcctgacagagcttttgacaattttcaggtgattataatactactattttgtcatttcaattccgaaatttcaacattgctccacttatgcatgagcaaactgatgattccagtgagaaatcatactacgttgaatgtaaataatctactttctgactagaagagacttgtatagtgatttcatatctatttatttagctagaagttagaaccttactaataaactactgcagtttgtgaacttcacagagattatgtcaacaagtaaggatatgccaaagaaagaggctgcatttgcccttgcagcccttatggaaataccttctcaatataaagcaactcaaggcctccgaccactggagtacttgctcttctcagttcattgcagccctgcattagtttcatagcatccttatcacacactttgtttcttcatttttattaacaggaagcatgcgggtcatgtggccagtcatctgaggattcttcctcctccaaacaaagttcttgagaacgacaacgctgcagcctcacgtcctccaactgcaagctcccagtcaactggcttcggaaagaataccactgatgagcaggtaggcacaatttgggcaagtagctcttgatgagtttaaacatttttttttctccagaactgtggcataactcttattattttcttttatggcatcatcaaggtttgcccaatctgcttaaccaatccaaaggacatggcttttcaatgcggtcacctggtaaggttttctatgctgtggcatgagttctgttggtgaaatcaaattatgaaatctatgctggcatatgtataactatatttctagtgaaactgtaggtgaacatagtggaatcgtattttttttccaaaatttgaaatgattaaatcagtagtagtttgagggattaacagatcttctttacttctgtttgttcaagacatgcaaggaatgtggcccaactctatcaacatgccccttatgccgcgtgccaattacgatgcgtgtaaggctctactcgtgaggtcatctgaccttctagaatgcaggaacaaaggactcaattcaatcagtatagtgtatatggtgtcgaacagtaaggagatgaagaactcggaagcacaaggactctcaattcatgccaagatgcggatggcgtgaaaactatgtgaaaaaaaaggctaaattaaactatgctggattagtttcagtttcaaaggacaggtatatcctttgggatattgtatttgtttctttttcttgtatgtagtaggaataagctgacctgtgatgcttggcccaaagaacttaccgaaggcagttgcggagatggctttgctgctgcattgttgatcttcagagacaatcctaattgggacgatttcaagtagtgaagtaccaatacatcctttccttttgtcttgcagatcaaattccctgtgactgcaatcgacctgttctaattgcagggatataaaagtgtgaaacaatgggagaaacacacggtaccagtcatcttattctgaaactcgtaatggaggtcgatctgaatggatcagctacgttacgtgctcagctcgttgtaatctattttagcagctgattgtgttatttacttcatcttttcaatttctactccctagtttttggtccttaatttttagggcctctaatttttactcatggtgacgtgaacgaatctcagacgtctattttccaatcgaacggtacatatatggtacgcaacatatttttcccggtaacgggacgtttgaccaattggacaaagcaaaatagccgaaaacacacacacatgagaagacaatctttctttatcataggttggaaatgattacattctcatctaaaatttaccatattacattagcaacatttttatttgttgtaaaattctccggcaaaaaacacaagtgagtacccacatgtttgcttcatctccagggatggcgctacctccagactctctctactttgtttcagagacccaccttttcgcttattcgtggaataagcgatacgtcatatttacaaacgaatagtattttgtgaataaaacttttatataggtgttcttaatgatctaaatgcaaaggctgaaaaataaatttcgatgaaaaaaccctcaaaatgagcttcaaattcaaagttgaaaattcaaaatttgattgataagcataagtataagcgaaaagatgaggcccttagttccgtgacaatgcaccggcaaacctatataccaaaagtaaaaaagtaccggcacccctcctcgccgacgtctttgtaggtcttctcgtacttggctttccactccacgacatctgccgggtctctcactcctcgtacggtattgtccatgccgccgccaccatcgccgcactcatgagagtacctgtggaggagaccctcatcgatcgccggcgctgcaaccacgaggccaacgacatcataggtgggccgctttatacatcgtagacagtagtctcatggggtcatagacagtgtatgaatatagactacatagtttaaacaattatataaacaatttataaaatttgataagatagattatgatgatgtaagacactatacaaatatgcaagtctaaatttgatccacacataatgaaacaagaataacattttgttctgcgttgtacagttactattcaccgcctaatttcattttttttgtttctctagttatagatcaaatataatcttgcatgtttgtttatagtcttatatcatctcaattgatgttactattttttaaatttttctataactatttaagttgcatgcaaataacagacaacatggtatctgtgtagaaatttcatgtccgtgggctcatcccaagatccgtgggccgtgtggcttcctcaccgtgggctgacatgccgcggcagccgacttggagcagccccgaccctagctggtttgggtggatgggattgctttcctcggcccgaggacagtatgggcctagcccatccgcactgaaacgcccgctctactgtcgaagtatataaagttcatttctccccccacctatataagccaaacaaaattccgttaaaatcagttttaaatcgaaaccatcaacattaacggcaaatcactgtagcacattcattcaatgcagaaaatataaacacgcggttttgtgttgagcggagagaagaaaataattgggggatcggaagcgtcgcggcgacgctacagcgcggggagaaatctgatatggttgcggcagcttgcgaagcatggggatggcggctggtggctacaggaagaggatggcctccttggctacagaaggcttgaccctttcttcttcttcctcctccgtctgcctcaattcttgctgttgttttacttggtccaagaatccaatctggaagtcgtctgcctttaatattgttgatatagatcgatagatatttccgtatagataggtggggtggcgaagtcgaattcaatgaatttgcgtgcgctgctgaggtcagagggagacagattggttgatggatggatggatggagaggggcgttgccaagtccaccatcaccaaaccccgaatttactacgacattttccatcaccttttcaatgttcttgtcatcactgctcgtgtcacccgtgggccgtggcgaaaagcagaaattattcaggatttgggatttgagatttaagagtttgcgttgtggcagctggtaggaaactggaagaggtcaatcgattcagttcgatgtagtgtactacttccccctatccctttcctacctcttcatggctttatttataatattatactgtactttgctcgctcattttcacacccaagcggccaagcccaacttaatccccattatatagttaatattcggttgattattatctctgcttgactaatactactcaggttgtccttttctacaacaatcctccattggtgtggcggatcgattgattctttctttctgctgcctcctaccagctggtgagttcatccttctttctctctttagttttctgctgagtggtatgcttgttgtatctatcgattccttccctgcatcggtgtttcaatcgacgttatgcacacatgttctttttccataataaacaagatagtacagcaggctttcttcaattctcccttcattcatggtatgatatgctatcgcagcatgattgcaagggattcatcagcaaacacgtacttcgttgaaattttagctttcatctcataacatctcttctttattgatctctaattgaaaaggttgaaatttatgttttattggtgttggtggtcggcagtcgcttctcagctgctgtttaaaaataataagaaaaaaaagatgctcctctgagttttcaaaaattcctagctacactggtgaaaatttatgcttaactttttttttacaactttactttgctcaaaatttaagcagtaatctggtgcatccctgactttatatggtcctctgtgcacttttgggtctggacaagtaaccgttgcccctttgttccatttcagggactggattatgctatcaaagggaaactacatcggtgaattctcaatatcctgccaaactgagcaaattttctgtgtagtagcatcatgcggcagtctcgactcttctatctttgctccattatcttcatgttctactgggtgcaaagaacagaagcacagatcactgcaccttgggaaggtaatatccatcattctagccatactttacctccctcctcttattgagactgatctctacagtctacatgcacatatctctttcaatctttgtgtcataagcgtggcctgctcacttgagacgcataggagagcacaagccatggttctaaatatattagttgttatggttacgttattgagtgttattgatttttaccttgcattatgaagctaactaggtgtaacatcggtacatttggtctgcagttgatgctctgaaagctatcaaaggcaatctgatagatccgcaaggacgtctaaacaactggaaccgtggagatccgtgcatgggaaattggtcttatgttcactgttacaatgaaacagcaagtgatggatatctccatgtattagaattgtatgagcataagtgatctccttgttaactgtgtccttattataccacatttttccgttgcttatcttatggtttgcttttggtgtttagcttatgttaggcgtgcttttggtgatgaatttgttgaatgtcataacataatagatcacattccgccttcatatattctgcattttttcgagatgtaaccagatactttccactgctgctgatagcttctcctttttagaagtagaataatgttactgtgttctttatgttcttatttttttgccttgtgaaaaaaaatgccatgctatttgaatattgattgccttgatggggcaattagtgcagtacaaaaagataaactttgctcgaattttctctctaaagatcccatctcttttttttttcccaagtggatctaattgccgtgatgcatttatgtgattataggcaacttctaaaattgaatttatctggatctttagctgctgagcttggtcggctatctcacatgcaaataatgtaagttggacaagtaactggatcattgatttgttaatgggttagcttttaggtggttggatgcccactcacaagggcgctaacttttttttttctttttgttctttccactgaagggattttatgtggaataacatcagtggcagcatacctaaggaggttggcaacatcacttctctgaaattactgtaagttgaaacccgtattacttcaatttcaccaatacgggtttccttcacatctttttggttagaattgagcctatcttctttctggggcttcttgttcaacttagttttgtttgctataaaactgtagtttaactgaatcagtatcttcatgtccttctggttggatggtgatgttagcatttttcatgagttgtttgttcagattatttttttatgatacagctgtaattgactgaatatatatgtttccattgtaacatgtccttcataatatatatattttttgaaaacaattatttctttgagataaattgttggtaggtgaggtgtgattgttgttgtatcctctgttatctggaatggaatctgtgttttcttgtcacttataggtaagtatgtgcggatgtgcccatcctatttttgcaggctcttaaatggaaaccagcttactggttctctaccagaggagattggtttccttcctaatctggataggattcagatcgaccagaactacatatctggacccatacctaaatcatttgctaatctgaacaaaacaaagcacttgtgagtagcatctggttttacatctatgccaagcatcagggaattattatccttaccctaatagttttccaattttcatccagtcatatgaacaacaattcattaagtggtcaaattccacctgaactatccagattaccttcacttgttcacttgtaagtttctgacaactgcgtctaccatatcggtattctttatttaaactctacttacaatgtaattaatttacagattgttggataacaataacttgtcgggctatcttcctccagagttatcgaagttaccaaaactacttatcatgtacgtaaacttctgtgttgcgatagctctttctttctttctttcttttggttactttggttgggttcaatgtcagtctttaaccaagaactagattgtgtcttgttattgcatgaagtttacaagcagacctttgcctatatgtgttgctttactaaaatttaactagaaatttagcagcttagagaaagagtctttcggctcttcgctgtgctgctctcatttactgaaaagtagctactggtgtgtctcttgaccattgtgattttattcaatcattttcttcactttcttttaaaggatagtctctgatattagaattacacacatatacagcactctctaataatatctgttcaaaataatttcagccagcttgacaacaataatttctcaggaacctcaattccttcatcttatggcaatatcaccacacttctgaaactgtaagtattttcttacctctatctgcaattccacctctcagtgtagttacttcttggctgtgtggatcctagtcatgcagaggctgagtgttctcagtgtaatcgtatcatgtaattgaccgagttcaataaatcttctattatctaagagaaattactatacttctgaaagtacgctttacctatgtctgcgattccacattctgagcatagtgctgagatgaactttgatgtcaatcttggatgtttacgcattgtctggtctcttgaatatttttaggagaaccgcccaggggtcttccggctagctccacaaggtggtgggctagccgggtctcaccccttctatttatttgatattagatcattccctaatattcgcctttttttttctcttgaatatttttaggtaatggtttggctaacattggttgacctggcttattcataacaaaacatatttgcagaagcaaacctgtatcagtgtgcatattatggcagtagaaaggtgtttaagtatatgttttttttttgccatttcaatctacacaaaggccagctctgctgtgcaaaagtatgaccatgttagcatgtttttacttattttagaaatgcatccaagtcactatcattacttgatattataattatccatgggaacctgctcgatagacacatccaaaaatagcttcccttgttcacaaatggctggcatcttagaaaggttgcattttgaatgctttgcaaatcaagtggtaaagttgcatttcaagaatacaggtttaattcagacttctactctctctgtaattatgaaagttttttttgccggaatgaccgaaggaggtcattcaatgaaattaagataggaagtaattatgaaagttagagactaatctattggatatgatcttcatcaggagtttgaggaactgcagcttggaaggacctgttcctgatgtcagtggaataccccaacttggctatctgtatgtgtcgaattccaacactgcaacttcacctttttgggaacagaaaattaccatattcgtagttagcaaaaattatatcatgtgtggcagctttgatccttgtcttatttgtgttcagggatcttagttggaatcagttaaggggttcaataccatctggccgaccagcaagcaacataaccacaatgtataaaaatagagcccttactaacaacttgtcatttttgtttattctattttactaagtatttggcaaacaagctatcatttatatgcatgctcgtacaatttgtgcagagatctttcccacaatcttctaaatggatcaattcctggaagtttctctggccttcccaatctacaaagactgtaagtatgatagtatatctttctttattctatttcaagttcggtgagtacaataggtatatgagtatcattggtagaagcagaataataggatagatctctagagtaaaagggaataactttacaggggagaaaagactagcacttttttacttcataacttttcagtagtgacgattacaatattatgataattatgcataatattagccaaactgatatgacacccaacaggtaaaacttggtttcatctttctgtcttaaacaatagctgcgtgatattgtaccttctttgctcaggtcattggacaataacaatttggatggttctgttccatcagatgtctggcggaatattgatttcagtggaaatagaagtcttatattgtaagaccatgcataatctaccgttcttttcactttctctggaattagttaattgataatctaattctctgtcaatattttgtagggatttccagaacaattctctaaccaatctatcaaatcctctttcaccacctgccaatgttaccatcctgtatgtacttctatttcattagtttccttgttaattaaaatgcaaagtaccaaatccattaatttcattattggaaatatgctatgctggcagtcagagattggtctgatgatctttgtttagtagaggaaacaaagggccctgatctaaggcctatctttttttttaattgtagtttaccttcttcatactgtttggaaagcacaactgaagactattcttgtttgtatttgggaacttaaaagtagactaccttgtaaccacaaaccttagcttattggataaatgatctgtataactaaatgaatgcaacaaaggaatcatctccctggttttcgttgtgaatatctttactaatgccatgactctttaggattgtgaaattggatagttgcacgagcctgtaggtattataagacccttctaagccagtatcatagaaaagtgatgcgaactgataaatgaataggtgtaatttcaagccttgacgtaatgctcaactggagttattttagttaatgttaacatggttgaagatggaggcgatgctatggagtgggtaaagattaatgtgctactctttaaagagagttatgcccgctgtgacaattacaatttacaaagtcatacatgcaatagggttaacacggtgttcagctgtggggaagcttttatctactactgtaaaagcagacttgtcctccttccgtcccttcctcccaccgcacgtgcacagcgtgaggaaaaaatggccaaactggtaaagaaactgccagcccatttcaagtggtatgggctgttgcaatgcatgggcctgttactagtgctttaaaccatctatcagaagaaccgagaatggctttctcaagtcttctttcatggaggagaaatgtccatcctgctatgtgagagtcagaaaaataaggttgatcggtaacctggtgaagtagcaaatgcatgctggagaagtcttaagaaaactcaataggtgatttgatagagacgtgcaaatgctccttgggatagcatggtcgcactaattcaaatgcttattaagcaaatcagaagtctacttctcatctatatttatttcaaatctggtgatcattggttggtgttccacccgaaacaataaaatatgaatgaccaactaaacctttattatcaaaatttgaatacacttgttgcaatttggtgaggtgaaagtctgggagaaaagaatcaacatagtagtaacattggggacatgactgatgtgataattaaaggattttttttgtattgatggtattgtgatgtactctgcaactttgctctttctaaataaactaatggatactttggccaaggttgatatgaaacagaacatgtaagtcacataagaaaatgatagcatgtatgcatttgctgttggagttttgatatcattcagatatatttctagtaccttatattttcttaacatctcatgtataggttatctggaaaccccatctgcacatctccaaatcaactgaacattactcagtactgtcaatcagtgccagttattgtgcctgacggttctgcaagtaatgccacagtttgtccgccatgctctactgaccttccgtttgaaaacatactgatgtcaccaatacgatgtatatgtgctattccactttatgttgattaccggctaaagagtcctggattttgggattttgttccatatgaaggacagtttcaacagtacttgtcatctggactttcattgtcttcttaccaattagaagtttctcaatttatgtgggaagaaggcccacgggtgaagatgaatctgaaactgtttccaaataacactgcttattttaataagagcgaggtgttaagactgagaggaatgttcacaggctggctgattccagactctgatatattcgggccctatgagctcctcaacttcaatccagggtggtataacaattgtatgctatattgactctatacatttccttcttattcttgtattggcatttatctgatttgtaggggttttaaatattcaatatttgatttcaagtatagttctggatctcaccaggattaggatgtctatggtagttaacatgcaaatgaccagtaactgtgagaataagtatgtgaaaacagttggtttgatctaagtaaccaagttatgaaaaatgatgtcggttgtaatgggtgcactatttccactgtgtaatgtctagtcagaacttaacaggaacaaccaatgaaatttaataccctgcctagctaatctaagtttagggactcacaaaattcaattcagagagtcaatgaatttccattcattcattggcatttcaggatttcccatatcattgtacatttggtttagtattcacatttcaacgaggttctcatacaaatcctgaaggaccacccaaaggagtggtgaatcatgacaattcttttactttcttttttatccatccatctaaaagaaagttttatttcttatatgccacaaaaagtttacaaaatttctcattgtcccaaactcctaatgacaaggttgctcctggtccagatgccattgggacagtgggcgatataagggatgaggtaaactgaataataagttttcagactaggatggctgatttggaccttataatgtagagaaaccaaattcaccatttacacatagcttgaggaggacatttgtccccattaatagtagatgcttactgatgtgtcagataccctattccctaataatttgtatcaaccctctgtttccaaagtcaggtcgttttagagtggttgacatgaattaagaaagctgttcaaatgaccttgttgccctgcaactattatacatttaaaatgatacctcatttgtacatgagtggtagaacttaattagcataagaggaatttggaataagaggaactattatacattgaaaagtgcctctaagtcctataacatcttacatttggaatcaggggagtaagatgtaagcatcactgcatcagaaggtggtatactcttgcatcacgacatgccaggccacaccgccacacttgctggttgttgcctgtagctgggattgatttcttgatttcttccatcatccagaagtttcaattacttgtaacttgtgtttcaatgtacccataggggctggatccctggatatacaagagatggctttacagaaagaaagcccctatactacagggaatacactctgcacatatactacttaacaagaagcatgcatgggtggtttctggatatactagagatgaattaacagaaaacaccttacagtcctacactacaggaaaaatacactgtgcacatttactactaaacaaaaagcacttgtgtatggtcaagatatagtgagtctaatgattcagttacagtaccatgcagttcaagtttaattccataattgttaacaatttttcaagagagtaatcttatattttcttatgctatccagtatttccagatcgtgcaaagtccagcctaagtacaggtgccattgttggtattgtcgtggcagcgtttgctgcagcagcatttctttcatccctcattactctcattatactgagaagacgttcaagatattcttcaaaaagacgctctggtaaaccctccatttccgctatcttcaatgaaacagtttctttttttattgttatgttttccatattttatcagttatcttctgttcaatcttcaatatgtcatttttttatcgcatttgcagcaaaaagaattccaatgaagattgatggtgtaaaagacttcagttttcaagaactgtcacatggtacaaacgactttagtgactcagcactaattggtcaaggagggtatgggaaagtgtacagaggtattctctctgatggaacaatagtagcaataaaacgtgcgcagcagggatctcttcagggttcgaaggagttcttcacagagatagaattgctgtccaggctgcatcaccggaaccttgtttcattgcttggttattgtgatgaagaagatgagcaggttgttcctggtacttttttttttcaatagaagtccagggcattagttttgtcgagcgttgaaatattcaagttctttcttgttttcaaatggattataaaaggctgatatcaaaattcattgaaatacattcgctgcgttgaagtacataaatatgcatgcacatgttctcagccgctatcagattttattttggagaacaggtaacttttcgttacctggctttgggagaaagccaaacagaacatagttcagcctatttcagataggtgtgctggaaaatggtagagcagttcagtgcattatttttgttggctagtatattatttttgaaagttcatatttgaccaattttaacggtagaaactgaacagctgcctatcaacttctgttgcggagttggttgtgaatagatagtacctcacatttggttcaacattaattatgatataaactcatactgttaagcatgtattgcagatgctggtatatgagtttatgcctaatggtactctacgtgatcatctttcaggttagaactttatttctgtacctactgacaaagctgctcttcataaaattttaaatattcattaaacagaagtcaacagataaaaatatcataaacccgcagtttctttgttagctagcacgttcttaattactagtagaagaatattagcatcttgtgctaagctccatggcagtgctatatatcgttacttctgaagttatgttgctgttatttctgtgtacctagttgccctaacaattgtctcatgtagcagctcgatcaaaagagcccctaaattttcccacgaggttacgaattgcgctggggtcgtcgcgaggcatcctctatttacacacagaagcagaccctccaatatttcaccgtgacatcaaagcaagcaatattttactggactcaaagtttgtcgcaaaagttgctgattttggtctctctcggcttgccccagagccagaatcagaggggattgctcctggtcatgtgtcaactgttataaagggtaccccggtgagtagctatgccatctgtttgtacatgctctgtgagcaactagttgagcagaagtctgccacatttgccagcacttttatcagtttttacttcagttcatattctgatgtctgatcccggtgttgtgtgcaaccgcatatggtgaatgtgaccagaaacttgttcaacttaggttaatttgattaatggaaagagaactataagttaaatgtcattgcaaagcttgattaattaagggattcttgagcgaaatttcttactattaccaattgataaggattagcacaagcaaaagcaactattttgccttgttttaagtttccagctaataataaattgtttaaagcacagtgttctgcaatggtgttgatggtatatattcctttctttacaatcgcagggttatcttgatccggagtatttccttactcataagctgacagacaaaagtgacgtgtacagccttggtgttgtttttctggaactgctgacagggatgcaacctatttctcatggaagaaatatagttagagaggtatagatttcatgcttccttgcatacaattttgcttatatttcattggaaaatcacatgcggtgcacatgaaagagactgaagtgctccctctgtttcttttttttttctttgccgggtcggctgaagacatggccggccaaatgttatgctctctccgtttcacaatatttggctatttcttggaagtgcaatatgcttaatttagagtgaattgcataacggggcacctagttttacctacgtttcaatttgggctaccccttaaccaatcttttcactttagatcatctttcttttccttttgttttcatcttggacacctatctttcttctccaactccgctatgttagggtctgctataggcgagtggtggagaggtcaacagtgcatgtggtggagagattgaaggcatgctaccattagttgctctagctctatgagaagaaagatataggaggagagctagatgagaacagggtccaaaataaaacaaaaaggcaagaaatagtagtctaaagtgaaaagtttggttgagggttggtccaaagtgaaacacaggtaaaaataagtaacccaatgtgcaatatacttaatttatactccctccgtccctaaatatttgacgccgttgacttttttaaacatgtttgaccgttcgttttattcaaaaacttttgtga

SEQ ID NO: 23504 - DNA, 25069 bp, Oryza sativa
aaaataattaataattacttaaattttttgaataagacgaacggtcaaacatgttaaaaaagatcaactgcgtcaaatatttagggactgagggagtattatttatgtaaactacaagaatcaagtgtgtagtgttttgggatcatactcctaacataattcttgaagaggttgaatagtcctattactactatatatattcgttgtactaggatatgtcacattcagtactagattcgttttttatgggacggagggagtatgcactagaagtagtaaattgatttgatgccctgaaactaattacatatataaatgtttgtgcgtgtaggttgttgcggccaatcagagtgggatgatattgtcagtggttgacagccggatgggatcgtacccagcagaatgcgtggagaagtttgctgcactggcactgagatgctgccgagacgagacggacgcaaggccgtccatagtggaggtgatgagggagctggagaagatatggcaaatgacaccggacaccgggagcatgtcctcactatccttggaacctagcaacacagccaccccatcgtcgggatccaggatgatggtttcatcgtcatctggggttggaaatgatgatcaccatcactacaacatgtcatcatccgatgtctccggcagtaacctcctcagcggtgttgtacctagcatcaatcctcgctgaacattatttgttatatactccatagtgtaagacacgcatgtatttaaagatttaactttaaaaacatctgactaacaagtagtgtaatgtaaatcgaattttatttgctgaaaataatatcattggattggtatttcaatatattttcatatgttataattttgttgctacaaactctatatagtgtatgagaagtttataagttaaaaattagttttgtagatggtgtcaagtttgtacttgtacgatcgataatactccctgtacaatatactactttgctcttgtgatagctagacgtacgaatggctttgacctcctcacatcgggcatatgtgtggtgctcgtccggtccaaatgttgtctgccttagtgccttgtgcatttgttcttaaaccgtttatgggcctttcttttttggcaacaaacagaactttgtttgccctggaaaaaaattatacatacaacctcatatacgaaactttatacatgtaaactttgtacataaaactttggtatgaatataccaattttatacacatgaactttacaccggttttcaaagatgtgggatacgttatacccgatttggcccatattttctgggccgtatctggatttcattcacgtgcggcccaagaatgggattgcgactttccgttccagcctcatcctgagccacagcgagccgcgaaaaattccgccgccgccgtttcgtcgacctcatcggcggccatgctgctccgcctccgtccgccgccgcagccggccgccagcctcgcatccttcctccccttctcccccttcaggcgcttcctccactcgccgtcctggcgccctcctcctcctcctcctccgcgccgccaccgcctcctctccactgccgtcgcctcctcctcctcctcctccaaaggtaacgctgctcacctcgtagtggtcgatggggatctgagtattcgcgaccacatgaaacaagcgaaaacgattctaattgatggatgggtttctgctattctggcattagtctcgacaagtcttgaggagcgatacgatgtgattgtggttggaggaggccatgccggatgtgaggccgcgcttgcgtcggctcgtcttggtgcgcgcaccctcctccttacgcttaacattgatcggattgcgtggcaggtctaacactgagctccattgcaatttttcacttactagatttcttcatttgtgtactaccatatccttccattagaccaaattgtactttctttatgattcctgtatcttggttacaaaagcaaagttaggtagtaaaagatcatatgctaaaaatatgtggtcattgattccttgtggcatagttagttaaaatctgcaatcatataccccatacaacatgaagcaagcaattgaaccatgtttcataagacttgtataagtgcatgtcaaatccacggatttttcttagaaaattatgatatggcatgtatagtggatgaaatgcttacatacatacatttttggaactcatagtacaaggatagtttccaacgtggtatgtcctcagtctaggctataaggatcttagcaaatcaacctttttaacaaagggaacattgtgttactattgtaatatggctacctgtcctaactcttcttttattccttatgttgcatagccttgcaaccctgccgtgggagggcctgcaaagtctcaacttgttcatgaggtagatgcccttggtggtgaaatggggaaaattgcagacaggtacatttaattggttcattattttagatagatagattttcttttcccctactttttggacttttagttggtgtgtaggtctgagagatgaaacctgcaccgaaatcctcaaagatctattgtcatactgattacttcatctcttaggtgctacctacaaaagcgtgtgctaaacagctcaaaaggccctgctgtacgtgcactgcgtgctcagactgacaagagggagtatgcagtagagatgaagaaagttgttgaaaggtcaatatgcactctcgtcttttatcagaatttacaaactatattcgaatttgtttgccttttaggtaaatcaaaagacaccaaactactccctcctgatttctgaataagagcgagcgtgctgtgtaaattctgaattggctggagttattcacgcgtttcagatattcttaagttgtacatggttatccacagagtcacaaggcttgtgttttattagtttaacctatgaagacaacttcattcatttgacatgtgttttgattggtcctgaccaaagactattgactagatgttaattctaatttcttgagtagaggtgaatctgtttctgcatatcttttacctataaattcaacaaatatagttgatgtgttcttgtgatatctagaaatatgttgttgttgaatgcaggtactttagtgtaatatctttcatgttatttactgattattgcatatgctatttttcagcacacaaaatcttttcattagagaggcaatggctacagaggttatgataggccagaacgacaatgttgagggtgtccgcactttcttcggcatggacttttatgcaccatctgttgtacttaccactggaacattcatgagtggtaagatttgggtaggtaggacttcaatgcctgccgggcgagctggagagtcagcttcacatggactcactgaaaacttgcagcagttgggttttgaaactgaccgcttaaaaactggcacaccaccacgaattgatcgcaggactgttaacttttctggattggaaccccagcatggtgatgaagaggtatggaacatctgacaatatgtatgagtgaagttttttgttattcgttatatacaagtgtcatcttccacttgtatctgaaaatgcaaattccgtcattcttatatacttttgcttctctctttcatttgccactttacatttcattgttaaagcaacgccttttgtactcttattagtaagatctagaagcactgtgcttctgttgtgacagttaatttggtttctctctgattagaagtcaaaatttcaaaagcaccccttgaatacagtgttcgttttatgtaatgattgatcaaagttgtgaacccttgtggataattgattcttttgctatcgatctggcacagaaaatagattgaatggactttgcacaatttgaaccttcttgttcaaatatttccaaatgtatgtggtattttctccgatagactttgaacaacatttcctgcacctgtagtatctgctgcatactttgtgcacttagttgcgtttatgaatctatgacttatcagctgcttaagtttgcagttcaagtttgctttgaccatatatgtaaatgttcaaaagatggtttctctttaaacaggttggctggtttagttttgatcctgaattccatattgagagggaccaaatgtgctgctatttaacaaggactacaaaagagacacatcaaattgttagagataacttggatgaaacaccaacttatggtggttgggtagaagcaaagggaccaagatactgtccagcaattgaagacaaggtataattctaccatctgagttttttagtttgttaaatggcagattattctattttagtacgtgtaatcaaacttattattgctaaggaagaggttgttcacgttatggcacaatcatgaggataaccagactatctttgcttcagattgtaaggttcaaagacaaagagtcccatcaggtatttcttgaaccagagggcagagatgttcctgagctttatctgcaggtcaatctacatccagaactccctctatccattcaacatattttatatcatggttgtatttattaatcatctattatggttctcttgtcccctattttttaaaaataatgccttctgcactgttttgcactctctagtcatatttattaatcatctattgtggttctccaatattctatcccccattttattgaaaataatgtcttctgcactgttgtttatcccaattccgaccactcaagatcatttgtacatcgtaagcaggggttttccactgggcttcctgagcgattgcaattatcacttgtgagaacactaccgggactggagaattgtgtgatgctaaggccggcttatgctgttgaatatgattacttgccagcttaccagtgctcaagatcacttatgaccaagaagtttgagggcttattcttctctggccagattaacggaacaacaggatatgaagaagctgcagctcaggttaatttattttctttgctgtgtttatatggttgttcaacaagtttttttgaatcctaagcttgcttacttttgtttacagggtataatttccggaataaatgcagctaggcattctgatggaaagccacttatcattcttgagagagaaagcagttatattgggactctgattgatgatcttgtcacaaaagatcttagggagccttatcgcatgttaacaaggtatgtttttttttctgtacgaatgctattagtatgatggttgtatttttcttttttagaaaatgcaggagaggtgtgtttcatttcattaagaaggaaaaaacaaacacccatacaatcagggctcacaagccctccacccaaacacacccacaaaaacatcacacaaggtgacgcacggccaatgatggttgtattaagctgaagcaattggtgatataactgtgtatcctaattagtactagattatgtgttactctgagaagctaagagtctgtgggcgccaatttgccatagaataatggtcataattctcattagataatgtgtaatcaaatgaactatttaaatggaggggccaatggtaacctgattagagatgtgttgcaataggatgttaatttttgatactctcttcggctaaatatcagaaacatgctatgctttgtacattgtgtaattcattagaaactagaaacttaacacattactagttcaatatgatcagggaaaaacagtcagccggtaagtggctttaccagtaggtactggtagcattatgatttcttgaatcataactttgttgacctttttttttttttgttgctacatacatacattcagccgttcagaacaccgtctattgcttcgagctgataatgctgatagtcggttgactcctttgggacgagatattggtttgatagatgatagacgatgggagctttatcaatcaaagcaagcccggattaaagaggaaaaagaacgattgaaatctacaaaaatcccaggtaaattctatcttttttgaaatgcttcatgaattcatgccaagttttaaaatgctagtaccaacatgcacttgctcagtatagtcactagcatgaattcagatgctctaactcggtatttccgttctcaggaggtgaatttgctgctgcggttacctctgtatccaaccaacctgtaaaagaatcatctacacttgaagccatactgaagaagccacatgtacagtataaacttcttgacaaacatggatatggaaatgaacatttgtctcgaattgagaaagaatgtgtggagattgatattaagtacgaaggttttatagcacggcagcaaagtcaattgcagcaggtaatttgctttgtggatcatgtgcatttgtcctacttcctaagatgcacttataagggaggctctttgaactgaaagaaaaaatgtgcataaacatttaagatgtaattcaatgcatattgaggaacttgtttagctctttggtagctgtattctgttgggcttcccaaattgggagcactagttgattatttatcagcttttgtgtagctgtgttctgttgggcctcctaacttgagagatgtagttgattatttatattcagcaatgtaatatagaattctgatgttgtttcatattcctttgtttaacacctcttgttttttctacctagaagatatgctgacccctcgttttatttttttctcttcatcagattgtaaatcaggagcacaagaagcttcctgaagacttagattatcattcaatgacaaacctgtcacttgaagctcgtgagaaactttcaaaggtgtgtgatcttcttcatgttaagaaccttatatagcagatgacctgtcaacatatataaatgaaatgcattatacggttctctatttgttgacacatgttatctacacctcagtcatctgagataatttgtttttaaaatgctttagaattctcaatatatcagctgctgaaggttctggtgatcatatcttgcctgaaattgtgtcgtgcacacgttatctaagttttacaatttggcaactgaatatcattcatgatctgtaagaaattcaagctgctagatttgcatttaatacaactaatttttttcaccgtgcaatgcaatttatattatgtggtatgtttaggtaaggccacaaacaataggccaggctagcagaattggcggggtgagcccagctgatatgactgttcttctcatttggatggagagcaaccgtcgcatggctaactacaagagacagcaaagcacgttgagatctgctgcgaccaaggcagatgattcttcagacgaagtggttcatgccagtgccaccaatgcataattgagcgccccccgactatatcaaccaactgaattggaccactggacttttctgagccaaaaatgtgtactctctgaagataatttccagacgcctgtggaagagttatacaggacatgcatcaaggcaccttttgctacttgaaggaagttggtggtggcctctgtcagttatggtgtttctcccctacgacgctgaattgctgatgtggttttagaatgtcggatcgtattggtaggatttactatatctttatagtggataagaatgtaaagagcgacaaaaatgaaagtggtagagcagagtagcaatgtttatgtatatatacatctaattcgcgaatgcaagggagcaatgtcatttacagagaagtgaatggtgtatgtaatctgtaaacagaatgagtataaagaggttgcagtatcactgtgtcctatcacagaagaggttgcagtgtctttgtgtcaattgaccattgctgaactgaacaaaacgctactagtttgcaagtggaatgtgcagaatgagtaaaatgctggaacttctgaataacaaacacatggatacactaagtaatcaattataccatgaaatgagcaaagagtcagtaaatcaccttttccagttcgcaagctttatttcaaatcaaattgacagggtaaacacaaaacagaacgtaaaacagattgaagctagaatgaacaagtcacttaatgaggcaagtgttatgtacagaataaatgagtaacatctgaaacttctcaataatacatcattagtctactctctgtactcagctttcagcaatttagcaaagagtcagacaacagtaagaatatatggtctatcgataacattaacatcataggtaagttggatatcagtaagaatctatggataacactaactttctatctaccaccgtccactgtaagaactgaatgcctaaaccccaaattaaaccaattactctacaaaaagaatcccagcactgtcctcattcaggacagcaaccaaaaaattctcctttgtgcatgcaacaagctgttgaacctttgatcatctatcacacacttctgtgtaaaacccatttctcggcagtcagtggacccgggcacctcgggttctgatgcttgtgtacttttgcacattttcctgggagaagctgacgatctggtgcagcacagggaccaacccgactggtagagtagctgaagctgcaagatgggcatgttttacaatctcatcatgcttggtcttctcctcatccttctttctactcatcttctctagctcgattacacggttgtcatggctgtggtgagtgttctccatgactgcaaccatatcaagactggtactcaacccaagttccctctgcagaactttgcgccttttgttataatctcgggaagcatgatcagcttttcgtttctgcctgtgctccttttcctgggtcttcttgtactcatgcacaagcttggagaattggtcaattgtcttcaacacttcattcttggaaaccatctcaatcacttggagccaatcatttgatatgacaaacacaggcggggcgcctagcttgcctggggagaaaggcggggcgccatccggtgtgttttcctcctgcacctcaggctcagtgagccatttcctcagccatccgttcagtgcttcagcataagacctctgtgagctgatccacttgttgaagcagcggtaccattttgcaagctccctctctaattctactgtggctactgcagcagcattggattggctaatggtcactgccttgatcaggtgcattttgctgtcctgaatggccgatagctgcttctcgtgacacaatagaacagctttccacattcttctcaatctgcactcaagacaacaaattgtattcattagatgaaactgtcatcagggtgaagtgttgaagaatagtagtacaattagaaatcatgaagtttcatacccaatgatgagatcaacgagttgaggatatagctcttcatctcgaatattctgtatcttcgatgagaaggcattggctgttctaatattgatggtaatcctggattgcaagttccttactgataacctggtggcgtcgatcgtagttgaatctaatcctcgttcgtccagagattttagcctcctgtacttcttttcataaagaatcctcagcttctcttcatcctagaacaaccacctaaccatcaaacacgtgttcggcggtaaatcatatagcatatgaattaacacctatgctttgttctatgatgcgataactggtgcagagattatgtgtgtaccttaatctcctggtaaagcttcttttcccaagcacatagcttctccagagttgatgagagacttccagcactgtttcttctaccagctactgatggatttgatgaagtgctggcctttccgctcaatgttcttgactttctacgtggcttcggcaggcacgaagatgaaggcacggtcagagatagaggatccatcactctggaagacaaatctgcagagacaacacgagaaaatctataaatgctctagcacacattacctagttgcatcaaaatgatactggtagctagtaagaaacacaatgcaaatgcattacccacatctaagaactcggggcgtggaactctgggggggaaccttccccacctcaagaagcttggaaacttcttcgccgcagttcagcgcctcatcgaacctctccttgatctcgtccatggcctccatgacactcctgttcccctggtgaagcggcgagaacgactcactgctcacagcagtcgactgcacagacttgccactcccaccttccccctgagcagcagcaatcggttgctcaatgccatcgaaggctatacctttcttcttgctggtggagctgccattgttgtcaccactaccactgcccttcaagctggcattctctggctcgccattgccaccggatcccttcctctgcagcagcttcccatcagaagcctcccccttcgagctgacgtctgaagaaattggtctcttccctttcccaccttgatcagcaacgacggaggttgatggtttggatgccttcgccttcgcctccgccgcctcgagctccgcctcgtcctccagctccgggatcccctccaccctcctcagctccgagtaattcgggctattggaaggcaagttgccgccgtcgtggcccttgtaatcctctatgaattgatcgtaggaggtgaaggggtcgaagaagtcccacgccgcgacctccgcggttggcggcggcgtcgccgtctccggcctctcctccgcaaccacctcgccgtagggcccgtacgaatacgtgtacccgtagccaccgtagccaccatagctggcctcgccattggggtcctcgtacaccgtggtgggcacggtgggagagttcctcatgtagtggtagtgatacctcgtcgatgacgcggcggcggcggtggcgtgtttggcggcgccgtgcgcgtccaggtcctcgtcggagagggtgtgcgagagaggcgagacggtggaggacgaggacggcgacggcgggaggctcgacctggcccggcggccgaggcgtcgaccggcttcgccggggacggcgggagggtgagcaccggggaggaaccggacggcggggtgcccggcgcgagcgcggccgccgcaaaccgccgcagcgcgcccccgacggcggcgagcgagcggaagtacgcggcgtgcgcggacgccagcgcgtagcgccggtcggccgcggcgcggatcagcgccgcgcgctcgcggcacagcgcggccgggtcggcctgcgcccgccgcggccgctccaacgaagacgacgacgcccgcgcccgcgccctcgctgcggcgaacgcgtcgtgcgaggtggtgcagcccatgcgtcgaacaccctacctgagcagcagctgcaggcgcggcgcgtgagcgggtcggtgctgtgctccggcggctcgtcggcgtccattacatacacacacacactcggacgccgccggcgaggcggactccgactccgactcctcgtcggcaccggaaattggcggcggaattgggagaggaggaggaggcgccgcgagcgagaatggaaagagtagttgaacctttttttttttctctcccttggttttcatgttttatgttcatctcctttcgctttcacccccttgtgtttcatttaatttagggttgaccactgagatttctttcatacggagtatttcttgtataagtataaatgctcgcaaagtactgaaattgcccagattgcaccgacaaaatttgatgaaatagtttgattagggaaatatggatttgaaaaatatacgaaattgattgtgcatgttccaagctgcatagagatactagtagggttagtaattaatcaaagtgatactatttggaggctatatcgacgttcaaaagaacatacattaaatgatcggcgagagtaaaagggttgcctttacatattaggacatgtttggaatgtggttagccctctatcaattggaatgatacaagacaaatactccctccgtttcgaaatgtttgacaccgttaactttttagcacatgtttgaccgttcgtcttattcaaaaacttttatgaaatatgtaaaattatatgcctacataaaaatatatttaacgatgaatcaaatgataggaaaagaattaataattacttagatttttttgaataagacgagcggtcaaacatatgctaaaaagtcaacggcgtcaaacatttcgaaacggagggagtacgtagtagcaaaattttgtgtaatagttgcatggtaatcttttgatgctcataaattgatatcatgaaaagttttccaccgtatcatgtgtttaggcacgttgtttttatttttaaacactgccgtatacaccttcttctcgaatcttaacttgtgactaacgaatcgataaccccacttacgcaaaaaaaaagctaataagtataagcatagcttaaaaaaaagacatgacacttcgcaaccaccgttttgattacaaacatttggttccatggcttgtccaatgtgtccaagttttagcagaatgtggtagtgaaacaagagtagtatacatttttgcctggaaaaatacattttatgttagtacatctctaatgtgtttcaaaaaaaaagtagtattttttagatatatataaaactataaaagtgagggccctttttaaggttacataacaatgggaggatgcatatgcaaaatttattgtagcaggtgtacttttttttccttccgcgatcgatcgatcactcgcatggacgcggaaacctcaagattttcgtgtacgccgccgccgaaatcaacagcgaaaattacgcaatttcttccatccattggaccaggctgcgtcgtctagatgctgcagtacgtgtgttcttgcttttcagacatgttcttcgaaacagatttgaactcctcttcaaaaacagatggagaatttcagagccaattcttcgtcgtccttgctttgaaacgaaggaacaattcatggcaaaggtgttttgactcctctctcgttcttgctcgtgttgacaacttagtataacagctatgcctacacctagttagtgctaattaaacattattaaatctttaacggtttagaacaactgtgctacaacaaggtataaaaaataaatgcgatgtcttctgtataaacctccaaatggatctagtttgtccaggtcagacaagttcagtcaacagattagaggccaaacaagccacatcaagaagtagaaactcaacatatgaaaggtatatatgaacaatatagaattcgttacgcgagaaaaaaaagagagctaatcaatcgaagtgaattactgagaagactttgacgcatgatctgaagtcatctctccttcgatcgatctgttagtgagttgaacctgacatcagttggagtaataatcaagaacaattggacatactaaaaaggaaataagatttggtgttagttgtgctgctgatgacgataatgggaattaaagcttgcctacacctactgctattcttaagaacaagaacaagaagtgcaatcccttcattttttgggaagaaaatggaaaacgagaaaaatgatatataaaaaaaggcatacacttgttaaataaattatgagggcattgcctcaattttgctggtatatactgtactatatactactactagtagtagtacttattaaagtttttgttaattgacatgtcctagtattattgatttgtacggacttgaaaaatccgtagcaagaaaaggatatgggatctcttaaaaggtatgaggttgatatggtatcccttgtggcacactgtgctttgcttgttacctgagtgtgtttttattattattctttttaataaaggaagtactcttcctatttcgtattataagtcatttttactttttctaagattgtgttcttttcttgtttcacttttgtaacttcctcatttattataagcatgctcactaaactattaaatggaatgtcattaactttttatataaaagtttctttaaaagacaaataaatttattttaagtttataaaaaatcaataattaattgatcatacgctaattgattgctccagtttccatgcaacttaatagctcagttgttttgcaacagctaacgcagcctctaagtcaaatttttataagtttgactaagtttgtagaggaatataacaactctatagtactcccttcatttcataatgtaaggctttctagcattgtgtacattcatatagatgaatctagacacacacatatatgtccagatttatgaaaatctatatgaatgtgagcaatgttagaaagttttacattgtgaaacggaggaagtatgaaattagtttccttaaacttaaatatattttgataatatatttgtttggtgttgaaaatagtgttatatcttttataaatttgatgaaacttaaaataagtttaactaaaaaaaatcaaaatgtcttataatattataaaataaaaggtatgtattactttggacctatacgttaaatatgtacgcaactatatttacgtgcattaggatttaaactccaataaatcacacaaccacaattaatctactactaccacacgcttttacgattgtagccataggattaagacttaagaggatcagagaatcgtcctggtgtgaagggcagtgctccatcgatcgccatcgtctcacgctcatgcaacgcaaaagcaagtacacggcgacggggtatgcatcgcacaaaacacacgtcggtgtacacgtacggcagctagcagtgtgtggaatccagccaaaaagggcacccatcagaaccagatcgatatataagatcatccaacgaattactgcacgacagcccagctctatctgacgatcgattgaccaaatggaaaaaggctagatagtgcgattatatatgcggcgccggcgtcggcttgcttcaccattaattagttagtactccccctgattcacaatgtaaaattttctaacattgaccacatacatataaatattaataaatctagacataaacatatatctagattcattaacatctaaatgaatattagcaatgctaaaaagtcttacattgtgaaacagaggaagcagtactactatatcagttgtaaattgtacttcatctgtaccactttaaatgcaattataagtttttatatccaacgtttgaccatcctccttatttaaaaatttataaaaaaataaaaataataagtcaagcatagattattattcatgttttatcagatattaaataagaaaattttaaataagatggatgatcaaacattggagaaaaaaactcataattgcaccatgaatggagtattttaaaacatgtcatgcaattgtaggaccattaatttcgatcaaattaaacccaaatctcaagtcgaccagccttcgtgcggatcctatcctttattggtactccctccgttttttctttaaaaaaactcaacctccctttctaggttaagttttttgggacggaggggtagatgtgatggatgcatggtggcctacctgtcaaactcaaaactaattaccccaggtccaagtgacatcacacatgtagggattatgcatttccaaaataacttaatcttttatgcaacccacacaccaatagaaaataataataaaaactataataccttccactttatcaaatcttaatataattgtctctcagttgattaccccttccactataattatcctactttttaaaactccataaacaataaaatgactacttaaagatgatcttgttttggacaaataaaaggaaaaaaaaacaatcttatttctgacggagggagtacatatgctggctgttattggccttaattggtgtctcatcagttagagagttaggtcaccaacccacaagtttctttttggctcggggcctatatgtctctttttttgtgtgtttgtgttgttattaatcatctcaatcacacaatccctaaatggctcgcttgtctgcttcagatcatcaaatctgatcaattgtcagttaatcccacttaatcatatgaatcaatcactcggtctctcaagtcttctatatttgaagaacaaattgctaatcagtctcgatctctcaattatcatggaaaaacggacaaaacgtcatcgaatatcactctaaaataatactccattagtttcagttcatattataagtcatgttaggtttgtcttaagtcaaacctctttaggtttaaccaagtttttaaaaaataactaaatacactatacaaatttgatcaatcctataattaattgtttctacattttcttataaatttggttaaacttgaagagttttaaattagggtaaatctaaagtgacttttaataaaacggaggagggagtagaaaacatcacggtatgttattgaaaaaaaaattaggaaatgatctaatatcaaataaacagaagatgtgatgcttcaaacttaggcagctacctcaccatcttgtggagctagatggaagaccctcgagcgtttctcaatgtgttcttgaaacagccggcaatccaaaattggtatatatatataacacataccagaaaatccagtccagcaatttgcattattgacacatttgatctactatcaccatcgatcgatcaagacatgaattcaatacacgtagcgactatattaattaacggataactaatgatcaatgtgttttttttttgtataggtgtgactgatagatgtaccggttgtttatttgatgagtagttcactgataatgaagtgaactactcccagattgtgttgggtgatggttaggagtaatccctgctcaactatcgtacaagtacagtactaatgtactatctacccctcagtccggctggatctcgatcgactgatatacagcttgaaagtgagtgcacattatacacgtatgatcaaataattaatttcatgctactcattctgattaggctattaggatatatatctagtacaacataaatcaagttaaagaaataaacacgtgtacaatatttaagcccagcgaaattcgatcgacacacaggtgatcggtcgttgattttgaaagattgtatttttttttaagacaaggagtacatacaacttataaaccactcttggaagaaacaatggttatgcatattattgccaaccataattaaaggtttagcaatagatcttatctctgtctttaaggagtaattaagttgttattttgtagtttgcagtcgtctatcttgcaatatttgtataattagttgtaacttctaagcaaaaggcggaataaattatatattatcatacgttacttccgacatgcgcaaaacagagcatcatatatgcaatcgaagattagctatcacggtgtttctgtgttggtgcacgtgaagctgtggagctggattagtgatgcttaatgatgcaggccaactccgtcgcaatgatatggaacacaagttaataatttggtctactctggctagttaggaaggaataattattgtggatttcgaaaaagaatggtttaaggcttcctgtttgaatttaaaaaaatgctaaatatgagatatatgcatatcaaaatagagggggtgagatctgaacctaggagctcattagttgtccatattccctgaaaagtcaaaacggtttattagagaataaaaattaatttgtaagtaaaatttttatatatttgtttgttgcgacttgaagaccaatgttaaaaaaatacgttaaaaatatcttaaaattaattttaaaattaaatttgaaaattcaaattttaacttctgctttggcttattaggaccgatggggatcggctatctcacaccttatggttttagccggaagaaccccaccccgagccttttctcactctaattgaatcaaacttggtctagctagagtttgccagtgaattaggctagttcgtgcttctctaatttttcctcaaatatatctggtggttacagagtttcttcgcaggccaaagagccaatgacgaagaagtcaagcattatcgcatcataactgcatctacgtggatccaactgcctatactagctagttgaccttaacaatattagcctttgactttatattttaactttacatcgacgagtctgactttttttaaaaagaaattttctcgaacggattataattatagttatctaggagcaaataattagtattgtcaatccaggaataaagaaaattataaaatggtcagccatttatagagtcaactaagttaagtatttaaccgatcaaaaagtttagattattttgttttcactttctacttataatactaggacccaatttaaaacatgataattgaactgaacctatttgctggggagctcctacttgttgggctctttcttgtttatctgcccaaagctagctagcaactcctacaaaaaggatggcccttgtgtggcgtttagctagttctagactcttggcatgtggcagtttgggaccaataagatataattactgcttgaaaatcactggagtaagttgcaagttaacgcggttaattctatacctcaagtattaaaaaaaaaactactagtagttgtagaacagtagaagtggatcgaagacacacggcatgagcatgacttgaccagcggttggtttgtggctggctgtacatgtgtgtacgttgctggcttagttagttagcaacttgaaccactaatcacgacgatttgtagctgacaaagattatcatcggcaattgcatcttggcattttgggaacgagtcgtagtgtcattgtgtgttttctctcgctgtagtgaacaaaccagataacttaatcactgtgcggggatagctcagttgggagagcgtcagactgaagatctgaaggtcgcgtgttcgatccacgctcaccgcatttgaatttttaatgtcttttgccatctatctgtttttttccccatttctgtcactaatgtaaatttcagttcaccggatttgaattcgccgttctttccaccactagcgtgtttggaattcaccgctatcttgttcgtcatcgtcgtcgacggcgtggctgaccggtgaacagaccagtcccagcggccaaacacgtgaattctccagcgtatttccgcgcttcttcttcgctattgaatctctctctatctctcgtcacgatgagctcatgcccatgacggcatgatggttgaatggttgatcggccgttgctgggctcaatctgctgctcctgtttgggcttggttataagtccagttgctacatatgcctgaacaagggttcgaaacttcgaatacaaaactcattgttttcacacataatttcctctcataataaagagtacagtaagacgaagcacattcatgtcaggtctgggctgtttgttatctcaaagctagcacaggtttcaggtagatagacatataatcttgtgacaaacatatgcacttaggaacaatctgttttctctacaaactcaagtcacagcgatcttcagtctaaccactagtgatgaactgatggctgacattacactacatcaaattgtatcaagaaccaggaagtctatcaatgtgggtgaaacctgctactacctttaccagatggaaacatcgtcttacagagtacaggaactgagacaaatggtcagatgaagactgctcaaaacgaggcataaaatggaagctatcccatgaacccactgataccaagcttgtctgcaacgttgtacatcactagatcgttccaccctggcccaaataatcgctcgccaccaattataaatgttgtggcccaggtgagtagaaccaccgagaaaatggtaaagccaattgctgaccggacaacatctgcaaaagaagctaaaatgtgtaagaaaaatgtagaccacacggttaccacgaagttccataacatcttatgctagtcaggataacatatgcagtagaaaaacttgcaagacatggaaaactcaagagatgaaaagacatatgctcctcatcttggcaagggtttgggataacgctgtatttcatttacaggttgcagggttcagaaattaccccaaggctatggcatttgactaaaccaaaacaatcactttgaaacattgtgatactggatacccaattagttgaggcattttatcccttattgtctgaaagggaatcatcgaatttctagtctgcatgcctcatcaacaaatgaatactatgactacaaaaagaaaatatatctataacctctagaagtgtaagaaagcaaatgccagcacagagaaactgatagaattatctcttctcgctacaaagtatgtgatagtaatagtatcatggtgaaatatctcatctttactgctagcatctggaataacccagcaatgccactgaaaagttacttcaaagtctgttgaagttggtccagattaagatgccacaaaattctcattactatataatcctttttctttactctagtttaaaaaattagctaaaaatttctgcaaactggtaatgtgatgaacgacatgatgatcgcacaagaatgatgctgctatttcaagcaatccccgatttcaaagcattgcacatttgcactatcacgacctaattagtttactacaaactggacagattttgattaaatgttgatgctccaacttgttttcctaagtgtcaagatgaagcaaatgtttccctagattaaattacagcaacattagatttcaaggatcgcagattgttcctttggtgtatcttgtctttactgactttgatcagtgagctttaatcctaaattcaattaccaagtacacacactgctcagatttataggcatcaacagcttacaacagagtgacgtttattctggtgtacaagaaattcttttaatgccaaccaaataattgaaggtcaaaagagagcctagtggtcagattcattagatgaataataataactaactaactaaaatggttcaaaacccccttctcagagtggaaataaccatatcctatcagtatattctaaccaagatagggagtagcagacaccgaatgtgccccaaaacaactacaacaaatcattaacatgaccaagtcgatctttagtaatcagttgccactaacaagtagggagcaacaccctccaaggctccgttagcagcctctgattatagcactaaattctacaccaatcaagatcgtacggagagtcttaagaccagctaatttctgaagaatcgctaaattacagagtagcactcccatgtttgcacaaaattagatacaatggcaatatatcagttaacagcttctgattaataaataataaggacttcattgcatcacagattcacaagatgggttactacaaaacctacgagacgacctagatagatccaagagcaactcaaaccacgcaaacgaaatcgcacaggtgatagatgatgagatcttaggaggcggcggctcacaggggcggattcgggagaaggcggcggaagaggggaaggtcgccggcgagcggaggacgggccagaagtagcagcagttgatggcccagaggaaggggaggcaggcgaacccccagaggaagaagcggcgagcgtggccctccgcctcctccagcggcagccccaggggcccgtccacggtggcccagactggaggcggaggcgcgcggcgcgcggcggcgacggatgggcggcggccggcggcggacgggcgggggaggaggccggattcctcgtcttcgggcactccggcaacccttgcctccatcactgtttttcctcttttctccccttccgcgctacttctctcctttttgtttgtgtgcccctctaaatctaaatctactgtacatcgtaatcgtaatcataaaaatctatagggagtataattttaaattaaacgtcacataaacttaaaaatctttcaaattaattttaccctgcttggtattttgtattgtacgcgtactgaagaaccccatttcatactagaagacgctttgacttttttttctaaatcaaatttcgtttgaccaaatttataaaaatgagagtaattttcacttaaccctatgtattgtggtctaaattgcacaaatcatatagattttagcatgtgccacttaaccctcagtattatagctataaagtttcataaaacaacactatcgatcattttgattttgatattacaggcttttgagttcttcaatcacatcttaaatttatgagtttttttatttatcatataatacatgcttgtaagtaaagccttttaaaattttgatataggagtatgtaaattgattaaggtgtggttttatgaaacttcaggactataatacccgaggttatgtccatctgctaaaatccatatggtattgtataacttgaaccagaataggtgagtttatgaaatttactacaaagaaaacctagaaatctatcacatcaaattaatttcacaatccatcattaaatacacttttatgacatatttgttttgtgttaaaaaacgttgttgcgcttttttataaacttagttaaagttaattaaaaataagttcaaacgccttataatatgaaacggagagtattaattaacccaacaaagaaatggttggttgtgcacgtggatgaaaattcacttgattatactccgggttccgctggatcaaaaaggaaatttcgtgcgagtcttaagagattcaaatatttataaattccccctgcatgactgtttgaaaagcataaggttttatggttggaaaaattatatgaattgctttcgtttaacgtatttcaatagaaagaacatgtatgatctcaactgtcatttcattattatttttccttctaacaaatctaatgcatcattcattttaccctctacttctatcttattttacttcgagccagcaaatccctgtgtttcttgtgaaccatccatacatatttcaaattttcatgggattaactcgtaaaaataacatgcgttccaaaagagcttcataacaaaacaaggtggtaataacatgtgattaattaagttttaattattacaaatttaaaaactagattaatctaatattttagaacaactttcgtatagaaagttttcgcacgaaacacaccgtttaacagtttgaaaagcgtgccacgaatatcaaaaaaaaaatatcctctcttcctagaggattcaaacggggcctagtgatggatttgtgcgtacagaagaagtatgttcattagagtttaaattctgatatccgcagttacacgtacaatgagtattctttcagtagaacttttagttatttcatgcattacgaacgtgtttaaaagagacgttctcatgggtatgtgcatccgttagcctattctatatcagtatatctctaacattttttttttgaagcttacagaatacgatcagatggcacgataattagccatctcaaaaaatgaatctgaatagctctgaatatcatcacttaacttttgttaaatttttcagttcagtataattaatttagatgcggagcaacaggcaacagcaaatcgcctcatattgacatctatatacaacacattgtcatatatcacgaaccgactgaaaacatctgcagattaatcgtcggaagaaccaaataggggaagatctgcaatgcagggaagaaaacaactgaaaaaacgctagtctggcaggccaaggaccgatctcccacccgattgctgagctagcttgaacgcaaccttcgatcctgtgcatatcatattctctcgtagtcgagtttatccgactgtaaaaatagtgttaagattaagtggtcaaatgatggtacattctgcattttggcaatgctgcatgtgtgatggacttagagatactgtaattaccttgatgagcatgtaagttggcagccatgccggtggagttgggattccaacccaagcgatctgtccaaacatatgaatgagattcagaagtccaaatctacaaaatatacagaagaaatgaagtggcaggtgactcaccagggcatactcccctgtttcaaagattttgatgtccaaaacctgcacggtaatgacgaacaagattatgaccgtagctagaacgaagatgttcttactgctaggtttaattagctgaaattaacttcaggttcagtaagatgggctaaataattacctcgccacggtcctcgtatatgtagtctagccccttgaagaaaggcgggtgtccaactgacagatactgaatcaatgaaacaaatttttaaaaaaaatcatgtgcaggggaggaaatcatagactgaaattacagcacaaagagtagaaatgaatgaagcatctatgcagtagcatcgatcagtgtgcttacgttgatgctgttcaagtacttctccttgtcgacgcgcacaatctggcccttcttcactgtggcgcatcatcaaccaaatcaattggatgaaaataaatggattggttaatcaagtataaacaaaaaaacaaacaagaagctaaatggctttgatgcttgttcagaactcagagctgaaatgcaaagttgcaaagcgtattcattactcgagtagacaggtttcttcttgaggatcttcttcggcgccggcgcagccgcctggccgtctcccgccgccgccgcggcgccgccggtggcgggctttttctcctccccggccggctcggcggcggcggcggccgccttgacaggagaagcaacacgtctcctcctcctggctgacgccggccagcacgcggttggcgtgacggagaagagagcgcgcggcgaggagaggagagcttccatggcgagaagcttagctttggcaatggcaatggcaaaaagcaaagtgacgaagtgcacgtaaatatgtgccacatgaattgcacgcggcagataaggtgaccactgggcctgagctagcgctctcagttttgggccaactgtcaca

SEQ ID NO: 23505 - DNA, 8995 bp, Oryza sativa
  unsure (1)..(8995): unsure at all n locations
tgttgatggctcccctgaaccccttgctcatatctttggatcattgttttacctggctaaattatgttatattgaatggaacatcatattttgttctttctattggtgatatcatctctttttctgttattggtttggtgcttcatccgattatatatgtttttctgtctgaaggctcaatagggataattgaaaaaggagctccagcctccaggcaatggcgttctatggcggtgtgtgcaatattctaattgctaaggtcaatattctaattgctagggtcaatattccgacggacctaagccacaccgctcgcctcacctcaccggcgccgccatctccatagccctccccacgccgccgtgccgcccgcctcacctcaccgctgagccgcctccccatgccccgccttgctcccctctgccctactcctcccccaaaccgcatcttctccccgactctcccaagctcccaacaactgcatcggcacttcgtcaccgcgcgccgctggtttctccgccgccgcccaccccagttcctagccaacgtcgtcgccgacatcgtgcgcactccaaccgttgtctcccccgcttgtgcatgcctcgccgccgatcccgcctacacacgtcgctgtcgacgggggatacccgtagaccggagtattggggtccgttggtacgaggatctacgtaggacgacatcaagcaaacaaaatacaaggattatactggttcaggccccttggtaggtaatagccctaatccagttggtatgggattatatgatggaaaccacatattacaaagggaataacagaactcaatgataccgacgagaccgtagtcgagttggtccgactagatctcccggcgacttggctcctgcatgctccggctctgtaggctatggtgggtgtgttggcgatgatatttggtgccttaggtcttgcccagagggtcccttatataccgcgggtccgttgatctccaagtagaactcggagatatcggacccctcacgatatggtaaagacccagtcttgtccgagtagaactccttccatccgtagatatcatatctatcacgtgatagatttccttaatgtatacggaaactatccgtatacgcgcgggtataccgtatcagtatacaacgtacatccaaggatagagggtataccttatccgtaaccctgacagtagcccccgacttctgcttaaatgagctcatgctatcgatcgcgacttctgatgtcggaattgttatcgctctcatccggtcgatctcggtgtgaaaaccgtagagacaaagagccatcgacaacaccgcgtgaagttcaacggtcatgagtgaatttaaattgaagtctgaaaaactaccacatgcaacggacccaaaattttctggcggcaatctctctcctttccttggaatacgcaccattggaagtgcgtttatttaaagggattttggggatccatttgaagtccgtttgccagaaaactctcctgccttctagcgctcttcgtcttctccgctcctcgcaaagaaaaccctagctcacttccttcatcctgttctccggcgatcctccggcggcaatggaccttgagaagtcttcctcgaacaccgtgtccatgaagaagctgcaggacgacggtgccctccccggccacgggaccatgcagagggaggctggagatacaaaacctgaacccatcttgggcccatggttgtagtcgaagattatgtttcttgcggtttacttcctccgccttccgagtttcttcttcttgtcttgaatttctacggcctttctttgcttcacttgaaacccaactccatcgcttttctgggcatcttccctcgtctttgcaaggcctacatttggggtagtgcccttccttgacctcttccgtttttattacgagctgcgttggatggaatccaacagggtatctggatacgtcgggttccgacttcgggatggcctgaagtcgcgttacatccccttccagtgcccctcttctcgcagcaagtggcggacgagatggttctatctccagatagagaactcggaccccgccctagttattcctgaggaccagccagaaaagatcccagagtggactgctaaacatgccctcaccctcctcacctctgcatccgcttttgtcgcccctctccctcttgtatccgttaactacaaaattgatttcgatttgattgctcctaaacgttactccctcgcgcgccataaaatcccacctacaggacaagacagaaacatacatctgaagctctgctctgtacctcctctcgttggttcctctccgttatgttcctgtgctagcttctgcctctctggttctgatcatctgtgcgtacgggtgctcggggcgagaaggcctccctttttgttttgttcctgcgctagcttctgcttcccctgttctgatcacctgcgcacacgggtgctcaggatgagcaagcctctgaaactccactcgcttgtgtacctgtacgggtaggggggtgatcaagtttttgggtagtgcttttgcgcgctttctcttggctgcaacaactacttcctgcaacgccactcgccactgcatcctcttcgacaatgctctgcactgcgacatcttcttcctctacatcaatttccagcatgtcgaccggaggaggcatcaacggaggatggactagaggagatgagaacgacaacaccaacggaggcaacaacaccgacaaagcctcattcagtaccagagcgttctccgggtatgtgatgttcttcatatttgtgttatacatggtttttgatgatgcttttctagctattagcatgttcatgtttatcactagtatagatcctccaactatgcaaatgtcatgtttagtataatattcttctggattaaaatatgtcgaataacatccatatttccaacagcagataaactaataaatctaaatcaacttcagtgtcagaaaacgatgaggaggtgcaggtagagccatcctctttgttcatctaatcatcttgtgcttcttctgtccagtccacacgccttctgcatttccatcatcatcgaccatgtcagaccttgttctgcaacatctcttccatcaagtcaagccctaataattcagattagtttcaggttcttctggggagatgtttacctgtatgatgtattgctgtgtacttgtaaaaacgatgcaatgtaaatctgtggtaaagttatgttcgatttcactcgaaacaaacaaacaaaaaagttcggttagtgatactatcagttgcaaaattgaccccgtttgtccaaattagacatgaaggaaaggaaaggaaaggaggtcgtctgcagatcgggggctcacctcggattatctcaggtttgccggcgagcggagtcgaactcgatcgaaccctagactgatgatgaattgatgagtgaggaagaagagggggggagggaaatccacagctgcaagcctgcctttaattcggatctgatcgggctcgccgacatgcgcgcccaaactgttactactacttcaatttgcgtttacctgaaactaatttttgaaatgtgagactgattggagcttgttcaaaattcaaactcgtccagtgcttgaaactagcgatcctggattctgaaagttcacacatttcttgggcatagacagactgaaacaagtggaaaaggttttctttgtctcatgggttctttccattttttttttatcatcaaacaccacctttttatttagacgtttggctcagcaatgtcacgagtcaccaggtggtttacaaaaactgggagggggtcgatccaaacatcagactgacccgggtccctactcaccctactgggcaagatcatgggcacaacgattacatctccgaggaacataagagagaacaactttaacaaaatctgcttaactccagtgcaggtccaaaacttgcctttgggtgtatgagcgtgccagttgatttgatcttgcaatcaacaaaaaagaaagacaaagaaaccgcggttaaacccataaacgataaccgaccggctaggtgccgatgacatatcatttatctttgagccgatgttatatatgcatcgatcggcagccattaataagtaagaaagaaccaaatctactcgatcggctgtagatattaacgatatacaatctttatatcgatatatacttgaatcaagtgattgggatagatcggtcgccatgccgagacagtataaatcacttagatcgaaatatatactaacgagaagattatatatgttcatagcatagccgatcagatagatctagcatatatcggctaatactccgataccactctatgttaatatattaaagctagtaaaatataccaaacaaaagcctaatatatttaaatgcaacaagatcttaacataaatgacagatttaacatgtcaataaagcatatgaagaaaatatggttaaatcaggtaagatcggctgaaaccccgatactaccctaatcgacaaccaagaagcaggctagagattgagattctaattacgactcataagatcaaactcaactgatacagctataagtatgaaaagaaggacaatatctagacaatcaaaccattgaaagtgtcatagaatggtagataccttatataatctaagccaacatcggtatttaacctaatcggctgtcctctattggcagatgttagccgactgtaggttagataacgatattgccgaagattatgtaagatatatgataacttgacgaattacataaacgagattagagtatcataaagatggaagcactaatcccgataacgcaagccgccataacaagttttatctcttgttgaagatcgaaaccgatgcagctcaacccgaaagcaagaactcgtcgaaataaaacaaaagcaaaaagggtggcgatgcgccgagattgtattgaacgtgtgttagtttgattacatgaggctcaagtctatttatacccgagaattacaagatatgtccatctcggacacgactcttatctctaacaaactctaagataccataagtctttgcggcagacttttgcccaaatatatctctaaggaaattacataaaatatcctaattaatagatacaattgccttcttaggattcaatccgcgtgtggcaattcacgtgaagcacattaactcaacccgatgatgtacaccgagttgtattgtcggaatcggctgtatcggcttatccagtctgacttgaactcaaccaaccctggtcatagccgatttggactccagccgattcttactctgtttccgaaacgatcttcatcttcgattccgcttcgatctaatctttatccccgatactcatattaccaaatttggtcgttaacactacctcctttatctccttgaacaaaatacctcccgtcgcttgatcgtgagagttcgactggacagcactcaccagaatttttgaatcagtctccacttccaccttaggcaccccaaactcagctactgctttcagagcgaacaggcaagctttcgcttcagcgcaaagagcatcatgaactgaacataaactccctgctcctgctaacagcccctctccttcatgatttcgcaggacgaatccccagccacctgtccgtacaacccgaggctcgtatgaagaatatgaaagagaaaaatattgatacatgatactatctagttcgaattcgaatccgtaaaaaaaaatatatgttaagatacagaaagacttatatccgtccatatgtcccataatataaaacatataaaatctattaaaaattcacctataaatatgataaaagattagttaatcactattttacgagttcatatgtaatattgtataatttttttctcgatgtatctctttaacactttaattgcctcttatatttaatatatatgaattagagatgcaaatagatatccattactgaatctgattcataggaaataatttgacaggatacatgatgagtgatatattatccgacattacccgtatccaacttcaaatttaaaaaaaaatatatgttaggatataaaaatgccataatccgatgtacccgtccgttttcacttagcattactatcaacttcgatctaaaatgttgctagaatacatactgaaatatttttttagtactgtagattttggacaagtaaaaaatatcacatcctctattagtagatagtaaggttgtgtttagttccacgctaaaattgaaagtttaaagaaattggaacgatttgatggaaaagttggaagtttgtgtactactatgtcccataaaaaagccaatcctggctatgaatgtgtctaggttcgttggtaggattaggttttttatgtgatggaggggatatgtaggaaagttcaatgtaacgaaaaagtttagacccctttgattcaaaggaaattcataggaattttagaggatttcattcctataggaatttttcctatatagtcctttgaatcaaagaaattgatcttatggaatcctatgaaattcatatggaatgcctaatgccatgcaagttttggaggaattctaacatgaggtacaacctcatgaaaactttcctttgaatctttatctctcctctaatttttatgtttttcctgcggtccaatcaaacggccattcatgtgtttttcctgtgttttgcaatctctgttttacacttacattcctatcaaaatcctatcttttttctattcctatctttttttctattccattgttttctcattcatacgattcaaaggagctcttaaaatttaaagaaaaaaagttgaaatttaaacagttctaaacctttggacggagatcgtacattgtaccaactgtgaggtggttcagacgttgagaagacagaatgggccgtgtcactgtgagtcgacagatttgcaagaaagaaagaaaaaaaaggaggatcttgtccacatcggatgcagggcaggatagagaagaagccataaagaaagtgcatcatcggtcgcaatggataggaggataggatcgcagcaatagcaataccaacaacgactgacgagtcgacgggaaacggtgacgcggcggcctgagacgccctctacgctgcggctcaacgtgtcacctgatcaacacgccacctcgctaaccgtacggtcactaagcttccccaatctggaacatatcctctctccaatcacgcccatttccatttccagctgctgcatccacctcactgccgtcgccgccgccgccgccgccgccgccgcagcagcagcagcagcagcagctaagctatgagtccaacctggtcgatctagtcgtacataagggtggctagagatcaaccgatggtgatggttggctgcttgatcgccatcttggcgcgttcttgctggcacctcgccgtcgccgccgtcaagctcccggcgctgctctgctgcgacgccatgctctccaccgtcgccttcctcaccttcccgctccgcctcctcgccgccgtcgacagagagcgcaaggcaaaactcgcactggtcttcttggagatttttagttgctgcttttgtggttcctgaatcctttcttgatttgttttagctggatcggctggtgggggagatgcagaggcagatggagaggttggtgtgggagaacagggagctggaggagaaactgggcatggcgctcaaggagagcagggccatggaggagattcttgacgagatggaggaggagcacgacgacgcctttgccaggatcactctcctcgagacccaggtaataaattttaatagtattagtgttaagctgcttagagtgagttcataatggcggcgaactgatgagcattgtgcggcgccatagctgaagggccctcaagctggagaacatgcggctcatcgagccacnnagggggattnaatccanntgtgggtnacaagatagccgccggcgacggcggtgcacgcggcgaagcttaccggcgtccacgagccgcccgtcgaacacgaggaagaggaaggaccgagaagacgaagcagaggaagccgccgccgctcaggaggaggagggcggcggcggcgtcgcgacggaggaggattccgagatgtccgtgcagatgcggcggggcaaggcggtggcgcggcggcggagcctggtcagcgtgggcatggcggcggcggtgggggcggtggtgtgggcggcngacccgccgtgcctgccgctgctggcggggctgctcgccacggtgggcgtgtccatgtgcagcgtcgcgcgcttcttcctcctccgcgaggaggccgccgccgcgctccggggtggcagcggcaggccggcctcctcctcatccgacgccgtcgttctactcagcctcaactggttcctcctcggcgttctcacctcccccatgctccccggcgccgcccacgccgtcttcccgcgcgccgcccgcctcgtcgccccggccgtcgcctggttcactgccactgcgccactctcaagctagctataccccttgtattgtacacgtctcctgttcccgtatgctactactagtagaatatactgactaaaatacactttgtatttgtttttttttctcctaccaagagatgcctggttaatcatacggattaacaagcccttagacttgtctcgtgtgatactttcgcaatgcacaaatccctccgttacgtaatataacgcaatataaagcccataatataaggaattttgaagcttctgtacagattcgtagtttcgtagtaacaaatgtgtcacatctctcatattattacggtacggagggagtatgatcgagaacacctggccagccaaagatatgtattgaatgagaccattagaggcgaaactacgcgtggatatcgttttgagcaagaataatatgcacaagatttatt

SEQ ID NO: 23506 - DNA, 1927 bp, Oryza sativa
aaagtcatgaaaaataataacaatacatctatggttcaggtgtagtggaaactgcaatatagttgtagtcgactgtattcctgtccttgttgaatcgagtctctctcactgcaaccaacttgaccttccaccgctggaataaacttaccctgcattccagaaaaaaaaatatcatgagacacggggtagagttatgcaagacttcataaatttaatcatgatattaacagagctaaaaaaaaggctgacaaatcaatcaacagacaacagatatcgtttgcaatggaggggataaaattatttgaaatatgctcatcctaagaagcaaagatatgggactatgggagaaccaccatggaattactggcgaaacaaacaacacactaattcaaaagttacaacggcatttatgaatttattctaaccgaaggaaaacaaacttcattcttttcccaaaaacaaatagtgattgcatttgcaaaattaatagaacagatagctcaataatttatgatggaataattccttaagacaaagtaacaatgccaacgcaagtatatcttctgaattctgaccaaggtccattcaacagcttaaatagaagaacagttcaagagttgaacccaatgatgcacttatcgaagtaaagacgtggttcttaaaacgccagtatataaagcatacctttctggttcaacagtccttttggccagcatgagtgccaagaacacaggcaccattgcagcagctagatgcttaagagtatgaccgctaacaatttgatgggtccatttatatataggtttatctgcggcctcttctaccttagcaaggaggtaaaatcctggaattgttttgagaaatcagaaaacagaaaaatatggtgaggtgctgattgtgtatgaatttccagaaaaccaatcaattaacttggtcactgcgaatcaatttatgatatgtagaaatagattaaaatgaaaaccatttaagtatcatcaacagttattaggtgcagagaaatgatcaattgaatgattcataatatataggtgaaccacaaataccacatttttcaacctaaatgctaatgaaggtacatagatcaaatactattgatcaagaataacactaacctgctgcccacagccaatagctcgaatgtgtatacattggtggaattacaatagccatcacaggtattgcaatgcatggaacaaactgaattactgcatatgggcgaagatcgtcaaagaacctacataagagttaaggcagcaaaatggaaggtgtgaaagaagtacagaaaatatttctgaggaaggatggttaaacaattggagaagcttgcctccaatacatgatgcttagtgcaccagcaataacaagaggtgctagggactttgttcctgccctatcatcaaccctctcaataatgaaaatggccatgacagatgtgaaagcaattgtcatctacatagaacaagcaaatatgccatcctttaacatattaaatattgataaaagcaagggtgaaaattatgaactgatgacatgctttatgtctctgacaggcaattctgaagaaaacaagccaaatatactagagcgtatcaggcaaaagatccaagtggattagttaccctgttttgattcaagcagatcacacccaacagaacaacactatctaaacagggccatagcatattcagattatactacacaaggatctgagttgaattctatcccaccaaaaaaaatgtatgcattgacattctgagacagcttcaacataatggggtgtgtacaaatcctagagcaaggcaatgtaagtctagaaacaactcaccggcaatctgtcccaaactagtgtggcatcattcggtttgagatgataataggatgaaccaaaagcaacagcagtcacacc

SEQ ID NO: 23507 - DNA, 41796 bp, Oryza sativa
  unsure (1)..(41796): unsure at all n locations
cctccatggctacgtctcgagctcaagtggtgacgtgtccatgtcgtccctgcatgaggtgcacgtggccatacacgtatatggctctgcacagttgatccagcaggtttattttattgatttctttttcgttcattagcagagttgatcagatttcgttatctgatcaagtgctcgagttcatttcatgggctagtgaccctggaagattatggcattgggataatcatgagagatcagcgagcaggtttcattgcatttgcagttcatgacagtttcagataaattaagctctcatgtcagacagtcagcggctgaagctttgtgaacggttaaacgggtactgaagactgcgaatctgcaactagataaacaaaggaagaacatgtgtagcctactaatttatgccattttgttgtggctcttcgtgatatgatggagctgacgcatcagtttcagaaactgttgcgtcaaaagaaaaggtttcagacactggtgtatctgcattctgttgtgctgacgctcaatactatttctcactggaatgttatatacttctggaatattctgttgtgctgacgctcaatattatttctcactggaatgttatatacttctggaattttggtctagttttaatttccctctacagaagatatgatgcttattagtattagcagtatctgtaaaagtttcaacttagaacaaaacgggtccttctgtccaacggggacgtctccgaaactaatcataaatcctgatgacggtagtactcaaaactagtagtgcctaataacgagagtcgtaaatcaacaaaactccaaatgcaattcatacattgtcactggatatattggattcaatgccgatccgggtgtgagagcccacagaggcatcgtgatcgatcataattcgtaatgaactctgatatttaaccaagatcatatggacgctgcagatgcacctccttgacgcaaatatctctccctccctcatcgatcgatccatcgccggcgaagagctaccttagctattagtatcatcgatcatctccggcgagaagacatgtcttccacgttcaacggcgacgagttcgccccgttcttgggcttcatcggcgccgccctcgccctcgtcttctcatgtaagcatccatccacaaaaatacgaacactagccagctcgatcaatcgatcgtagctggcaattggcattgctaattttagagttttcttaggagggtgtagttgctctgttcctttccgctatttagagttgagttgagccgtcttttgtttttcttatgcaggagtcacagtaatcttttcttttgtttttcttatgccaagagtcacagtaatattttcttttagtttttttctttcttgacataagttggtctggctgattgtgtcgtgtaacaaatactttttttctgatgtattgatgtgcaatctttttacacgttagagaaaaaaagatcgtaaaaagctcgatcaaacgatcgatctgcaagtttctgcattacgaattacgaattgatggatgaaatttggttataattttgcaggcatgggggcggcgtacgggacggctcggagcggcgtcggggtggcgcacatgggggtgatgcggccggagctggtgatgaagtcgatcgtgccggtggtgatggccggagtgctggggatctacggcctcatcatcgctgtcatcatcaccaccggcatcaacccgacggcgatgccgtactaccacttcgacggctccgtccacctcgccgcggggctcgccacggggctctgcgccctcgccgccggcctcgccatcggcgtcgtcggcgacgccggcgtcagggccaacgcgcagcagcccaagctgttcgtcggcatgatcctcatcctcatcttcgccgaggcgcttggcctctacggcctcatcgtcggcatcatcctctcctcccgcgccggccagtcgcgcgcccactaatccattacatcgcatctctaattttatttatttttacagtataagtgctactacctctgtttcaaattataaaactttctagcattactcatatttatatacgtatatgttaatgaatttagacatatatatctctagatttattaacatttatatgaatatggacaatattagaaagttgtataacctaaaacagaggaagtattaatttttttactatcggtacagaaactacagatacattaattagttgtattgcaatgtacaacgctcatatcatggatgcatgatcatattgtactctgcagtctacagtattttatttacttagattaattatcccaatcaactctacaaaacattctagtttttgtgttgtgattatacgcagcgacgatagaacagataaacaaagagaagcgagttaatatgaattttctcgaattagtttcttataagagaagtgtaaataccatttgcaacgagtttccacacatgctgatcttggacatcttgaatcaacaccacctcttctactaaatcctaaatggatccaggtattcaacaagaaccaggaccgaaagccccttggatgtcagcaacccaactcctatttgtcaaagcttgtgccactcggtgtaaaacattcgactattcaagcaaccattaaccatataacagccggcaaacatgttgaaaataccaggtaaactgtcgataaattatcatcaacttgtcacattatacaagcaagcaagcacccaacatcgactttattctgttaagtttctcaattataactatagaatctagaaaggcgcagccaatgctccaactctatcgcggggaatgaggcgcaactctgagccatgctttagaaacacattgcctgaacgaaagaaagcagctcacatcagcgagtagaaaagagaatgtgtaaaacttaagtttaaaaaattcatggtactgcatatgcttaagatagatctttcttatgttactgaaacctaatttgagaaataagattactgcacgactgcattttaggctcatccataacccagcaaaaaggacatgcatgtttgggtaaagtatctgcaattgtgtttgctttgtgccacagcccatatcaaactcaagtagttcttttacaattgcgctgatacaactgtaaaattctagttactacaatgtcagcacaaatcaaatggacaattcaagtgcatcaataagcaatgtaatcttctacagtctactaaactatgctgggagcctgggacagcgaagcaggttgttctctaaaacaaaataatgtttcaaatttaaagaattgatagccttatacatagtagtagaaaacagaatccggaaactgtacctgcactttgctgtgggttgatgccaactccatctgcaaaagaagggacacaacattattttcaatatatggcattcagaatcactgcttcactatgagaaaaccataaggcttaaggatcagccatccatcactcaggtcaataatatgttatgaggatggctagcctaataagttcaaggataatccatcaatcactgtagtataacacagcataaatgtatcgtctaaattacaacttgcaaagtaaatgcaaccaacaagagaaatctattagggcaatgagaaaattacaagctgcaacattgccattggcagccgtccatacatcactaatggtgcaagccttccacacaaatcatcaagtcactcttggaacccccaaatcagattgacacagcaccaataaatcagtacacctttttactagagatgcaatccttggcattgaagttcaacatggcatactgtatgtttaaatcaaatatcatgtagtaatgaatattgaatgcaggtttgaacgaacctaaatttcgaactgaattccacaccaattttcccttccaatcactagaccatatacttagcagactcgattcatgagaagcagcccagaaaagctatgaattatcattgcgcgacgcatcaaatcaccaggcaacagaacataacatcgagacatagatcctcttcccaatcgcggtagcggaaacaaaaattatggttcggcgaaacgagagaaaactcatgacagaggccgcagcacggaacggagggggaacacgcgaacacggactcaccgttggtgatgatggcgctggtctggggcgggaccttgaactcctcggcggcgaacttgagcaccgcggtgaacggcgccgcctcgggcacgctaaacctgcaggagacagggcaaaccaaccccgcagatcagaacaagcagagacggccaccgcaaacacccctatcaatcgagagcgagagagagatctgatctgagatcgcgggggtgctgctactcacactttgaaggggagcttggggtcggaggtgaggatgatcttgaacgacaccttcccgcctccggccgcccccgcgccgccgccgcccgccgccgccatgggtaggggttgcgttggtggtgttgggatcgacgcgccgcgtgtggtttcgctcgcttcgacgagacgagatgcgcggttcgaatgagtcgcagcccttcttttttcttcttctgggaaaagaggattcgcgagtttgcgttgcgtgttttctccgggccgctttttacgagccagcaactgtgtgccgtgccgtctggatttttttttcccttcttattattatttttatattacttatattttttcctaaaatttttgatcatgtagtatggttatctgcatgtctactcctatgagatatttttggctgtgtatcaggatttcacagcagttgtttgccttgtttgaactagcacaattgtgaacaatcaggatgcagggtcaggatggttgggctctgatattcaggttccaaaaacacgtctcccatcagcaacaaactgacatgttttcacatccattaacattgttcattgattccattccgaaagatagcaacaacaaggttacacccccaaaattactgcagctatcaaaaaaggcacctttggcttgaagaacaccaggcaccctatgctgcagtgcaaggcgcaaaagaacaaagaaacttggacaaaacttctgacgaataatacatcaagaaaaaggctaacagatgaatctgattgcctctagagaaaaagaactcctgtcctgcaaagctcatttgctagactggcttaagatcatcccacagtcacaatgatcaagcggttggaatctccccttcctccaaatcatcccacagcttaagtggcgacgttatccctgccaattcatcttcatccatcatttcaagatcaaagttgaggaaatcatcaggatttatgtccccaaacaaatctgaataagcatttccgatttcttgctcaaagcccaagttgggaacctctgaaaataaccccagatttttctcggtgtccagtgggtaaactttcatgcaagacttccttttcagagcttcaggagttgaatttggcgtcagcctgctttgttgattatgttcaacctgaggacaactgaagccatcagatgctagaatactgatggaagacggcactaaagaatctgtgttgctatctatcttagatacggttgtaccttccacaggtgtaagattaccaggatgcgaagctgcctggttcttacattctatgccctgcctctccgagatcaccccagcatccccactttcctccatgtccatcggatagactttcatgcaatttttagtcttggaagccccagatgttgtatttggtgccatcttgcttcgttcagttagtgctttttgttgaccatctaatccaagactgcgtatatatgacagcacagaagaatctctcttggtgtctaccttagatccacttgtatccttcgctgaagctaggttagaggcatgtgaagctccacattccttgaggtctataacttgtgtttctggtgccaattctccttcttctatttcttcctcatgaaactcagtgccttctagatctgggctatcggtcgagctgccagggggcttctcacttgcaggaagcttgttgacaaacttttctacttcgaaatcacaactgtctgatggaagaaagacattaatagttgggtactcgacaattttaatgctcctcagttgtggacccaatggttcttctatgttgagttggcgatatggtgaagttgattcctgcagcaagttataagaagctctttaaagaaacagaggacatatcaataactacaacggatgcaaggtaaattggctgcagtactataccttggcagacttttgaatgaacagtttgagatcacgcaaatctgtattgcgatatggtgtgagctgatttttccaaggtccaggactcagatgtttttccaatgatgatagcaagctggtatgctcatctatgctgcgaaagagggcataaaatcagcacagaaaagagtgtgtgtggtgcacacagcttctggtgtcgtgattcatttacatgaaggtcacagaggtaactcttgcaaaatgtaataactttgacaactttctactctgcttccagttctttgtagaaccaattaagcacattaaaaaatatgtgctaacaagaagtgtgataacgttgtatatatactataataaaagttgaaaaaaaatgcagaaaccatttcagaaattctaacagttaatgtacatgtggtgtcataatgtcatcttgaatcagttccaaacacatactattggaacaggaaaaaacaggcgtaaatggtccgtaatctgtactgattgataatcacaaacttacttgtggtcagtcaggacaacatctgttgaattaaatttccattcaagcgtccagtatatgcaatcctttctgcaaaacgatattcatatgcaaatcagcattatatggtacgtacaaggtaggaaaggaaaatatggagcttgacactgccaacacagttcactgggattaatttaggacagaatggctcagaaaggtgaaacgtattgaaaaattccttgcaacagataaagatcccgacccaatacagcattaactaatgaatccatttggccaaaagcgttcaggatggtttcatcttagcaaatatacatttcgttaacagagtacaagcacaaatcattgtactgatgtgaacgaggagaccaaatacatttgtccagcacaaatcatttttctttcaataaaaaaattcaaacgcctccagtgttacttatatataaatttaagagcatttgcaaaaatccatctgatggcatcatatgtcagtatgaaataaggaaatagtaagaaatgatacctgtggttgtgccttgaacggttctgctccctcctggccatgcccctgggaaggaactggagccagataccacgccgctgcgccgccttgcggaggtaaaagagccacttcggaagctgcgcaccgccgaatccaccgtagttgcggccgaaggcgccgatgaggcgatgcgcggactccgccacctgcttcgtctcctccagaaagctgtaatcttaaacacgagacaaaacgaacgaacattacattgttggtcttggccaatcgttgagcgaaaatccatcaaaaagaggagagaaggggattgaacaagtaagagttactaccggacaggagctggtggtcgtcgaagttggcgagcgggacggggtcggtgcgggggcgctgccggtgcaggcggtgcggcgcttgtgggattggacgcaggggaggctgcaggtgaggcgggagcagcccgggcaccggtacttccatggctgctcgccgcactcctcgcacgggctccccttcttgctctcccctcccccgccgccgccgccggcatccggagcgggtggcttccctccttgatcctcctccatctctcgctcgctcaagtcgagagggggtttgcggcgccgcgatttctagggtttatggatggattaatatgaggggttttgctgcgggcggcgccggcgaccgttgccttattaaggcgagcgggtggcggagtgcggcgaacggcgcgacgcggcggggaaagaagaggggagtatttcgtggatttttttttacttgccaatttgatctgaaatctcgcgtcacatcggattttcgcaaaaacttttaaattcaattttctaatatttcattcacttgttcagtcgtttaagaccacatgaataaattgtcaaaaactcccatccctctttattcggcttcggctgtgcaaaaaaccaagacttgcacttaacacaggtcgaggtcggacaagcactggatcgagtttcacgaggaaccaaaacaaatcatccagtaattctacacagcacaactgtgataatcatcaggcatgaaaatgagatgaatttttgattaaatggcagcttgctcataacattctaaaagattctcggtcaaaccaacagattcatttcgagagtgatatctaacagaacaaaaggcataacacagccatgtctagaacaacctcagctacaatttcataaacaaaaattctcattgttcccacaattcaaagaccaacagtgaagacgacccccgcgcattgcatctcataagccattgggcaaaacaatatgctccgtcccgatcaagctttactccatggaagatgcgccaccaccgaatgcgccaccaccgccacgaccaaagccaggtctgctaccctgaacatccaagatttacaaggggtatcaagttagtctacaagcagctacttttatgaatatcactgctgtcaacacaagggttcctgaacatgctatatgtttacatgtcctaacataaaatctattaacacagcctaagatggatactcaacctatacaagcaaggacacaacagtttgaacaaatacaaggatggaaacatgacgtgctaaagttcaaggcaaacagaagaaaatgcatggtctaaacccattcaaatgttccaaattattaagccaataaattatctatgagcagtctggatgaacctagcaatggcatataggtatgcagatggtcattagagctcttaccctaaaagatggctggaactcagctggagcaccacccttctcgccaccaaaatcacctggagcaccacgtgggccacccctgtaaccatccctgtcaccaaacctgggcctgtcaccctcaaagcgaggcgggcctctgccacacgaacagaaaaggataatatcagtgtctccactagagttttcaggcaatacattcataaacaaaagcagccagattatatcatttgagtacatgttaggaagattagatacggtatgtgtaaaaaattgaaatcccaaccaaaagaacaggtctctgttcagttcgaggagaagacttgcaacacagttaaatggtttcaactaattacatcaatgaatctaaatttgttgccacaaatcagccccactcaacaattcagagtcaataacattttttatcaacaaactaataaatgactattgcaaggttcctataaactaatctgatgtccattcaacaatttttacatggtcgctacacaatttgcatatttgaaaacaggaccaccacctaaagaatatccatcacagcaatagcatccaatttccgtattcgcatatgcagatgataaacccaaaaggaataaatgctcacctggggcggtcaccaggagggccagagccgaatgggcgagacgggggcttggcagacttcttgagggtgttaggcacaacctcagatggcaggttgaggtagctgcggaggtgctcaatgccatcattggtcaggtaccagtagtagtgctgccacgagaaggtctccctcacatactcctttgacttgaagctctgcatgagcttaatcacctccaagttgggcacatcaacctttgggtgcttggccaggttgtagtccttcttggcatacaagactccctctgcatatagttgaattaaattagcacttcaactcataacaaataaaggtaccatcattcaggccttcagcaaatacatgaccaatcaaataaaacatgtttcaacataatatttggagtaaatctgggagcaatgtaactgaattcgtcaaacctataaacctcagacagccatagtgaatgaacaattgcagacaatgcaatcaaaatctgccctattggaatcaagcgaatgcaaccacctaaaccctactgcaacaccacatcaagtcgaagcttgcaatcacgatcagcacatacacaatgtacagagtcggcgtatagaggagaagaaagggggagaatctcaccatggaagaggtacttgcagatctcgcggcggttcttcttggagatgatctgcgacacaaaaaaaaaacaaagcgcggcatcgcgtcagacaacggaacgggtagagcatagcggagcaaacgaatgtggctcggtttcggaggtcgctactcaccatgtggcggagagctcgaaccggaggagggcggcggcgccggcggcttcggggccttggggaacgagaggcgaagcagcgaggcggggagaaaaaccctagctttgtgatgggttgatatatagaggccaccacatgggcctccattgtgggctctgtttcgccttccatgtgttctgggcctcaattgactacacgggcctctttttttttcttttcctttttttctctttctgcaaaagtttctcctttctgaaaaagatttcagtcgcctaggtagattttccaatgaaacactctgcagctaatcagaatattttccattttacgaagtgagcacagctccactagttagtttcttgtagtagaatccgcccacctcgatcaagttctaaacttggtacacgtgctcaacatttacagctttcttttagtggtagccgatgtatacgtcgacaacgaaacatccgtgctgacttcgtcaatcttaagatttgctagtacagtttttagagatgctcataggggtaaggtgtgtgtgtgtatatttatagggacgaccgtgcgcgtgttgtgaacgtatgtttgtcatatgcttttttttaagaaaaaaaccaatttgcaaagttctgtggtacattttgataacggactagtctctcttggttgagtacgcatgtgatccgatgtcctttttttcaaaaacaaaaaagagaaaaactcatatatgatgtcaagataattgaaaactgctgaaactcaaaggccccagcgtacggagcccatattgtttcattattttccaaggagcaggaacccttcattttcttacgcatttatagtagagatagagatctttatagggtacgcagtccaactaaatttgtgagtgaataatgataaagttcactctgacaaaaacagtggggaaaaggaaaatttgaggcggtgcaagcccagcaattaacatatacatagcgtgacgcaatccagtgtttaaatttgctttttttaagaccttatcttaagatgtcgacaatagtcgcagcagaacagtttaaaaagaggctaatttgagttggttgggatgctaatactttaattttacacatgatttagccggccgggccctctctttccggcggctttgatatctaaacatgaatctcactgtcaagaaagttgcaatttgccaacctcccagagactcagagtaacaggtaagctgaatttgctggggtgctatctctaatcgtgggaagaaaaggtgaggccggtgacgaaaaggatggaataatggctggggaaaaaaaaaagcagtactatcaagttggttaaaaagaaggtacatagatggtgactacacagctatagccaagccaaagactggttaattagtcaatgggtgactgcttaattgctcagggatatctgttctttgattaatcctggaatctgactgcttagtgtgacctttttttttctcagtggatgcatagtgccatgtgtgatatatactcactaggctgtgtttagatccaaagtttggattcaaacttcagtccttttccatcacatcaacctgtcatacacacacaacttttcagtcatatcatctccaatttcaactaaaatccgaactttggatccaactaaacacagccctatatagaatagcaccgtgctcttctgtcgcaagcgaagttacttagaaattgtcctgaaagctctgtgaccgaaccaatgtctttggatcttttattctgtggtgtttcaggaaaagaaaattaagctagaaagaggattgctcacttccacatacgtgccgctttcacagggagacgacatggataaaaatcatcagtgacaacacaaggatgaactgaagagactgaactagagagacagagaacgtgattaaatcaataaatagcaaagctagtgaaaagtccaaaataaaacaccggtagtttctacatgtaggaaaaggaactgctacgagagtggaagtgtggtgtcctactttaatttaatttgttagtatatcgatagagttggtgactgaaatattacataaacatttgatcatcattaagggcatattctttggtagcttaattaaacccgcttgtttgtttccgcgcaagttgcagtgtcactcactgatcgatcatctcacattctcactgtacagtgccgaacaacgatggctataaatgaggacaccggctggcgcaagttctccacaagccacctcgatcgatctccattgaaatcaaggcaccttaataatttctagtaccatattaagctaagaacagtagtgtacatggcttctcgtagaagtgcagcagctagtccggccatggcagcagcagctgcggtagtagctgtatctgtatacttgctggtgtgcagtgctccggcggcggcgacggcggcggcggtggcgaagaagccgtcgtacccgccggtggcgaaggggctatcgttcgaccactacaagaagagttgcccgcaggcggaggccatcgtgttcagcttcctgcgcgacgccatcggcaaggacgtcggcctcgccgcggcgctgatccggctccacttccacgactgcttcgtccagggctgcgacgcctccatcctcctcaccaagacgcccggcgggcccgacggcgagcagcaggcgatacccaacgagtcgctgcggccggcggcgttcaaggccgtcaacgacatccgcgccctgctcgacagggcgtgcggccgcgtcgtctcctgctccgacatcgtcaccctcgccgcccgcgattccgtcaaactggtaactaactaagttaattgattaattaatatttttttcacttacttactgccactggaaaagtttttcatggaagaggagatggattaaacactactgctatctaaaaagtggagttcatgaatagaggataggaaaattaacttaagtaatgtgggttaggattcaaaatttccgaatgaaattttggtcatattagaccatccgataccatactattttagctaaatttttaatttttaatttttttcatgaattttggtaatatttatttaaatttgaataacatatttttaaaatttcaaaaaatttgaaccgaaatttcgaaaatatcatcatatcggcacccgatacagataccggaaacaaaaagtctgaaccctgatgtgggcactggcgcactgcacgatgctgccgatgcacgaactgtgtttcatccatccatgatccatgcatcttgtttctccaattttctagtatatctcgatctggcagcggacaagagactttcgttgtccggtcctaaattaatcaacagaaatgaccaaagaacatcttacaatataatgatcatccctttaaaattctcttaattaattaaatacccaacaattaattatgcacgcatcgaaaaacaaagggaaaagaatctacgcagagttctgcatgttagaaaagacaattccctttaagctagccttctttagagtgaaagatatttggagatcaatttgcacgtaaattaatctaattaattaagccatgtaactgagtaacaattcccttgaagagccataggaaactataacgcgggataattggactgtcacgatcagtacttctgtagaatttattggcttgcgagaaatggcacaagaagaacaagatagagatgaaggaaacaggaaattgtgttgctgtctcaaccacgtgtggaatcactgtatcatgcccaatggccaaaattatcagaacatcgacatcttaaataattaggacgactaatacgtgtaacagatattaataagaccatttgctgactaggagtgtaccatcgatgttcattaactaattaattatttattaatcaattagtcattacatatcatttacttgctctgttcacgaatataaacatttttaaggagtcaaagcatggattaagatttagatgaaattgttttgatgactagaaattttactaataatgttaaaaatacgttttctaaaaaaaataatgagattaaagatatgatatggtccccatatctttggactttgagtatgtattagactgttattagcgtggtgttgtgtatgtttggtttgtgcatggttacggatgtgcccgtgtaaatcaataaatcttaaaggagtagttggactggaaaagtggtacggagtattacataaatgtttgttctggacaaatttaattaaacgttagaaatgtttacgtctgtgcaaagataaatattaatcagtgaatgttagaacatactccctccgtttcataatgtaagtcattctttgatgcccaattctttgatgtaacccctactctatcaatatacaagcaaagcttttaccctcttttcaagaaaaataaatataaaaaccaaaatgttgaacattgcaattgggtgcaggccggtgggccgtcgtacaaggtgccgctcggccgccgtgacggcctcacatcggcgacgccgtcacaggtgctgggcgcgctcccgccgccgacctcccacgtccccgagctcatcgccgcgctggccaagctcaacctcgacgccgccgacctcatcgcgctctccggcgcccacaccgtcggcatcgcccactgcacctccttcaccgggcggctgtacccgaagcaggacggcaccatggacaagtggttcgccggccagctcaagctgacgtgcccgaagaacgacacggccaacaccaccgtcaacgacatccggacgcccaacgccttcgacaacaagtactacgtcgacctgcaaaaccgccagggcctcttcacctccgaccaggacctcttcgtcaacgccaccaccaggccgctcgtcgccgagttcgccgtcgaccagtcggcgttcttccaccagttcgtcttctccgtcgtcaagatgggccagatccaggtgctcaccggctcgcagggacagatccgggcaaactgctccgtccgcaaccccggcgccgcctccgccgacgaggagctcccgtggtccgccgccgtggagaccgtcgtcgaggcggccgagagcatcgtgctctagacacacaattgtgcgcgccatggacgcgtacgtcagtacgtgtaccgtacgttgaatgtggaaagagacgacgacgactgtggatatatgttggttactgccatgtcgaataaatgcatgacgtcatgacaacctcctttatgatcaatatatatggatgtggattttcatcttgcaggaaacatcttttattgtttgtatgttatctaaatagttattaaaaatttaaaaaattatatataataacatagattattatgaaatatatcactccataaacatacaagaccgaattcaacttctacaaattgcaacaaaaagaacaaattaaattgaacatagttatatatatattcgcagctatatttgttatttttgttacattatagaagttgaatttaaacttaaatgtttacggagtgatatatatttcatattaatatatattgccaaaattttttatgattattttaggtggaatgcacgaatcgagaagatatcccttgagtgataaaaccactttcccaatgtatattgcagatcacttcttttaattaatttaagccaaatttaagatttaattaattaggttggagtggaggcagaagtcacgcacctgtagacacacatgacacatgcgttgagtattaaggcgtacaatatttgtcggcaacgataatagattaataattaattcataagatacctgcataaatagacgtatgtacgtatataccagaaagagagagaaacaacctagtgtctgaaactctaaagacatacgtttgctgcatacatgacaaaaacatcccgatgattacttgatcctgattaggcaatgatcaacaccaatcagtgatcgatcctcgatcatcagcagatagcaagcacatgtcgattgttgctggcagcaagcaagctatatatagtttgtcaccctccaggtcacagattacttcaactgaagaagtatccgaattaacaccaatatatcaaacaaaataaagtaaagtacagtactttccgtttcagattataagacattgtaattttgatcaaagtcaaattattttaaatttgactaagtttatagacaataatatttataatagtaaattagtttcatcaaatcaataatttaatatatttttataataaatttgtcttgggttgaaaatgctactatttttttataaacttaatcaaagttaaagcagtttaactttaactaaaatcaaaatgttttataacggaggtagtaatcaataattaatcagatcgccggcgtcttgtctgctgatggatcatacagtataatggaatgacggatggttcctgtagatggaatgacggatgaggcttgtgcaacagcggcatgccaagacgcacaagacgaagccgccatggtagcccgagctgtggaggggaaactatttcttgatctttcgagggaaggggatatctcctcgttatttgcatatcacttaaataatcagacgacatctaaactaagaatcatatatacatatctatcagtccaatggatcatctacgagaagtcgttgttcatcaggagcaggagggttgccgtggagggtatacagcatggcttttgtgccgcagccggatgccatgaggaagaggaagatggcgagggcgaggaggaagacggcaagggctccatggtgggagcggtagtacttcaccatgaggacgccgacgccgattgtcgtgacagctaggcaggccaagaaggccaccagaccgtagtcgttgtcgatcccgacatcccgctccgccatggcggtgaagtagtaatcgtcatcgccgtcgccgccgccgtcgccgccataaccatcgtagttagggttctctagatcgcccattatttattgttcttcgataataattaattctgatatatgcctctctctgctaatgtactagctagagatcacgatcgatgtatgtgtggttgttgattggtactatttgtttgtgcggattgcaattaggttcgaattaggctcggattatctcgttcaattcggtcacgcatgcatactctaagtaaaacagtcacggatcgatcgggtaccatatatgcttaaccatataccaaattaaataaaggagaaatataatttctaccaacacgggtgttatcgtctcctggctgggctgccctctctcccctctatggcacatggctgcatgattggtggccatcttctagggcttgtttacctgatcatctccgtgccagcttcgactccctggtcctcctagtctcatggcaactgtggagggaacgtaactccagggtccttgactctgtgctctcttcggtcgcagtagtcctagaggtcatccttttggagggccggctgtggtcgttagcggccgtcacttactttggggaattgttgggagcgtagagtggctctgctcccttccgctgtttggagtagagcttttcgagttttttttcctttcctttctttgttttttatctttgttttcttccttacttggcataggccggtctggctgagtgagtcgtgtatcaaaactctattcttctaatatattgacatgcaattcttttgcgcgttcgcgaaaataatttctagcaacaattaatcaatcaaataagtaaaataccctatacctctgtttttaaatagatgaaatcgttgacgttgggaatacgtttgaccattttcatctaattcaaaagaagatggtttttcatccctagatatacccttttaattgcaaaaaaaggttgatatacattaataagagatattgacttaaaaaatatataatgaaactacaaattgtaacaaggtacttttataacagatatatcgcataaaaaatatagaagttaaatttgacttatttgtaacaataaaaaaaataaattaaactaaaacttgctaaaacatacatctagaactatatttgttccttttggttataacttagtagaagttttcgcaaacccgcattacacgtcaatatatattagaaggaacttatataagtcaaattaagttttcgcaaacgtgcaaaaggattacacgtcaatatatattagaaggaacttatatataagtcaaattttacttatataatgttcgtggaatggtatatcatatattaataatggatcatctactacaggaagcctgtaacattgttcgaagggagggtggcaaattgcacgacgaggaagcaacagacgaatgccaagaagaagaagaaaaagaagctgagcacgaggagtaagacggcatccgctccgtgatgggacccgtacgtggtggaagtgcagtggatggcgtagcagaccacaatgcatgtattgaacactcacggatcgatcgagtatactgatcatgtttgaattcggaaaagaaactttcgtcaaaattttctaactagcaacacgattgcaagaatcgatatgataaaaaaaaagacgtgtattttaaatttaaagttttaatttgtgatcatacgtgacaaacagcgccctgttttcatcactgacgtagctagcaactagcttccatccaaagaagaattaagagctagcccatagattgattaatttgtttacattgcatatgtacgtacattcatgtagtgctgaattgaaggtacgttaatcattctcgatcccctcaactccgtgcggactactaatcaacatgcatggaagttgatatatgaaaaattaatcctaaagagagaaatttgaccttgcctagctagcttgtcaagtcaaatgatcattcgtttgcgaaggaggcaacgtaacgactaacgactagctaggtagcatctgcaacgtttgtacgtactacgtagtacatcggatcgtacgtactggccggccggtttgggtgatcgatgaactcgatcgctcgatcacacgcaactgataaaatagaacaatcgatggaagctactagctcacattattgagacaaaacgcaacacaggtagcaatttttgccaaccttcatacagctgcgcgaaatggatgattttgtaggtagtcgattgcgttgacattttgacatcattttgtatatgcgaaaatggattttgtaggtgcgaacgagcaaacgcctataaattgatgaagacactcgcatgcaagctcattcaccccaactccaagacacaaaattaagccgatcgagatggcgagaaaaatgagcagcacgttgcaggttttggtcgtttcctgctgcagcttgctgcttctgtgtgctccggcggcctccgccggcgattacccgccgacggcgaagggcttgtcgtacggtttctaccagaggagctgtcccaaggcggagaccatcgtgaggagcttcctcaagaaggccatccgcaacgacgtcggcctcgcccccggcctcatccgtctccacttccatgactgcttcgtccaggcaattaactaattgattaaaattaattgattatacacctaatcatgcataatgcatgtgcaaaatgatgaaattacgcctcaaacatgctctgaattttgaattctggattgaacagatcgatcgatactatatttaaacacgcatctgtgacgggtaattattcgcgaaccgccactaataattgtgctgcgctgtgcgtgcagggttgcgacgcgtcggtgctgttggcgcgcacggcgacggaggcgagcgagctggacgctccacccaacgagaccatccgcccgtcggcgttgatggccgtcgcccaactccgcgccctgctcgacgacgcgtgcagcggggccgtcgtctcctgcgctgacatcctcaccctcgccgcgcgcgactccgtccgcctggtcggcgggccggagtacagggtccccctgggccggcgcgacggcgcgacgatcgcggcgagggagcgcgtcgtcgccgcgttcccgccgccgagctccaacgtgacggcgctcctcgccgccgtggccaagatcggcctcgacgccgccgacctcgtggcgctctccggcgcgcacacgctcggcgtctcccgctgcatctccttcgacgaccgcctcttcccgcaggtggacgccaccatggacgcgcggttcgccgcccacctcaggctctcctgcccggccaagaacaccaccaacaccaccgccatcgacgtacggacgcccaacgccttcgacaacaagtactacgtcgacctgctcagccggcaggggctcctgacctccgatcaggtgctgttcagcgacggcaggacgaggggcctcgtcggcaggttcgccgtcgaccagccggagttcttccgccgcttcgccttctccatggtgaagatgtcgcagatccaggtgatgacgggagtgcagggggagatccgcaccaactgctcggtgcgcaacgccgccggcggtggcacctagctggagctcaattactctttgctccgatgaagaactcggagcttgcatgtagcacgttttactcggggtggattttaaatttttaatcactcgagagaatattctctcgtgtatctttttcttctaaattcgatacaaataattatgaaaaattctaataaaactagcgaaatgcccatgcgttgcactgggtgaagacaaaaataaatagtaatgggcgtgtgggagcataatgccaccaggttaattgagatccttatagtcaaatcgaatcttttcggtgcaagtaagacgctaacatgacataattattcgttgctctaaatccattcacatggattataagaaagctattaataccactttaaaatgaaattatgtattatacatactaaagtttgaaacccaaaaagtatttatttttgtcatgtattattatgagtcggttgcaatgcatggttatatttttgtacttgatattgataaacacttttttttacatactgcaagagtagtaatagtacaagaaatgtttttcgctagctatcagataaatctcactgtactccaattgcataatcgctttcactcaaaaaatcagaaggaaatcgtacgatgaatggaaagaaaaaaaaaagtggtgtatcatctcactctaaaaaaattagaacaaaaacatacaacgaatgaaaaaaaattgatgtggatgagggaaaaaatctggatgtaaacacgattcattttgttggtgactacatgtttttttaaaaaacaaagacacgtgattgttttctattttctaaaagtaatttattttgtcagtaaataattcattttgttggtggttacatgtttttttaaaaaagaaagacatgtgattttttttttactttcccaaaataatgaaattgttcctttttttaaatccaattcctagtagacacagatccaaacacaaactttatttagtgttaataatctcaggcaagcctcctatttaggtggtattattcgtgctacagtgctcggttactactatatcacgcagaactatgttgtgctgggctgctgcttctctgctctgtaggctggctgccgggctgctcgctaggtttctcttttttttttccattctcttttatttgcggagctcagagatcgtcgtaatgcatccggattcacggattagcggcgaaataatcacgtgggcccaccctttaatgacggaagaaaaaaatcaaccgaaaaccttacttattttttaattaggtatagatatagatatagatttgacaatgtagagtatagtgatatctatcggtccaccaaaaatcaagctaaaatttgacatacccactaagattaaaaaaagagagacaaattttgtatacaatatgctactattcataagtttgtcttttctatatgtcgatgtgtgagttgagtttggatctaaaattttgtggagttgtatagatatgttgtacgaacattatcaaattttatataatttttttataactgtttggatgatatttttttaaaataaccgtttgggtggattataaaatgcagctaggcagctagcatccatcaaaatagtttccccgctttatgtacgctcatcggttgctagtctgttaatgctagctgcattttataatccgcatgttagttcagagatcaaactttgatatttgaaggaatgaataaaataaaatttgtttgggaatcgattgcttatgcaccctgcgaaaaagtggcggttcagccttcaaaattttttgggcctactaacttcgatgggccgttttttttagcccatgcagaagacagaagtgtaggacattgacgtgacaacctaaccatgcacatattggatgcatgcgcatattggatcacatagatatatgcacagacaggggtggatccaacgtgggtgcggggggtttcgagtcccccctacacccacaaggcccatggatacctcccagagcatcccctttaatttttttaaaatgaatgataaacttaaggcttctaaatggctggaggttgaacaaactgtgtaattgagcccccctcctcccaatttttgttcttggatctgcccctgtgcacagaggatggagtatgtgaagtgaaggtcaagagttcgtcaggcatacaattacggctgtgttcgttactactggttgggaacaaatctcttggcacataaaatggagcggctcattagcagctactccctccatttcaggttataagacattttgagtttagtgaaagtcacactgctttaagtttgaccaagtttacagaaaaagtagtaacatttttaacccaagacaaaattattatgaaaatatattcaattattgatttgatgaaactaatttagtattatcaatattaatatatttgtctataaacttaatcaagcttgaaataatttgactttgagcaaagtcaaaacgtcttataacctgaattggatggagcatttttttgaaaaatagattaatatgattttttaagcaattttcgtatagaatttttttgcaaaaaacacaccgtttagcggtttgaaaagtgtatgtgtaaaaaacgaagaagatgagttgagaaagctaggaaagaagtcagtctaagctcgtcggcatagcacttaatctgctttacctgagtggtggccggtcctggccttgtacaaggggctgacggcctgaggctgaaccccgtgaaacaccaccacctcttcttcaacagttcaactcgagcgggggcgatggaaaaagcaatagcaggggacatgaatattccaactttccaggacatctttctgaattctgatggtggtgggcaatgtgagactgaaaaaaatcgatatgggagagagagagaggtcagaaatggagatggaggggatgataggtggaacccactctattttttttaatgattgggatgtcacgtgaacaccaagtcaacgaaaaaccgcttttaaaaacagttgatgtagtcattttaaacggttttgatagttagaggggtcgatttatctagttttatggttgaggaatatgaatcggattcaatttatatttgtgtgagtagttaaatttgcttgtgtttttctttcttcatcagcttattcttatttttcaatgatgataaactgatcagcgtagccgccggcccgtcgcccacccttaaacaacgacagctaatttatgcatgcatggattccgatggaggagctgtgtgcaccactcattcgtaagacttctttcgaataattcaacggaagaaggttgaaccatttgaagcgaatcacacattattgatctttctctccaaagaatcgtgctagctcgttggaaaaaaggggaaaaaaaaacggcgagcctagctataattcaatttgcgagattacacatatgtgaaaaatcgccaagttaagggtttttctttatacataactaaatttgctactaatccttatatagccgcctatgagcatttgtgcattgtactatgcaccaacctccacttgtaaagtttcaaccaaaaagaaaaaaaaagccatccacttgtgctgccaatttgctcaatcccgacaagctcgctcgatcgttcgccgcatcagccagtctcagtccgctgcaatttgttcgcgcatgcgttcatataatagacctatcatagatttttcgacgattccaacgacctcgtggaaaaatcgcagatgcacgcaccaaatccatcaatttcatcacgacactcgcaagtagtgcgcgtccgctataaaagcgatggaaatcctcggaggacggcacacggttgatcgatcagtacgagtacgacgagagctaagtaaacttagctatatcgatcgaccatggcgtccaggactagtgctactgccggcatgctgctgctcgccgccgcggctgcgctggtgtgcagctcggcggcggcgaggatgccgccgttggcgaaggggttgtcgttgggctactacgacgcgagttgcccgcaggcggaggccgtcgtgttcgagttcctgcaggacgccatcgccaaggacgtcggcctcgccgcggcgctgatccggctccacttccacgactgcttcgtccagggctgcgacgcctccatcctgctcgacagcacacccaccgagaagagcgagaagttggcgccgccgaacaagaccctccgcaagtcggcgttcgacgccatcgacgatctccgcgacctgctcgacagggaatgcggcgacaccgtcgtgtcctgctccgacatcgtcaccctcgccgcccgcgactccgtcctcctcgccggtggcccgtggtacgatgttcccctcggccgccacgacggctccagtttcgcgtctgaggacgccgtcctgagcgcgctcccgtcgccggactccaacgtcaccacgctcctcgaagcgctgggcaagctcaagctcgacgcccacgacctcgtcgccctctccggcgcgcacaccgtcggcatcgcgcactgcacttccttcgacaagcgcctcttccctcaagtcgaccccaccatggacaagtggttcgccggccacctcaaggtcacctgcccggtgctgaacaccaacgacaccaccgtcaacgacatccggacgcccaacaccttcgacaacaagtactacgtcgacctgcaaaaccgccagggcctcttcacctccgaccagggcctcttcttcaacgcaaccaccaagccgatcgtcaccaagttcgccgtcgaccagtcggccttcttcgaccagtacgtctactccgtcgtcaagatgggcatgatcgaggtgctcaccggctcgcaggggcagatccgcaagcgctgttcggtgtccaacgccgccgccgccggcgaccgtgcttggtccgtcgtggagaccgtcgctgaggccgccgagagcttggtgctgtagggtgctaacaaggatggctagtttaattaagcttatttccttgataaatattttgttgcttccaaatgtcatgagtatgtacacttgcgtgtattttgtagcttattttttatttgcaaataaagttgaatatatgaaaactatttaaatccctcgagaggatatcccctcgtttgcttaaaaacatcaaaacggttatgaaaaattctggaaaattttgacaatattcatataacatatctatacagctccacaaaatcttaagtccaaatgtgattcacacgtcgagatataaaaagacaaattcaacctctacattgtttttttttcagaaattttcacaactatttatatcaaatttgaaagaaaaaaggtgtacgaggggatatcccctcgagggatcagaatctactccccaaatatataggatttattggatccatgcaactttggtgatttggaaatcaaccattacaattcaagaaatcacctagtataggagaaccttggctattgattttgcgtatagtaagccaaacttaaccttaagtagaaactaagcaatctaacaaacaatgtgggtggctaatcattttttataaggatatttttttacctggcctctacatccaaccagatatatgcagtctttttaaattaggaacttatcctatcaaacaaaaaacttagccctcaaataacccaatctgaaattcgtttcaataaagatttgaattcaagataatcatgttcatgtttgagctcgatcggaatcacaattcagatgaatactgaatttaaaatcaaatcaaaattaaatcatcagacggcgtctaatggatgatcaacagcagcagcaaccctgtcttcttccaggggaaggctgccgtggatggcgagttgcacgagacctatgcaacagaagcacacggataggaagacgaagacggacagcacgaggaggaagacggccagcgctccatggccatggtgggagcggtagtagagcaccatgaggacgccaatggcgatcagcgcgccgggtaggcaggcgaagaacaccgccgcgccgtagccgctctcgccgtcccgctccgccacggcggtgacggtgatgccgccgccgccgccgctttgtacatcggccataatatattactgtatttgcttcgataatttgattcgattcgatgcctcttgtttctcttgtctgtgcggattgcaagcagtgcaagtcaattctgtaaaaataaaaaaagttgcagggtaagtcagttattcgattcggtcatggtgcgtttcgaatatccatactgatcttgtttgagtttggaaaggaatcctctagagaaattgaggaggaaaataatttccttgatagcaaacccagatcgataaagaaaacaggacatgcatgcaccttccttggattatatctctagctaggaagtggataaaacgagtgtacatgtccactcgagtgataaaggatcaccaaatcctctccctagtttcttgatcagcaaaagtttgttgcttccattaatttgccagtacgtacatgcgtgcgtgtattcttgtagccttacatcttttcaaataaagtcaaataaactgaaatctggtatgtatcttttattacaaacacgtaaaatgagactattaactactcatccttttaacgtttaatccatcttaaaaactctgtaatgcacacaaacaatgcaacggcagtgtatcaggggacagaccggccggccggatgaatgatgggcacggtgactactagtgtggctggactggtacagtagttgctagtggctgatctgcaacatagcgccaggtgcaacctctctcatccgccacgactcagtacgtgtacgctcttgtgctgcacaggcggaagaggattttgattccctcgagttatttgcatgtcactcaaatggttataaagaaaattaaaaaaattagaaagatatattaacatgtgatatatcactccataaacatgcaaataaaaattcaacttctatatctcgcaaaaaaacagatttgactttaaatatacgttaactagctgtagtttaatttgtttttttgttacgagatgtagaagttgaatttgaacttgcatgttcgtggagtgttatatcacatgttaatatacattctcaatttttttataaccatttaagtgatatgcaaagaacaagaagatatccccttgagggattagaattgtttctatgcacagtgatatgtgaaccaacaagattgttgtcggactaatgcctcactgcttggtcaatgaaagtggctaaaaccacacttcaatttgtgcaccatgcatgacactcagattattcgatatatctgaacgaacacgtacaacctactcgatcatatgatgctaaagtagatgagaattttcagaatatgccattcaattcacatcatcttcaagatttttcacttaattcttagcactttcagatcatgccaccgaggttcttagtttgctgcgtttatagcaaacgtgtacacggtatgggcaggaacagcagagtggtcgacgtgtttggccaagagcgctaccctgcactcccaactcctggagaaaccgataaaatcaacagtacaccgacacccaggacgtagggagataggatcggttgttctcttctcgcccatatcttgcatctcacaaagcatcctgcattcacctacgtcaacatgcatgcatgacaagtttgattaataatattttaaatgtccaaaaacaaaatccctatcaattatgaaactattttgatccatccataaatattccctcgttatttacatgtcacttaaatgatcatgaaaaaaaattaaaaactatagagaagatatattaatatataatatatcactctacaaatatactagttcaaattctacatctcgtaaaaaaaattaaattacagccagtgaacatatactcacagtcaaatttgttttttgactgtgagatgtaaaaattgaatttgaacatatatcatatgttaatacatcttctcaaaatttttctagtaacatgcaaacaacgagaggaaatcctatggagatatcaaaatatactcccctataaattgaagcctacagctgcgtatgttcagtacgagcttacacttagagcagtagaaatacaattacgggaggaaatggcttctgcgacgacgctggtaatgctggtagctgccgtcgcttgcctgtgcgctccggcggctgccggcgacggcaacgccgacgcgacgcggcagccgccggtggtgagtggcctgtcgttcgacttctacaggaagagctgccccaaggcggagtccgtcgtgaggaagttcgtcagggacgccgtccgcaaggacatcggcctcgccgccggcctgctccggctccacttccacgactgcttcgtgcagggctgcgacgcctccgtgctgctcgacggctccgccaccggccccggcgagcggcaggcgccgcccaacctcacgctgcgcccgtcagcgttcaaggccgtcaacgacatccgcgaccgccttgagaaggcgtgcggcgcctccgtcgtctcctgctccgacatcctcgctctcgccgcccgcgactctgtcgtcgcggtaaacgtataaatttagagtcttacagtttgcatgatcgtgagggcgtgttgtgtataatcgaaaattatttatactttttaagtaaattttatagaactatatatacttgatcaaattattgtaaaaatacagatttaagataatgtattagaaatatatatttaacaataaatttatcataaaaactatagatttaataattaattagcacaaaattatagcttatagggtttaaattcttagcatttatgttatgcctgagttataaatatccaagttttttactaaatcaatatttatgaaatttcacaatttatagttttatgataatttaaagtatctgaaatttacttttactattattatttttgacgtgtagtcaggagggccggagtacaaggtgccactggggcggcgagacagcgccgagttcgcgtcgcagcaggacgtgctgagcgggctgccgccgccgaccgccgccgtgccggcgctgctggacgccctggccaagatcaagctcgacgccaccgacctggtggcgctctccggcggccacaccgtgggcctcgcgcactgcagctccttcgagggccgcctcttcccgcgccgggacccggccatgaacgccaccttcgccggccggctccggcgaacctgcccggcggcgggcaccgaccgccggacgccgaacgacgtccggacgcccaacgtgttcgacaacatgtactacgtcaaccttgtcaaccgggaggggctcttcacctccgaccaggacctcttcgccgacgccgccaccaagcccatcgtcgaaaagttcgccgccgacgagaaggcattcttcgaccagttcgccgtgtccatggtgaagatggggcagatcagcgtgctcaccggctcgcagggccaggttcgccggaactgctcagccagaaaccccggcaccgtcgccgccggcgacctcccgtggtccgtcctcgaggttgcagacagcttcgttttctagataataaaataatactctgggactactactagttagcctggattagtggattagcagctgtatgctttcaacttatggccttgcttgtatgcaatcttagtgaaataaattcagtgatgagggcaagtgatggtatacgcatgattttgcatgacatgatcatttgtttatttatgtgaaagatatattaatcacaggtagactggtagtgtttcgaatctcctgaaaatgaagataaagattaaatgtttcacggaaaacaaggtgctaataacatgtgaccttttaatattacaaacttgaaaaatggattaatctgatattttagaacaactttcatatagaaagttaccgcacgaaacataccgtttagcagtttgaaaagcgtgccacgagtattaaaagtttatccaacttttgttggagaaaaaaatagggcgtatgaaataaaaagatcataatagagatggagcaataatcaggtaggatttgaaagatatgagcaactcgtgtatttgttttctgttctccacagcttacagtaggtaggtacagccgcaaaacacgaggcttggaacactagtgcgttatgtcaagaacaccaacacgaaaagtataatgaacagaaccacaaggaagaggatcagcataatctgcccttttatgccagcctttttcatgaccatcgccactcttttctgcaccaggcaatgagaggaaaataatttcagggcactactctaatttccaggaacttctacacaacttgaatgcagcaaataagtatgacatggtacaggcttgttaactgattcagcaataaaaattgctagctgaaacataaatataagcatctagtgcacatcaacaaataacttgtggaaatttaaactatcttgaatacaagaaacaacgacggcgtcatgctttataatgaagcaactaacctgcacgaagtcaagtctgtttgaagtagtttccatctccaagcttaggtcgtttaagatcctttcctgtaaaaaagcaagacgttcccagttacttcagctgacatgttctttttagagtgctacactcccagccaaaaaaaaaaaagagactgaatggccctgtagtgaacattttttggctcattaggcaacatctccatcaatttgccgtgtgacaagggcaatacctgtccagacagctcttcgtgtatggttagccctacaccaccaatcctttgaacactttcgctaagctcatcaagttcctcatcctgctgcctgaaggtaaattaagtacagttatcagataagtgcagaacatcaggctatatgaactttacactgctagaaccaaaaatatatccttcttagcaattccaagtgtaactcgaagattatgcatcaaccagctaaccattaacagaaacataaatgcagtgctcatattatatgtgcagggcagacaatatatatttctaactaaagtatttgcaaaattgcaaaatgcaataaatgtagcagaatgaaaattgacctcataagtagaagctgtctatctgattctgaagcaatgaagtcatcattgtcttgtgcagtgtagtggttacttctgcttgtgcccatgtcttggtgcgccgagaaagttgaattactcttccccttttcaacagatctcctgactgcagcaacctggatatgtttacccgtaaacaggaatccagcgtagatgaaacttgcattggctacatagagttcagaacacagtaacatcaaaattattctcgtgtctttttttttcccacgccactgtatatcatgtttagcagtcattgtatttctaagatgctcacacatgatcaggatatacctaattgataatcctatgaaaatgaaataggcgcaaacgaaaaggcacatgaaatctgtagtataagtataatttgtaaagttccaataagtcacccagcagtttatataacataaaaagcgaaacaagatgaaacatcaagaaatacctgattacgagcagaaccaatccagttccgtcgtctagaaagctcaacttcgtccagtccatagtacgctggatctcttgatgcaactaagattgtcttttccaactcatccaccttccaacataaaaaaacaccagttataccagaacaactgtgcaggaagaagaaaacagatattccgataagtaactctaatatattaaatgcaacagcggcttcttcctgtaccaaaaacatcaaagaatgacagcactgatattccctgttttctcacctgccactcaatgctttcacagctggtatgaagctcctttgtcaaatgaacatgttctcctgtgtttgacggtgttttctcccatcgatggaaagtagtttgcaacttatcaatctgtcacagaaatatctttatcctcagtattagaagaataagatagatgcatgtgtgttgatggtgtgatatgttttcgaagttatgaaggaaataagcagcacaataacacgaaggggctatatcttcagcgataacaaaatctagcatagtaaaatgcatgaggatgaaatatgtttctgaatgtgtgagggagttaacaatagagatgcaaggaagatgtatattcaggaatggtagaatagcacagtgaacagcatgatggtgcagaatgtttctgaaactatgagttaaacagaaaagctactccaacagttcttaatcttaaggggtcatgagttatgagcttaataggaccaattagtgatggagtctgtaacatggcaattcagtgataatataagtgtatcagctaccaacttaacacaaatctgttcaaggtctgttcaagaacataattacaattcttccatcattacatcaaaaatgttaaaaatgcaacaccagactgttgtcaatttcccacgccctgtcacccagtcccattcctcaagcccattggacacaacatgtcatcctagcatacgttggaactactctaaattggatagacatttcttacagtgtaccgacaaatctgtactcttaatccttttggtggcatcgctagacataaaagacatcccaaatcacaggtagcatctgaacagaaacaggacgatcggcataatctacaaaatcggtcagaatcaagcaactaaggggtatgtctgcgcgcaaacgctcgaatttttggttttgatccatatgcatacaggacgacggcaactaatttcgcatttgctggaagcggagaaagggacaaaggagagaaagagcaagaattaccgagtcctggatctcctcccggacgatgtagaacggatcctgcgccgagctcatgctacctcctccaaaacgtcttccaaaacgaatccggatttggagggattggatttcctcccaaaccctagaattcgctcgcaggagagctgcgaaaccaccacgaggagtttggtgcggagatcggatgcgtcaccttgcttcggttgcgcagaggaggtagtgggccgtgggccaggcaggttggtggctgctggcccgtggaccgtggactcggtccacgaaaaccagtccacgcatctacgtggtggaccgggtgcaccacgctggcgcacctggtcttcttcctcccgaatcgccgggataagggtaagccagccacaaaaccctagaaggcgcgcgcgagattccatggcggccttcacctccaccaccaccgccgcggcggcgtcgcccacgccgtgccgccccgcggccctcgtcgcgcgctcgtcggcggcgccgctccgctccgccgcgccggtggtggtggcggcggggcttcggcgagcggccgcgccgtcccgccgtggcgccacgctgcgggtgagccccccgcgagcttcgttcgggttactcgttggtttgccttgctttgatgcagcatttcgtagtgatttcgctgcatcaagtactagctgttgcagcttcgttcgggttgctcgttggtttgccgtgctttgatgcagcatttcgtagtgatttcgctgcatcaagtactagctgttgctgtggtgatctggcctggatcgattttagatgacaacgaagtgaaatttggggctatgagttatccaatagatttgttggtcccagttcagtctttctgggaccagtgtaagccaaagccaccatttctgtacttctattgcccgtggaataattgagtcaacaatttgatgtccctactatttgtcatttcttcacatatcactgtgcagcatcagttacttgatttgatggctgtatgtcatgaatatttttagacttagttttatttttgctaaccacacctgttgcggacccatatcggttggaaatctttcatgaatgtaactatatatgattagatgtaatgctgtgtaaccagatattcatcataggtttattaaccatcatcaatccaaatcagtattttctccaatccttcaatgtgcttatattcatggatgtctttctaattaatttgatagttactgttaacataatattgatattccgtttctaaaaattgtttgtatgtttatttgaataggttcaagcgaagaaacagacgttctcttcgtttgacgagttactggagaagtctgaaaagcctgtactagtcgacttctatgcaacttggtaagctactggtaagagtaaactgtgttccaaatgtcttgatgggttatatcactatcagtgctctgtactagatttatgtactccaattctcacagtgttagaccttaaggagttagttttgatggaggtaatgtcctgttcctacctgaatgcatcactgaccttgtgaaagtgaatgtggaattccctgcacattgagtaatgcaaacacattattaatgggatcaatttttttttgtccaatctttagtgtttccatggataaagggagaagacaagtgtatgtttattgtccatcgtgtaggcttgcaaggtgctgttgtgttgtttttgtttttaatcaaaatcttagatcaaatctatttcttccttatgggagaaaaaaaagagagaataatagtctggccgtattctctctaccactttggcaactcccaacaccaaactgacaaagtgattgctcattgataacggttactcaccattcagataatatgatggcttagcagttcttggcttgttagtaggaagattgataaacgcattttgagtgtatctctccatttatttatttatcttccttttgtcaggtgtggtccatgtcaatacatggttcctatacttcaggaagtaagcgaaaagttaggcgataagattcaagtcgtaaaaattgatacagagaagtacacaagcattgctaatcgttaccaaattgaagcattgccaacttttattatcttcaagaatgggaaaccttgtcatcgctttgtaagttttgaggatccaccttttctcaattttaattgatttgttaatgctaacaataatgaggttatctctttttttgtggtctatgctgtttttcatttttgttttggcaatgcaggagggagcgctgcctgctaatcaactaatccaacagattgagagtgctttggaggttgcaaagtagcatgtgtggtgagcactgagctgggcagaaaattgtccctgacatttgtattgctacccatcgcatctgcatttacatgtttgagtattattggtgcacattattcattatttgttagttatgcatgaatggtattcgatagttctttctgcatctacatctcagatacattactgaagtgacatgagtcactgttatttgatatttttatttatataactgggcaaggtcatggactaaaccttgtcttctgtaccttgtaatgaactctctgaaatataggtctgaaatatcacgataacatagttttgtaataagtacagttagttatgcaaaagttttttttagaaaacaccttctctattcgtcatgctggttcaccatattttttttccgcgccttggtgaattgagatctgttagcatccaactttagttagctcctattcctttctatgatcgcatattgtggccactttccatgttattcgcctagttagaacttaaaacttacaagtagtgtgaaatactgaacgggcttctttaacaatataagtattggtgggagatactactggtattagtaaatgccatttggattttctttcctgactattctagactgaatgttacatggtttgctgaatgaactgaatctgatttttcttgtttctcttattctgtatgcaaacaaccacagtaatcatactatagaagtgtagtataacaaactagctagtatatgcttgtgtaatataatctaattacttgttttgggacatcaagccaataatgagcttatagatgaggtgttcaataatatgaattatggaaaatcaaagtatcaaagttagacactgttttacataactatgcattaactaaagaatccctactggattgtgtttatatgttatcctaacggatgctctgtactgacttcagaatactattattcgtaccagcggaagctaccaattttcttgtggacaacagtataggtgaacaattgattctccgtgaattgatgctgtcttttttaaattacctcaaatcccagcaaacaagatatgggtgcaaacacctaagatgcagcttgctgatcttctgtggtctgttttttttttatgttgttgtaaaattgtgtgaactaactgatgattatactttgtacctctgggcaccatttactgtatttatcaattctgagggaaattaccttatcattttaccttttgaaatgcggactatttacttaaaattggctgtggtaattctggtttgcatccagaaaaggcgatttataattttatacgggtcgtcctttagttaagttgaagcatgtatatagtattttaaggcatgttggggaatgaaataattctcacttgaccacttctttgctccattttagtgctgagcgattgtggattctagcatctaagagacactccatcaaggttatctgttgtttgtggagaaaattatgaagtgtgcatttggtgctgtttttgaggaggatgttttgcgttcagattgtcgtcctgtaatcttcttttctatttgttagttatgcaatccctgtctggaacgcgaaggcatcatcgtgagaactacgtaaagaaaacatcgtctgctactgtgcccttactctgttcaagcagttgttcaagattgtcggcctgtgtttgtcataaggacgtgttgatatgctcgcattttctttacctactggagatatgaaaaaactctcttgataaaagatcaagatgaaaaaaaaaaagcaaatgatgccgttatttcttaaacacagaataactttactgagtggcgcagttaaaaataggttggtatggtcccaattggcaaattaacgcacatcccttttctccaaagcaaataagacaatgcgcacgggaatcttaaggccccattattttcagtttattcactggattattgaaatgtattatttgcttcatattttaaaaatatattttctcaataaattttctttcaccgcattcccttaaagggaaaattggaaccataccattataattgtgcaaaatttgagatatgtcatcctgacctacatgttattgactcatatggggtcctacatgtcattgagatactgatggcatatcttaaactttaaaaaattataatggcatggttccaaattaccccttaaaccactagtccatgttgcatgttgtatggcttttccttagtatcctaccactacgggtactacataaccatacaccagtcatcatgacgaagtaaatcctcaccgtttgtcgtgattatcattaggtcccgttcggtagacttcaagatgaagattaagtttaggttcacgaaacgagagagtcatcgatgtttgattaaattttttttagataatgaaaatggttacatctccggcctctgcctgtaggcacacaaccaaaaagttcagtagtgaacagaaaataacttaaaaaagatgagatgggacaaacccccaacttctaccgataatatgatctactaagataaagtttttttaaaatcacgtagattctatcatgaaattctgtaggtactgcgccatccaaactggaataaaagtttcttggctaccaattccaaacgcgtagcaccattgcgcatagtgtcttggtgttcctgtgaaagcatcatacaacaagagtgaagccaattggaacacatgaagataacctgcatgatgttagacattcttttatgattaaaaactatatcattacggcaacgccaaattgaccaacatagagcactagcaccaaataaaatcaatttttttggggtctaggcactccccttagccagttaccaaaattatcttttgcattgcaccaaacaaaattatcttttccattgtgggcgctccccttagccagcgatgtttgattaattaaattttaattattttatactcatgaaatggatttatctgatgttacgttttcgcgtgatgcaccatttaaaatgcgtaacttatatatatatatatatttgtttggtgctccatggtgcccgggcaccattgttgaaattgagtatatacccaattcaaatgagtatgaaactttttcaattacctaggtattaacattaactactttactaactagtttaaagcaagtttgaactgaatttgaacttgtttttgttagattttgattctaggtatatagcatccatacatataattagttaggtatgtaatcatggattgtgaaataaagttaaatttgagttgttttgttgataagtataggtatgaatcaaattattataactaggtatatactcacaatttgaaaattttgaaaaatttgagtgattttgtgcattagataccatggtgcccgggcaccatggtgccccatatgagtgtcctatatatatatatatatatatatatatatatatatatatatatatatatatatatatatatataaagtttttgcatgatgcacaatttaaaatacgtgctaacaaaaactgagactgtattagaagaaagaaaaagaccttagtctcactcgcgagacgctacaaatatatagtcccctccaccggcactcacatcaaccaaagctgaagagcacaccacaccttgttagtggtgcacgatcgagagagaaagatcgatgagaaggtcgatcgaggcgatccacgtccgcaccgactacgatgattgcaggaggaagggtcacggtcacggcgccatgaggatgcaggacgagcttgcccgcaccaagaccaggtggcccacccccgcccagcttgagatgatagagagaatgaaggaggaggaggaggacgacnaaattgtagcgtcggtaggtaattcaattcgatctcacgatcaaattcaaccaaaattcatctatcgatctcatctgtatgatatgactgtgtggatgaaggacaatcggacgccatccgtggtggagacgaaggtgcaggtgccggagatcgtcgaacagaacgtcgttgaaagagatgagcggctgcgcaccagcgatgacaacgacgactacgaagacgaacccatagtgaggagagacgggcacggcggcggcggcggcggcaggagggcgtacggcgacatcggcgggtaccacggcagcaagggcaggtggccgcgcgagcccgaagtggagaagctcgagagggagaaggagatgctaaagtatggcattatgtccaaaccgaccaccaccagaaaggtgaagatcgtccacaggatgatccggccgccgaaccagtatggcgccgccggcagtgcaccaccaccaacagcaggaggaggccaccagccagctaccagtagctacctacggcccatatactaccactactagtacaagatagttcgttcgatcatccatcttaaaatatagcaacttaacgttgaatcatacgcaatctaatactatgaatctgaattgatgttttttagattcgtatattttagaatggagtgagtatataataagaagttaatggatgcatagacgcatctaggcagatagctagcttagctagtgtatgtatgtatgctactgtgtgttcagtgtgtaccacccgatcgatggttatatggagtattctcctattgtaatatagactatgaatgttatactatactgtatatatggtttggttcggattaagactgttaatttctttggctttcttcacaaagccaggataattcaatcgctgaattgcctgagttcctccagaagaagaagaataagatttggtttcattcgctgtcgatcagttagtcgatcgatctatacctgcgctcaactcaacctttgagtgttcaatccgactaaggctatatggccagctagtttatttcttcacgtacgtctggctgtttcacgggcgcttcagtggcatgtgcatcctcctcgtcgtcgacgaggaagctgaaggagagacggtgtgccggcggcgaggcatttcgtcgagcaggcggcaaggactgagagctactagctgcaggggagatgcgaggcgacgcggactgagtgtcttcgggcccactcccgatgacgggccgcgtggtggtctattggcccaaactaatccccacagggcgaagaatagatggcccattacaatcgaccttcgcgggccccgcgtagtggtcggctgttgcctattgggtgggccgtgatactgggccgcgtttccgatagctaaaggtgtgatttgcctgctgcattatattatattgctccattattattgtgcgatgtcatgtggtgagtgattgtggattccagcatctgtacaagaatatctatctggttgagtatagaataagtagtgtgccataaatattcatacagtgctcgacctaggaggacgatgttttgtccgtctataattgacttagggattgggaattgggattatt

SEQ ID NO: 23508 - DNA, 757 bp, Oryza sativa
tcctgcagcccccaatataacctctggtgttgactgcgcctcctctacagatgcatgattgacacgggcctgaacaagcttgggtccggcacgtcttggcttcgggcacgtacataccatgtgtccggacttgttacaattgaagcagagttcgggcatttctccaaacttcttggtctttctggctaagctggcagagctgactgaactgactgagctagaatcattagtggacttggagtagagttgaggctgtgctgctcactgttactgtgattgtcactgttgttggtgccgttgaaattaccggggtggtagggacggtgttgccggataatcatggtggaaggtccaccctgatgtctcatcgtgaagcgaggcttctgactcttcccctaaggagtcctgaactgagctgccttccacttacggtttattttgttacactgctcttcctgacggatagtcttgtccacaatcttatcaaagtcctcataatccttggagatcagttgattggtcaattcatcatcaagaccagacagaaacttttcctgcctctcggcatgtgtgcgcacatcctcaggagcatagcgcgcgagacggttgaactcatgcaaatactcaataactgtcctagttccttgctgcaaagaacagaactctctcttcttttgtgccacaattccctcgggaacctgtgccttattgaaactctgacaaaactctgaccaggtaacttctgtcccagttggac

SEQ ID NO: 23509 - DNA, 25047 bp, Oryza sativa
cctttgtctgctcaatttcggcagccaacatcgtagcttcagatttcgatgcatttgatgcgctcttgagctgctctatctctgatgtcaccttcttgatctccatcagaatgtgtgacgaatcctcgcgccttctttgcctatcattcagcgtttgcagcttatgtgtacgcgatccaattcaccctccagcgaagagatcaaggatgtgttggagcaaaccttctctcgacttctctccaccaagattttctcttttgctatctcattgcacagcgactcaacggaggctcttatctcggctagatcagctgtggttctggtcaagtacgcttttgcctgctcaagctgcattagcactgaacttggaggctgcagattctgtgaatccaggccacccaattccccatcagtttcaacattttcagaagagcgcctctcctcaggccctgcacctggtgcttcagtttggcccgggtgtccagtgatggctgaatcattctgcacttttagcttcaagtccgaaatgatccttttggaggactctaattctttgagcacatcaagcgtctggctttccttgatgatgagctccttctctagctgcaaggtctgcccattcatctggtcatgttcctgcaatcggattagtagcataagacaaaagggagcatacaaatactgatgcagatttgcaagctgattttgctaatacaacgaggacaaaactagtagtacaaaacactcccaactgtactgaaacattaacagttcgttcgacactcaacagcacggtgtttggacttgggagaaatggagaacgaagcacgaatattgggaagattactgtaggaggcgtcaccttcgggggagtgagcatgcggttgacgaggcaggagctccagacggcggcggcgccgccgccgaagtggtcgacggcttcgcgcaccgactcgaagggcgccgacgtgtcgatctccgcccttccaccgccgccgccgccgctcccggccggagcctcctcgccgttcatgtcgagcggtacagtgccaatacagtgctgcaaagatgatctgttgttttgtctctctctctttctttcttgggtcttgtgattttggggaagagccaaagcaaaggaagagaagagaagcaaagccaaaaatgccaaatggcatggaaggtttggattgtttggaagcgagtggttttagacgaggaggaggcgggagttgggatgctttgaccgttggcctgtcattgcagaacgcacccgccgcaaaaccattattcatatgcgttctcgttgcgggattagactcacgagagctctgctccaccgcatttgatcacttttggagttcaataatccctttttttctctgccgggttggcccggccgaacgagttcaattatttcaggctgccatctttctaagcattgcgaaacagtggctgtagatggggccgcgtctgaagcttagggtctggtactctgctgccgccctggatcattcatttccccggcggcaaggggcgtgccgtggcgagcctgttttggcgcacgtcacgaggaaacagtgagtgccatttctccgccgtggcgcgccaccatcacgttgtagcgtgacaacgctccttgaggaacacactgttgatgtgatcaccccgtgcaggacttgggggatttactacgaactcgggccatgcttatctgccatgtgggcccagtcctgatgggcttacgcagttttacgcttctgtaaggtggggtttcgtagcatcgagacgagtactgagtactactagctgggagctgggcccctgtgttggatgttcttttatctagttaatctaacttaattaggccgtatgtgagctgagtatcaattggctaaacaggcgggccgtaattaagctgcccatcaactcatttaatcagccgcatgttagttccagagttctacagcactaaccttgaaagtccggagaggagcaaggcccagacgtccgtacaaaaatgttttagatgtttcaccgaaatgttacaataaaaatatttaagatgtttcaatattcggtaaaaatgtttcagcggttagagaaaaatgttcaaccaaatgcaatatttaaataagctagtcgcaacacctaagaattaaagtgcgcaacatacaattaaaatatagtaaaacattcaattacaccaaggcgtaacatgcatgggaaaataatagcttgcaacatcctcacaaaaagctccaaaaagaaaaaataagatatggcctacctcctgcatccttcctccactctgacaaatggatctgtctcccttattgtaagatctttcaatctttggtcgctcaccggagattgtggggatggcaacaaacgaccttgggccccctatgtcaggccgacgaaaaatatagagagagatagggaaggggtcaaagaggcttgatgtgttagatggaaatcgcgtgaaagagagacaattttgctatatatttgtctataaatttcctcttaaaaatttgacagatgtaattaagtactatcatagtataattacactgtaacttacatgtaattacattgtaacttacatgtaactataatgcaacttgcatgtaactttcacatatttcttgttggggaataaccacatacttagagtgtcgtataaactaatgtataaaaggattaaaatacccccaagaggatgttgtacatatatagtaaattaagggtaaagatgtaatttcccgttacatatgaataaaataagccctccaaggacaagaggatctcccccccacacccccactccattctcggccatccaaactttatcctctttctctcaacctctctcctaaagaactcaagcatgggctctctcctatagaggagagggcccttgccatgcattttagactttgttccaacaattttgaaccattagatttgtttcatgtgcaagtgaagaaggaaaaaagtcactacacgcacacatgtgagaggattcattcccacgatctccgtttcaccaaaatagcatgttacgaagagattgttaagagttatatacaagttacaatataatcacatcacgattgtactataattggatgcgaaatttttaggagaaaatttgtcgacaaatgtacagatgatcccataagagatgggtaaatgatggtggggccgaacacggtcgaatgtcttacacgaagcgttttcatgaaagttcatcatgcacgcgtcgatttattagaccgtaaggcctaacttcctcataattgggccgtatatggcccacagaatactttagtcgtgaaatgcgtctatgggattatgtactagtcgtcgcctaggcgattccttacaaactatcaatttatcgatttttatgtaatctatctaaaaaagaaatgcgcccacgggattatgtactagtcgtcgcctaggtaattccttgcaaactatgaatttatcgatttttatgtaatctatcctaaaaagaaaaacatttttaaataatggccactgaatgaagttttgaatagaaaataagttttttttatacaaattgctattttgatattaggtcaataacaacattcccaatgtgcgattatggagttctctctacaactcaacttatgcctgtgcatgagggtatatcgttgcaggtaagatgcaaatctagttcaacttttttatattatttttatcttatttattgtggtaaatatgtttgtatttttagcacgattgacgattggtttgtgctgcactattgccgcaatactcgtctcaccagagacataaatttcatggctgcactcataccgcgacttcaaatacaacatgactatgcaatgaccgagacagggacacgcatgtgaaagcacggcattgagagtctaaatttgggttgctgcataattatgaactgcttgatctctaaaattgtaaagtacttgatctctgaaattgtaaagtagtgctgcctttagtcctaaaattgaagttacttatattcagcaagatcatatgcggctctatttgatttttctattgcttggaagtaagaaaaatgtgtttttcaaatgattcctgctattcatagtttataggccaaagttgtactaaatttaatgtgtcattttatgcataaattctgatgaattcaaacaagtaaaataaattttaagattcatcagaattaattggttcaaatatatttacttgtggatttaaatttttgaaagatcaattatttattatatttagagtttttttaacatatcctgtgtaacaaaaaaacacaatcattttttagctgagtaggtattaatgatcctattctgtgatataagaaaacaagattttctttttttctttgttttggattttttttgcataataatgttgggtttaccgtatattctagagttatatgaatagtaccgagtagacgtaggatatttaaagaaggaaaatgaatgtaaattcgttattttagatttgttttttcttaataattttaggtttattatatattgtagagttataggagtagtaccgagtaggcgtggtatatttatagaagacaagggagtagaagttcgtgtggttggaaagagaagatctggaagccgaatctatatgtgatatttttctctagattttttctcacatatgattgttaggtgtttgttctctagtataaatttataatttttctccaaggtaagaggcgccaagtggaccaatcaaaagctagcaaaagtgccagctttagattatgagattttgcagtaaatgggccggaatgttccgctttcggccctacaacgggacgggatatacggccgtaaaagagcctgctgacaggccataaaaggcccacagagtatcgatacaggggcctgatggtccgaaatcaacataaaggagaagggataagttcactttaggtccctctatttgtcgtccagtctgattttcgtccctgaaccgtaaaactggatacaacccgtcccccaacttacgaaaatgggtaaacgaggtccctcggcggttttgatagtggttttggctgacgtgacgcatacatggctaatttgactcggtcttcatttgacgtggcacagacgtggtgcttacgtggcaatttgatctaagaaaaataataaaccttgtgaaacccacatatcagtttcacacataaattaataaaaaaagtgggacctacgtgggccccacatgtcatcctcactcctcccccttcttcctcctctttcccctttcttcatctctctcccctcctctctcacgcgtgatggagagggagcggcacgcggcggcgccgacgggagaggaagcggcgcacgccctccgccgcaactagcctccaccactgtcgcctcctcacgctcttcgacgccgccggcagcagcggagcggtgcgcggatctagagaaagagggaggggagagaggagaataaaacctcgccgtcgcccctctcttctccaccgccaccaagctcgtcagcggccgcccgccggagcgaggagcttccccttccccttctttcacccgggcggcaccatcacgcgccccttcgtccccgacgcgccgccgtctgccaccggccttgtcctctcccgcgacgggccgctcgacgcctccctcgacacctccccaacctcgtcccgccaccgccgccagcgtcaaagctccctgtcattgtctacttccacggcggtggcttcgtcctcttctccaccggcagcgtcttctaccacgcctcgtgcgaggccatggccgcggccgtgccagccatcgtcatctccctcgactaccgcctcgcgcctgagcactgcctccccgccgcctacgtctccgccgtgctctggcttcgcgacgcggcggcgggggacccatggatcgacgcgccacgagggaggtcgcgggtgcgggggctgtcgccgccaggtgccctgcccgctcctgcccgtcccactccgaccgccaccgctccttgcccaccccacttcggcggccgccgctccttccccacccactccggccgccgccactcctccctgccgctccgccgctgccacccccaccgctccggatggagagagaagagggaggggatagagagaaggggtagtgagaatgacaggtggggtccattagtgtgtgtgtgtgtgtgaaactgacatgtgggtcctgtaggttttattattttttttatcgaattgccacgtaagcgctacgtcactgccacgtcagatgaagaccaagtcaaattagccacgtaggcgccaccttagccaaaacaggggtcaaatactgcccagggaccttatttaaacggtttcgtaagttgggggaccagtcgtacccggttttacgatcaatggatgaaaatcagactgggtgacaaattgagggacccaaagtgaacttattccaaggaggaaacagagagaaatatttcaagtttcaacctatgtctaaagcacgcgtttaaatatttgcggcaagtgattgaccaaaccgtgtgattgtgatccattgattaggtcaagcatcgccttgatacatgcctctgttctaaagcagtggcagtttattaacctgcaaaacaacccaaaaacagctgttccataaagcattttatacgcagtgctggagcatagattatagcgttcggatggtttcttatcgtgttaaactggctcattataaaggaggatatgatcagtcgattttgctggtttctgcaagaaaactatgctaacaaacttgcttaacaaaagtagttcctcattattttacttatggacgatggctcatattcaattcggtaccaaaaaggttcatcaggtaaatatccgtgtaataagtaacattttgttaagaaaaagcctgtattatgtttcagaaaataaacaaagaaaaatcctgtaaagaggtcggcattactcgcaagaaaccagtagcactttacatgcctgtcacaatttggtaattgataagatggagaagaaactgatctcttctttgacaagcctcgcattgacgcattctgaaagcctggatttgcattagatctctatcatacaccgaaaaaaagcaccggttgttaacctggctaatagtgacgggtcaatcgcacatatttagcccattatataagcacacagtctcatcagcatcacactccaaaccagcacattcgaccatctcactagctaatcgctggtactggaagcagtagtagcagcttgccaaaaatggcgccatttcttgttgtgttcgccgtcatggccgcggcttttgcgtcggcctccggctccggcgagctcaccccggacttctacagcgagacgtgcccgcaggcgctgacgaccatcaagctcgtcgtcggcgccgccatcttgaaggagccgaggatgggcgcgtccttggtccggatgcacttccatgactgcttcgtcaatgtgagctagctactaaatcatgcacgcttcaacttagtggttaattgctgcagattttacaagcagatgagatgttttggtgatgaacgaacgtgatgcagggttgtgatggctccgttctgctggacgacaccgacgacatgatcggggagaagctggcgaagccgaacaacatgtcattgagagggttcgacgtgatcgacgccatcaaggtggcggtgaacacggcctgcttggggaatgttgtctcctgcgctgatatcttggcagttgctgctcgtgattcaatcgtcgcggtaagttcagtacaagtgtaaaacttatccacgttacacatactgtcgattgaaaggtactactagtagtagaaagctatctatcgaacagggcaacgtcatcgaccataagacaaaccatgctccttttgaaaatctttcttcaacctaaacccaataaccggctttcatgacatcattttcacaagagaatgagtcgtgattcacttatctgaaaaactgcggcacatcctgatcctgttgacttggtgaggccaaaatgagggtttatttagttggcaaaaaaatttgcccctgcatgtcacatcggatatatagatatatatttgaagtattaaacgtagtctaatactccatccatcgtaaaatataaggcacaaccacttttacgtattgtagattatgtcaggaaactgcgagacgaatttattaatcctaattaatccgtcatcagcaaatatttattgtagcacaacattgtcaaatcatgacgcgattagacttaaaagattcgtctcataattttctggcgaactatgtaactgattttttttacatttaatactacatacatatgtcaaacatttaatgtgacagcacgaaaaattttgtttgggagtttagggaactaaacagaccctgatgtcaatgcaacgtgacacgtacgattcattttgtttgcagctcgggggaagctcgtacgaggtgctcctggggcggcgcgacgcgacgacggcgagcatcgacgacgcgaacgacgacatcccgaacccgttcatggacctcccggacctcgtcgacaacttcgagtcccacggcttgtcgctgcaggacctcgtcgtgctctccggcggccacacgctgggctactcccgctgcctcttcttccgcagccgcctctacaacgagaccgacacgctggacccggcctacgccgcggcgctcgaggagcagtgccccatcgtcggcgacgacgaggcgctcgcctcgctggacgacacgccgaccaccgtggacaccgactactaccagggcctcacgcagggccgcgcgctgctgcacacggaccagcagctgtaccagggcggcggcggcggcgacagcgacgagctggtcaagtactacggcgagaacccggacaagttctgggaggacttcggcgccgccatggtgaagatgggcaacatcagcccgctcaccggcgacgacggcgagatcagggagaactgccgggttgttaaccagtgagtgatcgatcgatcctggtgtggtcaagcgacacacgacacgagtcatcgccacgaatttgcatggcacctgtggtagctgctgatttcttgaagggtgtgcttgcatgtacttctgattttgtgatggcctgctcttgtatttgaattgttttgaaaattatgttccatttcaaccaaaaatttaatatctgttcagacctttcccttttatttttgaaactcggatccgacggtggacacaggagtactagtgtgaatgagctacttccttaatgggacgtgacccagttatactgggctttttcatagaagcaccgacatgttacgaacgagaaagttcacggcccaataaaaaatgtctcatgtggagatgacccagcagcccagccacacgcattctgatcccttctgatgggtctctcggtctctcgtgtggaatactagtagcttgtaggaataatatttagaagatgagtatagtataatcctccgtgcctttgcaccagaaatttcgttacatatacgccatgcatatgcccctctgtcctctgtattccatgcacatacagatggaacaagaaacagagcaaggcaaatctgcatgtaccacatctccacgtacacattgctattcattcagtcgtagtggttgtgggggtccttattttttcacgcactccatcgtcttatacgtgcataactgcatatactgctacaaacgttgttactacttactgcagtgtctgcagggtactcgcttacgagttcaccttggagcagctgagcctgatctggccgtttgttcccgtcttgggcgcgatgttccccatgttcaccatggccgtcgcgaaggcgctgctgaactccgccgcgttggacgcgaagttcctcaccgtgttgtccgtgctgccgttgttgaagagcacctggtccgagtgcaggaggcccttgttcgacagcaggttggtgtagtaggcgttgtcgaacgcgttcgccgtcgtcgtgtccagcggcgccaggttcatgtcgccggatgtccgtgggcagttggcctggcgttgcgtcgcgaaggccgagtcgatgttggtctcgttgtagatcctgcccctgaaggttgagcactgcgcctgcccgatcgtgtgcgcgcctgaaataggagtgcagaaaattaagcttgcttggtttgatggtttgtgagcatatatggtggatctttacctgagagagcaaccatgtcggttacgctaaggcccttcttggcgaatgcgtctacgagttcttggaggctagcggtaaaaggagggaggtcgctgatcgcgagcgccgcgcttgcacctgtagagtcccttctccccagcgggacagtccacgttggccctcccagctgcatgcgcgttcatatgattattactccattggttaagtacaaaagccgaagcctaataatgtcatatatatggatcgggatcatctgacgtaaaaccagaggaacgtgataactgatatatgagttccaccactgacgggctcacctgttactgttagtgatcacgttaggaagaagttcacgttagaggatccgtttcccacgtacaaccatacaggaatcgatcgagaggagagttcgagaccaagcgtgcaggctatgcatgcagggaaagtgatcttacagcgacgacggagtcacgggcggcgacggtaaggatgtcggcgcatgagacggtctgattgcacacggcctctatctgcgccttgatgctgtcgatgacgccgtagcctctaagagaatccttgtttggaggagcatcctgctcgtttcccgacaacagaacagacgcgtcacaaccctgtacagttagtcaaacaggaagaatgtatggttatttgtcttgcttgtcaattgtcatctaactgcatgcacacatgtacaatatatggttatttgtctgaacatgtcatctaactgcatgcacacatgtacaatatatatttaacttttctagttcaattcaaatatcactcaagttgcttgactagagatatactgcagtaacgtttaagtcaaaatggaacaaaggcgctggttatgtgtggaacttgcttggacaaaacagtcatggaagtgcagcctgagcagcgacgcgcccatgcggggttcgctgttcacggcggcggtcacggcgctcttgatgatggacatggctctggggcacgacgtgtcgtagaacgtcgccgacagctgcgccgacgccgcggtggccagagccacgaccacaagcaaggaaatgcaagttgctttggccatcgctaagctaacaattaaccaaagatatatacgtttatctctgcctagcaatgagctatctgcacttggctgtggcttgcgaggagagtgctgcatcccatgcatatttatagctagagatttaattagcccacttggttacctgcatatctctgtacttctccagcagagacaaaacattcagatttgatgccttaccagtccagggttagtcctcacaatccactgtcgttgtgcagccattttgatcgtgggtatgaacagtattgaccaacgtgtgttggcattcgacgtgctcacgttgtgtggtgaagtaatttggcttgcatgcacccaagagagacatgatcgggtgacagcgcccaacttaaattgcaaccgccaacactaacccctgcttccctctttcaccgggcaaaattatagtatatccttggaattgtcaggcatcgcttgcaggaaaagtctgtgaaacaatggcgtaacatggctttgtcactttagttacagctgtgttcgtgaactttctatgagcaagtgagtggaaaagtgtggaatactacatccgttttttaaatagatgacgccgttgactttcttttcttacatgtttgaccatttgtcttattcaaaaaatttacgtaattataatttattttgttatgagttgttttatcactcatagtattttaagtgtgatttatatcttatacatttgtataaaatttttgaataagacgaatgattaaacgtgtgagaaaaagtcaacggtgtcatctattaaaaaacggagtgaggagaacagaacagccaccatccctggtcatccatttcactaaacagtctttgggctaccagtatatactcgtaggaaacaaataacagtacagtgcactactactgtaggtagcaccagaacagtaactgttgtgacactgatccaagagaatgtcctaacagttaggacaccacgcctcgccttaaaccatgtaacagttgaatgttcagctctcgcatccatgataatgagtttgtctgccatgcaatcaagcagagttcatttcagttaagctggggccgaactccattgccatttcgatctatcacatacgtgggcatgttcggatgtgattgctaccataacagccgttattgcggcagttcaaaatggctgtagcttgcaacggttcaactacctcagccacagcgtctgtagcagcaatcgcagccaatcaaggccagtactgaattaagttgtaatgacaatatattgatatttcttctgctctcagtatctgtttgtgattaatcagaatctgtacacccgtacattatactagttgatcagcaaagattcagaagaatctgaagttgtaagttactttcacggaagagggattctaatcccccgagagaatatcaacgcgtataaccttttcttttatatttaatataaatagttgtaaaattatttaaaaaattactaatgtagagtataaacagcatataccattctaccaaaaattatattcaaatttgatccgcgcattgagaaataaaaagacaaattcatatgtgaatagtaccaattaatgctggatttgttttttaatttcatttctcaatgtgtgagttgagtctttacttgattttttttagagtagttcatatatatgttgtgaatgttgtcaattttttttggagaattttcaatatacaggtaaaacttcaccgttcagaatctagattagttcaaatatatggactgtcctcgagaagaatggcagaaacaattagtcaaaatttaagcactcattatgattcttaaactgaaatcaaatactggaaatacaaacacatgtatttacaatatcgtgtccagcagcatatgaatgatgatttagaagaagaaaaaacataaagggttcgcgaagaaaatgaaaaaaggacgtatacgagaaacattcacccaatatatttcatgacaagtgcaggtccaacataatccaccggatgtgcactcggtgtggaactccgtactaacagacgaaacacaaccctagatgaatcgattggtcagcatttgtccaagataattctctccttttctgaccgttgtgcagtcattttgctttcctttcaccttcagaatgtttaaaacgacgttgacagctttttttagttttcaattcattttttttcctgtaaaaacaaatcatttcattttctacccgccaaaaaaaagcatttcaatttctgccgctggtgaattttaatgggccgaagtagtggcagcctgccaagtaaagagtaggcctttgcgccgcgaaaataagccggcccacgccccatccaccacgtagcacgctcaccggcatagatgggccaaatcgtcaccttcacgggcctttgcaacgtggagcaaaatatcgccgaggcggtggagatatcttaactcgcgccggcggcgcgcgtgtggtcaccggccgacggcaatccagaaaacaaaaaatcttgctactgcaagatggaggacgaacaggtctagcaagattgcaagagcgggagtcctctctctctcaaaaaaaaagagagagggaaaaaataacttgtaacaggagtggattttgtattggagagagaagtcggtacagatcaagaagcatgcaaacctgctaataaacggacgcagattcagtaacattccccgtgacattctcggtgacatcttcactgaatgctctacgattttaaaggactataattgcgtatgctaatacgagcgtacctcctccgttccaaaaaaaaaaaaatccaatcctaataacgaacatgtgtcaagattcattgttaggattggattctttctaagacggagtagtatgtttcacctgtaattaattgcaactggaattctttccttgatgcattcgtgcactggtaattaatcatgttgtcgagtgcccagcgtctggatatatacaaaccggtcgatcagatcacgagttgacggcggagcagatgagcctgatctgtccctgtgtcccggtcagcggcgagatgttccccatcttcaccatggccgtcgcgaaggcggcgccgaacgccgccgcgctggacgcgaagctcctgaccgtgttgtccgtgctgccgttgctgaacagctcctggtcggagtgcaggagccccttgttcgacagcaggttgcggtagtaggcgttgtcgaacgcggtgggcgtcgtcgtgtccagcggcgccaggttgccgtcgccgctgcccggcgtcgccgggcagttggccttgagcgccgccgcaaaggcggcgtcgatgttggtctcgttgtatagcctcgtcctgaagcccctgcaccgtgccataccaatcgtgtgcgcacctgcataattgaaacaaaaacatatcgttttcaaatttcaacacaagctgttgtttactacacttccatggttgattaggagatcgatcgaggagttatatatattgtgtgcacctgagagagcaaccaagtcagtggcgctaagtcccttgctcgcgtacgcgctgatgagctgtgcgaggctatctgtagaaggagcaaggctgctaatcacctgggccgcggtagcggctccggtggagtcccttctccctagcggaacactccatgacggacctccaagctgcatgccaaattaaaaaccaaataaagcaattcagcatcacagaattcgtaatcgcgagctcgatatcttgtgtcgttgatatatgcatgcatggttaccgcgacgacagagtcgcgggcggcgacggtgaggatgtcggcgcaggagacggtctgcttgcacacggcctcgatctgcgtcttgatgctgtcgatgacgtcgtagcctctgacagaaaagtttggggctgcattcctctcgtttccggccagcaaaattgaggcgtcacagccctgtgttgattcagacaaaaattaagccacgattattttcttgcaacgctgctaactcacgtagtctgacagacaggcaaacctgttagctacttttcggccttaaatcaaagtaaaaaaaaaaaacagggtggtttgtgagatggaaacgtgcttggacgaagcagtcgtggaagtgcagcctgagcagagacgcgcccatgcgtggctcgttgttcacggcggccgtcacggtgctcttgatgatggacatggctcgggggcacgacgtgtcgtagaacgtcggcgacaaatgcgcggtggccgtggagaccagcgccgcgagcatcagtaataggccaagagaagaggcagaagccatcactactctttggaacagagcacactgcagtttcttcctagcaagtactcgtagcaactactcctgtctaagcagctcttgcaagagaaaacgctgcattgcatgcatatttatagctcgcgattttctcccagcaaaatgagcctgcatattgctagatagtagatacattggagataaacagccaacaagtatattcgggagttatgtcttcacatatgccagcaaaagtgcaaaatcttggtcgttctctacttctctgtagggactccctaatattactagtacgcatgtgtccaagtctgataacaccagacttgatttgctagaaacgatggctgctacaagccaacatatgcagcattcgtgtgggagagggccaaatctgtcaacgtttcgccagagctgcattgctgtaaagtaattttgcattctagttcctcttggctggataaaccgatgttgacaattttaattatcttttagtttctatacctgtccgacataagtggttttcactttaggcacagatttctgtttagagtttacaggtaggttagccccattttaattgctgaaccacccccccctatatttatttgaaaaagctaatactctctctttcccaatttaatcatcatataatggaatccaaaatttttcaagttgatcatcatataactgcatggacacgaattttatcagaatacaattaatacatcatgggagaatgtagggagtagaaaggtaacagtattttttaaaaacatagtacagtcgtgcaaacgctcatataaacacacaaactaaatacttcctcattcctaaattgatcatcatatatgtttatgcacgaggaccaagtataatttaaatcacattaatcaaaacaccatgcacacattctcccataatgtatgtatcgattaaaacaccatgtcaattacatcttagcatgtacacattctttcatgctgtattaattgtattttgataaaatctgtgtccatgcggttatatgatgatcgatttaagaaattttaaattccattatatgatggataaacatgggaaggagtgagtacatcattgcttttattatctggttctaattttatcttccatgcatgtattaggattcaaacattaattaattgggcatgtagacaataaattgatcaaaatttttaattaacgtgggagcttgtgcactactagttgatgatatatctataagattactattttttggtgtacgtgatcatcttccatttggccaccatttctcttctcactcgtttggaaaagagtttggacagtatttggaccacaactatttccgaagtaaatcttctaccagaaaaaatagacgaacacacattttctgataaaccttagccagtcgaattatttgggtgatgcacaagcagttgaaatgatgaaccgagcgactgacaggatgaggtcaacagtcaacatgctataaattgttatgccaaaccgaacaaaactatccgtgtgcgtgtttttttggacgccatacaaccctgctatacacatgcacatggcgatttaaggcgtacacaggaataagtccacttattccctttttttttcaactcattttcctctttttttcatatgcacgcttttcaaactactaaacgatacgttcttttcaaaagttttctacaggaaggttttttttaaaaaaatcatattaatttattttttaaaatttttaaattaatacttaattagttatacactaatgattgtttcgttatacctgccggagaggaggggttcccaacccctcctcccgaacacagccggggatctgtcctcttaacattgagttcgaattacattctcaaattggacatggctccttgcatcgcatcgggcttggccgcccttctccccacacacccgctggacgtcggctgccaaccttatccacgctgcttgcgacctgcttcctggttggggattgggaagagaggagagagcgggagagaggaggaaagagttagttactaacacacgggctagcatgggtcccacgctaactcagcacaactgaccagagtcaaagcgccacatcggacgaaatcaggagccatactatattagaacgaaagttaacacggttttacgagttcggggacaggctatacttgatattgcggttcagcaacgaattttcaaacttgccatcaaagatgcgggacgcaaagtgaacttattccagcgtacacaagcggactacaatccactttccagaccagtagcccattaactaggcgtagttgggccacatcacggggacactaaaaggtgcagcccatttcagctctccaggcggacttcttaagttcatctaaggtcccttaacttatcaacgaatccgattttcgtctttcaaccgcaaaaccagatacaacgggtcccttaactatcaaaaccggtgcatattaggtccctcggcggtttcgatggcggttttggctgacgtggcgcctgcgtggctaattttgactcggtctcgatctgacgtggtatgacgtggcgcttacgtggcaatctgacccgggaaaataataaaccccatgggacccacatgtcagtttcacacacaaaaaaaaataataataatggtggaacccacgctgccccacatgtcagtctactcacccctcctcttctgcttcctctctctcattctctcctctcttcatctctctcttgcactaggggatgcggccggcgacgacgacggcggcggaaatggagaagagtgattgccagaggcataggtgtgacgtcgccgggggcgctttgaggcggaagtagactcttacgacgtggccgttggaggtgagcgaggtcgtcatggactcacgggattggcggtgtcgtcggcagcggcggagcaggagttgtagttggagtcctcgtcgtcgacctcgagttcatcaatgtgctcgagcatcacccaccattagtagtcgccgacggcggaaggtagcgttgccatctcctgttgggtttccatgggccgcggcgagcggatcgatatgggttcctcgtcagtccggccggaacggtgttttcttgcccaaaacaatgatcatttattcattcatcaaccccgtcataacacaagcaaatgatgatgacgaagcaaaatatactccagtcagctagtactagtcgctatttcttctacctttgtatgattaggcatataaacgcggagcggaggtcgtcggctctggtgccccagccgaggccgtggacgaagagcttcctgctcacgggatcggcctccgccgcgcgccgcacggtcgtcatcatcactagggtcgtcttcgcagccggccgcctctcccctctcccgccggcgaggtggccccctcacccgcccacgtggacagccacctccgaggatgcgcgcgtgtgtcggccggtcggcgggacacgttcatcccgccgccgaggatgccgaggtcgacgtcgacgtcgtccgcagccacggccgcggcggcgctgcctccgccaccgggctggttcccttctatccgctagtttccctcccactagccgccgcgccgcgccccttctcccagccggacaccgtcctctccccgccgcccgtgaaccggagagaagagagagaggagaggggagagagatgaagacagagaagatggggaagaggagaatcagaatgacccagcgcaagagagagacgaagagaggggaggaggagagagaggaagcagaagaggaggggttaattagactgacatgtggggtccgcgtgggtcccaccattattattattattgtgtgtgaaactgacatgtgggtcccacggggtttattattttccggatcgaattgccacgtaagcgccacatcagtgccacgtcagatcaagaccgagtcaaaattagccacgtaggcgccacgtcagccaaaaccactatcgaaaccgccgagggacataatatgcaccggttttgatagttgagggaccaattgtatctggttttgtggttgaaggataaaaatcggattcgttgacaagttaagggaacttagatgaacttattccccagaagaaaccatcgcagaggccagatcgccagagcagagaagagcagagaggggccaatacattcgaaactagcacttcacttggttaacacgacagttgaaatctgtagctgctaggattacgacgaaagagaggtccgtaatcctcatgcctttgcatggcaactcgttacatgacatcacacatgcatacacctacactctctagtctgttccgtgcacttgctgatgaaaccattgaaccatgaaagtgatgagatggccacagctagctgcacgctattggcagcaatgtcggggcctagctttattccctgagaccatcacgtactcgtcatcaccggctagttaaccttggagcagttgagcctgatctgcccctgggttccagtcaagggcgagatgttccccatcttcaccatggccgccgtgaaggcgctgttgaacgccgccgtgttggaggagaagttcctgaccgtgttgtccgtgctgccgccgttgaagagcacctggtcggagtgcaggaggcccttgttggacagcaggttggtgtagtaggcgctgtcgaaggcgttgggcgtcgtcgtgtccagcggcgccaggttgctgtcgccgctgcccgtcggccgtgggcagttggccttgagcgccgtcgcgaagctggagtcgatgtttgtctcgttgtagagcctgtccctgaagttctggcactgcgcctgcccgatcgtgtgtgcgcctgcaagttctcatcgtattatgattcttatcagaaaatttgtaagagaatcaatcactgatataatctgtgtacatatatatgtacctgagagagcaaccatgtcggttacgtcgagtccctttctggagaaattgccgataagttcagcgaggctagaggaaggggcagggaggtcggtatttgcttggctttcgttcgcagtggtggagtcccttcttcccaatagaaccgtccacgacggccctccgagctgcaaatataaggattccaaaccaaaccaagagcgattaggagtacgtactactacagtctacaagaaatatatgcatcatgtagtaatctcatccgtgatcttaccgcgacgacggagtcacgggcggcgacggcgaggatgtcggcgcaggagacggtctggctgcagatggcctcgacctgcgtcttgatgttgtcgacgacgttgaatccccgaagtgacccagcgttcgggcctgcattctgctcctggccggacagcagaacagacgcgtcacagccctgcatcatcagtgaagtccatagatacatcctctgttattaatttccttgtctcaaagtacagtctaaggagaactacttgtacagctgattagattaggtgatcaaaacttgcttggacgaagcagtcgtggaagtgcagcctgaccagcgaggctcccattcggggctcgctgttcacggcggccgtcactgcgctcttgatggtggacaatgcgtttgggcacgacgtgtcgtagaacgtcgccgacagctgcgccgaggcggctgaggccatagctgcagccacgagcagcattaagctgacagaagaagccgaagccatgcagagtgagcgatatgatgcgccgtgcgcgtatgcttaatcctacctaaataactgcagttttttttaagctttttcgctggccgtggcttgcaagagaggctggtgccacgctgcatcttatatagctagcttagctacaggcttgacgccatcgattggtgccgagatgagacgaaatatgcaggtacattaatcatacgaggggagctgggcaggggaatgtattttaatctcaataggaatatcctattgctttgtacatatctctactaccttaaaatcgaactcgtcattttttcatccctcctcccaccacgcacagagtactatctctaattttctaatagcatatttctacttatatgagcctggcacattacaacagaaggatatgtttctagtcatctaaatagttatgtttttactaacaaattgcaagttgaattttaacttctataaattacaacacaaaaacaaatatgagtgtgaatgtgtgcatactaactagctagaatttaatttgttcaacttcaatatatcgaatttgaatctgtattttttaaagtgacatcatatataatttattagttaactttattagtgctactagactactagtacttacatgtgtgtccaacataagtttctacgtacggcctacggccaacatcatcacctctgcattattcatgcaatgtagggtcagttcggtccatttcgcttgaccttaatctgttaaccattaatcacgcgttgcttaagccaaaaaaaaagagcacccgtgccatagaatagcacatgaacatacaaatgccgtcgataatttgtccctttgttaaagattggtatgtatgcactatcgtcgtacagagtttatgaaaataactttaccttattaatactctgctaattgatctcgggtataatagtgcgagaactattcagctcgtgacgagctagaatggtctatcgcaattcatcttcttatgtacgttcggactaattgtctaatttaagtgcaaacggtgtgttacaagacaatatatgctgttatagcattacataccgttgtgccatcattttcgatcaatctccagggaaaaaataatagatctgcgagagctttcgcatcagcgttgccatgattaaaccatgcatgttggtgatatgattttccattcgaacgtaattagctatcacaagttgggccgacatttctagctctagctagaatggtggttgttgcatgtgccgtatgttactcttgtttcttaagccataaaatgcggatagtaaaataattaaattatcgtatagttcctttgaaaaaaaattatggttaaccgagtttcacggctaatattatacagttgctgagtgtttcacaaattattcctttttgaatgaaataaaatactctcttgatttgcaacttagattaaaataaacacaatagcacaaataatattatcgtgtacagtggtccacctagtaggttggtggcctgttcactttgtttacaaatttactacctcaattctaaaaaagaaaaatacaattgtaatatttaaaagacaaactagtatagtataggaaaaatactcgaccactcatcaaatgagggacagttgggaatggtggagtagctaggttagtaatatatgggtgaatgagtggtggttggacgaaaaagcaatactatagagtacgttatatgttggaataaatttaaaatctaaaattgtattctttttgaggaggagggaatataactttagtttttcctaatttttccattactaaattttgctaaggtaaattactgaattttgcctaattgattatggcatgtttgatttgttgcttatcaaaatttatagtcgataaagttataaataacaacaaaagtgtacgttagtttccctccggcctagccgcctacaggtgacacgaactaaatgaaaggccggcctgctcagcgcccacgggccaccatccctggtctgacagacactgcgagcgaaatgtggcgtcacacggtccaaaggcccaataggtaggtctcggaccattcgggcgtaaaacggcccaagcggaagggcggcgcttgcttgcgtcggtgggagtttgggacggtgcggccgcgcgggatggcaatggcacgtaagacggtaggagtacaccgtttgataattgatactcaaagagtcaaagttcaccgtgtcaaccaacatcaatagcgaaacagagctcgatgtgcaggggtggaaaaaaaatcgaacttacgagctagctcaacttgtgtaaaactcggctcggctcgacttaactcgagtagttaatgagtttgaacttttactcgtttacttaacgagccaactcgagctagctcgtgagttactcgattagctcgttgagctcatgatacactaagatagaagttaattgttcatattttacaggtgtaaaagtcatatactcataattatacattgtagtacaatcttatgagccatgatacatagcacgccaatcataatttttgtcatagaatcacaaattatattgcatatgaatttcaaaccatgttttttggtgtaacacgtttaatgagtcaactcggactttttaatgagtcgagtcgagttccatttttaactcgttatgttaacgagtcgagccaagctagctcattaacttaatgagtttttacgagtcgagccgagtcggcttgttagccacccctatcaatgtgtgtgccaaacacgacatttatgccaaagcggggattgcgctccctaattctccttgtcgtctagaagatacggaaggagaggaaccaacaaaatttctaacaaggagaccacgacaataaccctcctagcaaaaatagaggaagaagacttggactatggcaggaacaaaatgacttagagagttattacctatcagtatataatttgtaaagacgggctttttcttcttctttttttcgctcctaggggcaggttgtatttattttttctctatctaatgaaaaaacataatctagtgttgtttacttgaaaaaacggagcttgatgtaccgtaaaagtctggagaagttgtgaacggacatgtgtgtgaaggtaacagttcattaatcctccatgcatgccttcgcatgaggagcttttattttggtatactaggtgctaatgccatggctgctctgctccatacacttgatggattgctagagcgagctggctgccatatactttacgtgtactagtacaacaccaccgtacctatacttgtggttatactacatatatgggtatatgtggtgtggcccgtttatgtcgtcgtcgacacgatttgcttccagcaacgaacgcatcccgtcatactactccttaattaggagttcaccttggagcagctgagcctgatctgcccctgcgtcccggtcagcggcgagatgttccccatcttcaccatggccgtcgtgaaggcgctgctgaacgccgccgcgttggacgcgaagttcctgaccgtgttgtccgcgctgccgccgttgaagagcacctggtcggagtgcaggacgccccttgttggacagcaggttgctgtagtaggcgttg

SEQ ID NO: 23510 - DNA, 22673 bp, Oryza sativa
ttgtagatcctgtccctgaaattctggcactgcgcctgcccgatcgtgtgtgctcctgcgaaataattaatcgcgctctcatcttatcagaaaatctgcaacacatatatacatggtatcctaatctatctatatatatactcgtatataatactccatatcggattacctgagagagcaaccatgtcggttgcgtcgagtccctttctggagaaattgccgataagttctgcgaggctagaggaaggggcagggaggtcggtatttgccaaggcctcgcttgcagtggtggagtcccttctccccaacagaaccgtccatgatggccctcccagctgcgaaccaagagggagctagctctatcagtgaaagaacaacagaaagaaagtcacgggcgatcgaagggctgtgacattcttaccgcgacgacggagtcacgggcggcgacggcgaggatgtcggcgcaggagacggtctggttgcagatggcctccacccgcgccttggcgttgtcgatgacgctgaatcccctcagcgaccccacgttcgggccagcattctgctcctgcccggacagcagaactgacgcgtcgcacccctgcagtgattttagatatatgttctctgttattttctcgtccgaaatatactataatttcatgaaaattagtacaattggttgtgtgaaacttgcttggacgaagcagtcgtggaagtgcagcctgagcagcgacgcccccatgcgagcctcgctgttcacggcggctgttatgacgctcttgatggtggacaacgcattggggcacgacgtgtcatagaacgtcgccgagagctgcgccgatgccactgacgccatagctgcagccaccagcagcattaagctaagtgaagaattagttgcagaagccatggctagcaagctactactgattagctgcctgcaggctaattgcactttctgcttggccgttgtggcttgcaagagattgctgcattgcatgcatatttatagccagagattttgtacgctgccacgagcatgccactcttgtagggatataaacatccaaactttgtgaccaccaagtccaacttgtccacattggcatacaagcgtacgtacaagacgttcaacctgaacaatagaagtttcgtcatctgcatacatgcccccatccggcagttgtgatagcgtcagacttaaattgctacatccaacaccaactctgtatatcactcattcagtgtagggcctgttcgatacatctctctccggacgtatacaatatttgcagcatgaatatgatatatgtatgattcggaatggttgctgattaattagcccattgtgctgttgttggtcaagataaacaggcggcatgcgtcggacggcagatttttcttcctggtgcgccatggcatgataagctggaatacattatacatgcatcccgcaaattatggctcaatccccttggcaagttgcctttctaggctcatcagaagacgcacacgcacacatagcactatataatacatacaatcagtactgtgaaagacgaaatatgattgttagtcagaattatacggaaatttggcgttcatgaatatatatgtgcacatcttacaatattatggccttcttttgagatttaaatgtatacaacaacaaaatcagaatatattagtgttgtttttcaattgaaagccataacttgacattaacttaaaatataacttccaacacttgcagttatacacaaatagtgacaaggtttatattggataagtagaacataaaaaattgcaacaaaacataaacaaagtcccacaagatttttttaaaaaaatcatcgtcgagtgtaatatgcggatgattaaaaaaagttgattaatcgctaaatatggtgatattgaagacaagaaattttatagtttttgagaggtaccaaattttttaatattcgagacgagaaattttcgtccctaatagatatcaagaaatatcaaattttagtgtaaatttggtatctcatgatactgaagactgaaggcacagagacgtgctaaattttccttgatacactaaattgctaatctaggtatgtttggtgatacattttggttacttatagtatactacatattatatcatggatgagctagaacagacaaattaaataagctctggatcggaaagagccatgctagtaggcgagtatgattaattatggagtaattaatagagtaatatataacagcagctatataatggcacgtcattttcgtgtagctagctggacatcaacatgtaggtccatcatgatcatgactgattacgtacaaaaggtccgcatttgtccaaatacaattctatcttgctctgaccgttatgcaaccattttgctctcccagtccaaggaaaatgaccaccagttgttgcctcaactgtctaggctttattctggatcatctctagtttgacctatatgcttaggcacaacggctctggtttatggataaatatacggtgaaaatcacaacggtaaaaactatgtaagtaacatcataaaaattatcaagaaaatctaaaaaaaattgacacatatagataagatgatatttgagaattatactcctttttaatagatgacgccgttaacttttgaacacatatttgaccattcgtattattcaaaaattttatgcaaatgtataatatataaatcatgcttaaagtaatttgagtgataaaacaactcacaacaaaataaattataataacataatttttttaaaataaaggcgaatgctcaaacgtgtgataaaaagccaccggcgttatctattaaaaaacggaggttttgtacaatattgcaagaccaaactcgactttatttatgagttgtatgaatgaaaagtagtgaagaacaagacaaaaaaataggaattatgttttttcatagacatttgataattttatatctcatgaacgaagttgaatttggtcgtgcaattttatatggttctttaatatcatcttatctagatatgtgattttcttaaagacttttatacgatagttttcatcaaataggtggttttcactgtatattttcctaggatggtgcagtgtaatatgtatacaccttgtacattgaaaattgtgctatttctatcatgtgtcttcatttgtgactattagtattttgataggcgttaaacctttttttaattattttttggccaggatggccgaagaaagggccatccgaatgtcattaagattgagggcatcaaactaaaatgcccctagcagccaaacatattgaagcaagggacagttagagattatcattcatgcattccttgataacttcaaaaccatactgatcggtacataacatgggcttcctgatctgtttcaaacactttgtgctgatcagagaaaacactcttagcaaacatttcagactagtaaaatactactactgtgacatatatggcccagccttattcccaaatttgtgtttgcttttgtatccagtttgattctttacttaattattagttcactttggagcagctaagcctgatctgtccctggctcccggtgagtggtccgaggttggccatcttcaccatggccgacgagaaggcgctgctgaacgccgccctgttggaggcgaagttcctgaccgtgttgtccgtgctgttgccgttgaagagcacctggtcggagtgcaggagccccttgttggacagcaggttgctgtagtaggcgttgtcgaaggagtagggcgtcgtcgtgtccagcgccgccaggttgctgtcgccggtgccggccgtcggcgggcagttggccctgagcgacgccgcgtagccggcgtcgatgttggtctcgttgtagatccttcccctgaagttggtgcactgcgcctgcccgatcgtgtgcgcacctgcatcatccatcatgtcatatcgcgatgtagagtgagctatgacttcagaaaattcagaaaccgatcgattgatcagtttacctgagagagcaaccatgtcggtgacactgaaacccttgtcgccgaacgccttgatgaggttctcgaggtcgaagaaaggaggaggcaggtcgttgttagcgctgtccatgctcgccgtggttgagtccctcctcccgagaccaaccgtccatgacggccctcccagctgcaaccacaagaagaaattaattaattccttaattaatcgtcgtgagtttcatgtcgcacaagcggccggtgcggcggcgaggatgatgatctagcttactgcgacgacggagtcgcgggcggcgacggcgaggatgtcggcgcaggagacggtctggctgcagatgccctcgagctgcgtcttgatgctgtcgacgacgttgaagcctctgagagaattcttgttaggaagagcattctgctcgccggtgaacgtggccgtgtccgccagcagtacggacgcatcgcacccctgataaattgacagttactactactttgtcagtcctagttgcaaaataaaataataataataataataataataataataataataataataataataataataataataataataataataataataataataataataataataataattgttacgagtactaatagtcaattgttatcaactcctactctctctttttacttgagtcaaactagagatggtcaaagctaagcttggaaatggaatctcgtatcagtgtcagtgacgagtccaaagctagccttttgacgttagtaattctgtcagtccaactgaattgacagtgtcacataacttagctaattctgaacacagtgcaatcagacgcaaaacgaaaactgaacatagatttattaattactgcagctaaagttagccatgagatcgatgagatcagggacttgcttggacaaagcagtcatggaagtgcagcctgagcagtgacgcccccatgcgaggctcgttgttcacggcggccgtcacggcgctcttgatggtggccagcgccctggggcacgacgtgtcgtagaacgtcggcgacagctgcgccgccgcggcggcggcgaggcacaggagcacggccactgaaagagaagaagccatggcgatcgatcgatcgatcaagcagcagtagactaccagagcaccactactactactcttgcagatgcaatgcgatgcgatgcaatgcaatgcctgcgtcgcatgcagatatatatagccctccatatcgtaatgtcgtttttggccacatggccatttcgtgctattttgatagcagatatagaatcgtagaattctgcattctgtggagtgttgtgcatggagtcaaatgaacatctgaaaaatatatacgatatatctatgattgcttcttcaacttgcatgacagataatttgtctgtaatgcacgatagacggattagcatatatatatatatatatatataagctatagtattttgcagtattcgatatgtcggctgcctttcgtgtgtgcctcaagtcttgaccgtgaagcaaatgtgcatgtcaatatgtatagtgttttttttctgttatgagcatggctcatataattgatattccctccgtcctaaaatataacaacttttagttctcagaatttgttctaaaatataacaacttatctaccaatgttctcttcccaacccatcaaaaccctctactattcacttctacctactttcttaataaccgtatccaactctaaaacttattatattctggaacgttgggagtactagattgcaattttccgaggttccttgctagatatcagcctcaaatctaggcaaaactcacatcaggcaattacatgacacggaatgcaaattgaaaatttgaaattggcaaatgcccatgctgctagatttccagtttggagcattcgatctaattaattctctaatatatttttttacagctgtacgtgttccagtcaacaataactatgggttttaattgattgattttggacatcgactgtgatttttgcagatgggagcatcaaagaaggtcatgcaaatcttcaactggttctttgcatcatctggaaggataaggattaagtcactctaagtcgaagttatttcgagtcaactaggcgagctaggacatacacatgcctggggagcttaataactgcagatataattaatgacaggcgctgtgcagtgtcaggccaagccttggaaggactcaggctccaagagggagggctgacgataagtctgaagaatctgaagaactgaagatggacggcaaggcagatgacgcgctacagggcgacagggaggaggcgcctatcctgggctgggggcgtcgtcataagaagcccagtgtgcgtgttgtcgggccagagtgggtcaagtaactaagtccatcctgcgcgatggcgtgcgtgagttgtgctgttccgacagctgtcatgaggtgttgagactgatataaacaggagaacgaacagaggagagggtatgaactgagatcacttggaggcgatggcggcggaggcctgatcctgttggattaggataatacaatcgtgatctcgaatatctgagtccttagctagtttgctcttgttagtaaccctaacaaaattggtatcagagccaaactcgcccctctaatctcttgattcggctgtgaaattccgggggaaggattggggctgttcttcggatcagaccccgcgaaaaggcaacttgccttcctcaggttagctgaattcggagcgtgggtgagttggtgtgtgagatcgagacgagagtggaggtatggcgcaggatagtaagttggatttgctgttgaagtcaatggcggaaaacgagaagaaacgggaagaggctgaggcccgcatgcgagctgatttcgcagaacttaagaagtctctggagatcaggttgcccgcggtggagaagaaggtggatgacctcgggatcgatctggtggcgctgagtaacaaggtggagcaattggagcacaaccccaatcagcctccttcaggagatgaattcgccggcaaggtgacgaccgtggcgttacccaagaaggagccgatctacaaggcgacaccaccgaccaaaggtacgcgtgagcttgaccccacttctcctgttcatcattcaaatgagggttggggatctcagtttgaaaacacggggttcagtgccaggatgattggtaatgtaccgcccatgtcctgtccgcaattcaacggagataaccctcacatgtggaaatccaactgtgaagtgtattttgatgtgtatgggattcatcctcaaaattgggtcaaggtagccactctgaatttttgtgggaacacagcgttctggcttcagtcagtgagggctcagttgatgggggtcacttggtttgaattatgtgacagagtttgtgctagattctctcgggacagacagcaagctcttattagacagtggattcatgtttctcagacttcttctgtggctgattatgtggataggttcgatagtatcatgcatcaattgttggcttatgggggggcaaatgaacctatctattttgtgaccaaatttgtggatggactcaaggacaatatcagggttggtgtgatggggcacaggccacaggacctggacactgcatgtactttagctcttttgcagaaagaagctttggaaggtgtccaggctatcaatgtcaagaaaaatgactctggaacctttgttaaatctaaatccacctcaaatttttctcagtctgtccttcctagcaagagtacagccttgataaatactgaagagaaaaggagtgcagagtttagcaggcccaaggatgataagatatcggccctcagagcttacagaagatcaaaggggctctgttttgtttgtggtgagagatggagtaaggatcacaaatgtgctacatcagtccaactccatattgttgaggagttgattcatgccctgcaatctggaggtgaagaaaatagctgttctgatggaactcctgaaattgatgacgattctttgatggcaatatcatttcatgctttgcatggtaccgattctcctaagtcaattagactcagaggctgggtccagggtacagagttactcatgctggtggattcgggtagtactcattcttttattgacactaagattggctccaaattgcatggtgtccagaaattacttcagaccattaaggtacaagtggctgatggagggcagatagcttgtgatatgtttttgcctaagtgcaactggtggacacagggtcataattttaccagtgatttcaggttattgccactgggtaattatgatgtgatattgggaatggattggctggagcagtttagccctatgcaaattgattggattcataagtggcttgaattccaacatcaacatcagctggtgaaacttcagggcattgttcctcagactgattgctgtccaaccataacaggagcacagttacagggtatgtccaagaatggatctatcatgtgtatggttcagctgaatgctgtggaagttcctgaacatgctgtcatccccactattgtacaacccttacttcaagaatttcaggaactattctctgaacctactgaattacctcctaagagaacatgtgaccaccatattcccctcattgaaggagccaaacctgtcaatttgagaccctaccggtataagccagctctgaaagatgaaatcgaaaaacaagtcactgaaatgcttaagactggagtcattcaacccagccacagtcctttctcttctcctgcccttcttgtcaagaaaaaagatggatcctggcgtctctgtattgattatcgacagttgaacaatatcactgtcaagagcaagtatcctgtcccagtaatagaagagctgttagatgaattatcaggggcccagtggttttccaagttagatttaagagctggataccatcagatcagaatggctgagggagatgagtataaaacagccttccaaactcattctgggcattatgagtacaaggtgatgtcctttggccttactggggccccagctactttccttaatgccatgaatgacacattgtcccctgtcctaaggaaatttgtcttggtcttttttgatgacattttgatttatagtcccacattggaatcacatctgctccacatcagaacagttttacaattactctctgctagtcagtggaaggtcaaactaagtaagtgttcctttgctcaacaagagatatcttatttaggacacgtgataggagttcaaagagtatctactgacccacgaaagattcaagatgtagttaattggacccaaccaactactatcaagaagttgaggggctttctgggcttagcaggttattatagaaaatttgttaagaatttcggtgtgatcagccgacccctgactcaattactcaaaaagggaataccattcaagtggactgaggaaactgaaactgcttttcaacaacttaaacaagcattatgctctgctcctgtactcgcattgccagatttttctaaatcattcactgtagaaactgatgccagtgaacttgggattggagctgttctttctcaagacaagcatcccattgctttccttagcagagctcttggtcctaaaactaaacgcttgtccacctatgaaaaggaatacatggctatattgctggctgtagaacattggagaccatacctgcagcatggggaatttactatcctcactgatcatcatagtttgatgcatttaactgatcaacggttgcatactccttggcaacagaaggctttcactaagctcttgggtcttcagtataagatctgctatcgaaagggttcttctaatgctgctgccgatgctctttcaagaagggagccatttaccagtgagatacacgctgtgtctgaatgtgtaccgctatggatgcaagacctgattcaaggttatgatcaggatcctcacaccaagcagatcatttcggagctaattgtcaatggtagcagcagaccccactatcaattgtgcaatggagtattgaagtacaagggcagaatttgggtgggagacaatcctgcattgcagcacaggatcatcactgaggttcactctactcctttcggtgatcactcaggttttcctgtaacctatagaaaagctaaaggcatgtttgcttggactggaatgaagaaaatgattaagactcatctgcagtcctgtcaagtttgcttgcaagccaagccagacagggctaaatatcctggactactgcagccgttgccagttccagctggagcatggcaagtgatttcgcttgattttatagaagggttgccacgttcatctcattataattgtgtgttggtggtaattgataagttctccaaatacagtcactttattcccctttcccaccctttcacagcaagtgcagtagctcaagagttcatgaaacacatctacaagctccatggcctacctcatgtgattatttctgatagagataagattttcacgagtcaattttgggagcagctcttctctaagtctggaactaaactgcataaaagttcagcttatcatcctcaaacggatgggcaaaccgaacgagttaatcagtgtctggaaatttatcttcgttgctttgtgcatgctactccaaggaagtgggcatcttggtagtatcttgctgaattctggtataacaactcctttcactctactttgggcaaaactccttttgaagtcttatatgggtacactccagctcactttggcattactatagaggattgtcagatcactgatttgcaggaatggcataatgagcggaagctgatgcaacagttattacagcagcatcttcatcgagctcaacaacagatgaaacatcaagctgataagaaatgcagtttcaggcagtttaaagtaggggattgggtgtacttaaaactacagccttatgtacagacgtcggtagctcaacgtgcttgtcacaaattggctttccgctactttggcccatttcagattcttgacagggtgggatctgttgcttatcgcttacagctaccagctggcagttccattcatccagtgtttcatgtgtcccaattacgagctgctgtggggttttctaaaccagtgcaagaggaattaccatcttccttgggagcatttcagattcccctccaattcttggataaacgtctgactaaaaaaggtaatcgcgttgtggttcaattactgacgcattggtcagattcatctgcagaggattccacttgggaggatatggaggatttatgcaatcgctttccgcgagcattggcttggggacaagccaattttcaagaatgggggattgtcaggccaagccttggaaggactcaggctccaggagggagggctgacgacaagtctgaagaatctgaagaactgaagatggacggcaaggcagatgacgcgctacagggcgacagggaggaggcacctatcctgggccgggggcgtcgtcataagaagcccagtgtgcgtgttgtcgggccagagtgggccaagtaactaagtccatcctgcgcgatggcgtgcgtgagttgtgctgttccgacagctgtcatgaggtgttgagactgatataaacagaagaacgaacagaggagagggtatgaactgagatcacttggaggcgatggcggcggaggcctgatcctgttggattaggataatacaatcgtgatctcgaatatcttagtccttagctagtttgctcttgttagtaaccctaacatgcagaaagtgtgtttgtaggtttgaaattgaattatactgaatgatgtagtagtagtagttaaaaatcgatttcaaaatttgaatgacgatggcgacatgaacacaagtggacgacttggtacgctgcacacaatgagcgcggagagggatggacgacagtgcatactgcatgtgtacatttcatttttattccaagttgttcttttgcaagctagctacggcaaacagtgcaataagagttcaaaaaatgtttcgatcggtcggcgcaaaatgtttggatggttccttcaaaatttctgtataaatccacgaagcaaattaacgtacactcctgtgagtgtgaataagcatagcgcagagatcaacaattgtggctgtttgaccaataatctgcggcgtgcttcaggtacacactgcgtatttttcagagatacacagcatgtgtacgtacgtatttgtggtttataacttcatatagaagaaaaatcaatccagcttgacaatattatgtttgttgcaccttttgtgggacgatcagatagtctgcaaacgtgtgaccggtgcatttattttcatgtcaccaaaaagatcataaaaaatatattttttatacagatgacatatcactccacaagcatatatgtttgaatttaaatttattattttctcttatttatatatatattgaatttaaacttacatatttataaagtgttacagagttggtcgattcccaacgtccgcctgcgcacttccattttttctctactgttgcacgaatcttggaggtaacccaaaggctagaaaatcgattagttttgttaagagccaatttttttctctcctatccccgctgcacgaatcttggaggtaatccaaaggctagaaaattgataatatttataaaaaaactgtcgccaaatttttagcacttctttttttataataacgttttaagcaatatgtacaatatatggggagctcagtgaaatattccaaccatgcagcgttttgcaaagaagtaaccgagcacaaggacatatttaggcaagggagttaatctcgcgggcatttgcatgagggctcttcagaattcagtgtacacgatcaaattcttgcaaacacgccactttctcggacacaatttgatccaagaaagcgtgaacatgatcactgatcagtgcaaagcacaaatatcgatttcagtggcatatatagccttattattgtcccctcatgcactcagaattttcgttgatgatcaccgctaattaattcaccttggagcagacgagcctgatttgtccctgcgttcccgtcaacggggcgatgttccccatcttcaccatggccgccgcgaagtcccttctgaacctcgacggcccggacgcgtacgaccggacctggccgtcgacggcgccgccgttgaagagcacctggtcggagtgcaggagccccttgttcgacagcaggttggtgtagtaggcgttgtcgaacgcggtgggcgtcgtcgtgtccagcggcgccaggttgccgtcgccgctgcccgtcggccgcgggcagctggccttgagcgccgccgcgaaggcggcgtcgatgttggtctcgttgtagagcctgtcgcggaagttttggcactgcgcctgcccgaccgtgtgcgcgccggagagcgccaccatgtcggcttggctcagccccttggcggcgaacgaggcggtgaggttggcgacgtcgaaggacggaggtggcaggtcgctgttcgccagcgccaagctcgccgtcgtcgagtcacgcctcccgagaagaaccctccatgacggcccacccaactgcacacacacaagttcagttcgccgctcgccgtatagtacgtatagctgcgcgctcaaggatgggcatgatcttacggcgacgacggagtcgcgggcggcgacggcgaggatgtcggcgcaggagacggtctgcttgcacgcggcctcgacctgcgccttgatgttgtcgacgacgttgaatcctctgatggatccgacgttggggttcgccccctgctcgccggtgaagttggccgtgtcgttcagcagtacggacgcgtcgcacccctgatccatgtcacccacgatgcacaacacacaattagcacgttgagttaattttttcaggttaattcagagtagtagtaggaactagtatgacttgagagcaaattcggtggccatagtctctctaatccaacgtcaacacagtgctacgagtccattctgttctgacgcagcacattaaactggaagagagactgaaagagtgtaaagaactgaaactgcaaaggctgcgaccacaatgtaattgactgatggatataaaaatgtaagtcaagtagtgtggaaatgcacgacttgcttggacaaagcagtcatggaagtgaagcctgagcagtgacgcccccatgcgaggctcctgcgccaccgcagctctcacgccggccctgatgatggccagagctctcgggcacgacctcgaatagaatgtagccgacagttgttgcccggagactgaacctgcaagtgctagacacaagagcaacaggactgacagacaagaggccattgtcaatctacaatgcaaacaactctgtgtgtgtatgcaatggcctgaattgcatgtgttgcatatgtgcatttatatgtgagagctaaatgtgttgtcatttttgcgcccgtgacagtctgttggtagcatgtcagccatatgctgcatattttttagagatgtgatgtacttatgatgcgttttgttcatggttttagtatggttactatcacaatgcatggacatggaagccacacgacggcaaccctgctagctggtacgatatggttatgggagagaaatcacgatcatcgctaaaaggttgagaatattggttggtcatgtactcctgtctgataagcctgaatatagaacagagcatgcatgcttgcttgggtttggctttattaagtggacatggagaatgtaaagaagatgtttgctttccttgataatggcagttggcagttccttttgtttcaaagtgttcatcagtagatgtcgctaaagcctgcagacctacccagtttatgcgaagggcaacaatcttgcaagttgcaaatcacctcaccatcactaatagcatggagatggatttttcatccctctcgttttcgtatgtcttttatatagccatgaaaaaaatattcaatatgtgatgtatcacttcacaaatatacaagtttaaatttaacttacatatgttgtgaaaaaaaacaaaaatgatgctaaatatgcatactattacatatttgttataacttgtatatgccaaatttaaacttccatttgtgtgaaatgatatattaaaaatgctctatcttgtaaaaaaacttttcatattttttcatgattatttggatagcatgcaaaaaggaacgatatatcttcttaaggatgaaattacttcccttataacacgggttgagatcctctgccttaagtcaggtgattttatagtcattgatatgtgggtccatggcaaagaaggctcacatatcaatgactcaaagtcacgtgattttaagtcagatgatctcaatccttataacactggtaatgcttgtctgtagatcaatctgtcttaaaataatatgaaagatggtgcagatgaactgaatttcttctctaatggtcaagggagatggctacgcacatggctatatttgattcttggtgatagaattttccgcagttcctggctagatttgggcctcaaataagctggcaccaagctgaacttctgcacattcatgcatccacgtcagattgggtcaacttttgttcaattacctctggcatcagtcacaagaattaggcagaacagtaatacagtactgttatttttaagttgttaatatataaagtcagtttcttttttttaaaaaaaatctattttcggtaacactaacaaacacttaagtcaataagtaagcaggagcaaagaaaaattcagtttgccaactgaccaaacatgtgtagggggtactaatgacagccatgcaaaatctgtctgaagttcaaatttctgtagcaaatatcatcaagaaacaattcgagtgatagtgacgtgcaagtggaagatctcctaacatagtaaatcacaaggcgactaatctgcagagatgtaaaagccggtttctgtatcaccctctaattctcctcgctgcgttgtgtaacttgttactgctttcttctgattgattgacgtgtaattcttttacatgttcgtgaaaaaaataatctgcagggatgtatcaagtttcaacccttgggttgatagtcaagatttatttacaaatcgatgggttccatcgatcaagttgaatttagtactgaacttcagtagtatgtacaatataaaattattattgctgctctgtcatatgctatcttttaactgtcaaaggtagtcaatgtagggttagtgaccaatgtaagcactcaaaaagttcctaattaagttgctgcaaatcaatgccccactgacttttagttgaaaagcaaagcaaagatgcctcctatcatcacagctggcctgattatatttgccaattgtccgtttgcaactgtttcaaaaaaagaaattgtctgtttgcaatggcaagcagttcaaaatagccaatccgttcaacgaaaacgtctgtttcgcaccaaacatgcaacctgtcattctcaatcgccttcagaaacgccacgacgttcattcggttctgaaaatttcatacgagcagacaaaagccggacaaaaggccgaattacgatgacgcaaaaggtcaaaaactgtcaaagaagaatcgtacatggattgatcctctcggccgagtagctactccgacagtgacattgctgcatgcagcaacaaagagctcaatcacatactccagaatagaatggattttcttgggcaacttgccagattaactagcatacatgtaactatctcttatctctaggctggtaaggataaccctaactccagggaatcgataccagtcggcaatctttgcactctttaagcgccaatccacgaactcctcggttctttaatagctcggattaaacaactgaaacactccaaaatgcaagctctgtgcactgcattcttccccaactcttcagtctccaagcttaaagtctttcaggtcactctctgaagccccagtcgattgtctgtataccaccacaaatacgtacttcatctttctacgattccatctgtagtaggatctcgatgcacagatctcttgaatgcaactgatctcgcagcttgctaatgctatttgctagctactgaattggtggcccgtggtttcaacaaggactgctaattgctcgatcgccgtcttgccttgcctgcagatcacggcatcggttgggggcacgtcggtttcaagggagcatgccgccatgtcgttcaactagtgatgccaagggagctctttggatccacctgctagctagttcgagcgaggcatcttgtcctcgcgcttgttttatcaaatcaatcgattgggtcgttgagctcggtctctggcctgatgctaggcgcgcttgcctacctttcttgggagtttctgtgaggaagcttcggctgctctgtgcctctgttcatggcgggccggcggcggcatagtgaaattggaattgaatgatagatcggatgatttacaatggcaatcagtacttcaaatatttggactgaattgataagcaaggaatgaatgatacctcaaagttggtttatatcgaggcctggaagaacgttgctcacgacggcgaggttccgggcttctccggcggcggccatggcggcgaggaagctaggaggcgtgcagtgtgagggagtaaaagaagagtagagcccagaaggaagtacggcccagtctatcttggcccaactaaagcccatccttacttctcttgcagatctacggcccatacagtacggcgcagttttgacttttgaaaaagcccataatcctgaggagcaaatagatgggcctcctaataaaaagtcagcccagatatagcatgctcaacttgatggaagccctagccctagtccagtaccaagcccaagaacacgttttggtttttccatcgtctgattctcctggctcgccggcggcggcgtgccgctctgcagctcgcggggagtctgcgtgcgggacgtcagtcgtccactgatgttttttttttaaagagtaaattacatccacggtacatcaacttggtaggtgggtataatttggtgcaataacttaagaaatgagcgttctagtgcaacaacttgagaggtaggtgcaatttagtataagaactttataagtgatcgtataaatacgacaacttacaaggtaggtacgattttgatacaataaattaaaaatttatgcgacaacttaattatttggagcatatttttatataaatttaatttttaagtacttattttgacaatatactagtgcagatttgtataagtatatttatatttttatcctaataaataataactataagtcaattaaactggatgtagaaattattatatttcagttgatattttagaaagtgaagaaaacaaaaaaattcaatatatgttgtggtaattggatgtaaattgtactagaacgcacccatttgttaagttattgcactcggttgatcaattctcaagttcttgcactatattgcacccacatgtcaagttgttgtactgtgggtgtaatttactcttttttaaacaactcgcacgagacgatgcgaaattctattgatagagcaggacaaaaattacaagattataacctggagggtcgtaaccaggaaaaaggaaaaaaaaaacaccacccacacaccgacatcgccaacacacaaacccaggagaagtctagcaccggatcgaccgccgctaagcgtgaccgaccgccactagaccaacaaagggacacagacgagatcgccccctaggggatgccagaacgacgtcttcaagaagagaagcgacggaaaaaccgccgccgccgtccgtcgggactcaaaggagccaagactaggctttcacccggcaaacacccttgaggggtgagacagcacgacccgccgctcaccacaagcgaatccacgactaacgcactgatactccaccaccacacaagctctgccgacatgttagacccctgaaccggcgtctcccgtcagccagccttcgtgtgcagaagacgcgccacatccaccgacagctcctcctcacgccggcttccatctccgccgctcgcgcctctcgcgccgagccggcctccgctcccatcgggtgcgcctctctgcgtcaagccagtctccgaccccttcaccaaacgatgccacgccggtcagatgtcgccatctcccacgccctcggctagccgtccgagaccgtcacgcctctgatgaccgcagacacggtcaccaccaccacagccgctgttgccgaacacccagccacctcactgtcgccatcctcacctcataaccaactccatccccgccgccgacatcaccaccgcctccacaatcacggccgccgtcgtcgctgccaccgacaccgccgtcgcagaccgccgttgcgccgtcaccctccgccaccacgcagccagcacccgccccgacgccgccgacatgtcctcctccgccaacggcagccgacgatgccactgcccaccaactgccattgccggtcgatgccaacgccgcaatcactgccgcatgcgccagtcaccgctagagccgtgtctgccacagccgccgcgccgtccacgggcgtcgcgtcgctgacagccgccatcagcgttgtcgccatagccgccgtcggtgtcgctagccgccgtctgccaccgcaatcaccgccgccgctgttgccagccgccgtcgccgctgccaccagccgcatcgcaaccgccagcacccccagatctggaggacctcgctgccgacaccgacaggacgagcgccgacgcgcccgaaccgccatagccgttgccgctgcgccagctgccgcccgccaccgcagtccccgccgacgctgtcgccagctgccgtcggcatccaccgccgccgctgccaccggacgcgctgcaaccaccggcacccgcagatctggaggacctcgccgtcgacaccgtcagcacgagcgtcgacgcgtccaacaccagaggccgccgccgtcaccttcagcccccgccgccagctgcccctcccgtagatccggccgggcccggcgcggatctaggcaccacagccgccactcaaggcatccccccacccgccgagcgcgtggaggcgagatgaggccccaccgccgccgtcctagcttgtgggagcaaggctttgccggtgcccgctcaggcggcggtgaggcggggggaggagacgtgaggaggaggaggacggcggcggcgtcgcctcccgagtcgcccgggggagggcgacgcgagagcgtttaatcgatgggagcaagttttcagtgcaatgctggatccactgatctttttttgagaactcgtccactgatctgagattttgtgactgatctttcggtgttctgaattctgaattctaccaacccctatttgctgcagtttctgaattctgactggaagatttgacactagcagggaggttgctccaaggtaattccctaagaacatctgctttatgatactgtagtaaccgaaaatttatcttgatttaattctgattcaattccttgaaagtgaatttactgtctgggcattcgcgaaaaaaaaaattactgtctgtactagaaaaaaaatcaactattaacagtgacgaagacaagcctaacataattatggcttgagcgctaggctcgtccctttaatcccttgtaaatccttttaaaaattaatgaaaagtttgaagatttaacaaattgcattggttgtactttgtaatacctgattcccccactgatatgtatctcgaagctggcatagatacatagttagaagttatctttctaggacggaggtatacatagttaaaacagtgagtgtaagtgctgtttttttttctttcggcatcatggaacccgtcaagatcatgataattttaatagtatctagataacacaagtgtgatactatttgttgtcagcacaacttcactgcacgccattgctagatttagccaccgttgatgttctgtccattactaatcgaatgcgtgagtcactcactctacgtgtgattctctccgttcttgcattgcattggatgggacaatagcaatctaatcctgcagttgatatgtagcggcatatatagccagaaatccgtggattagtaccatgctggtcgcctcacgggcaacacctcacgccggagcactgccatgcatattctgccacaacttaacccggctgagctcgaaaagacgctgatctgagcccctggactcaagcggattctctctctgatcaatccagcggcgaaggcgctgtatgcagccttgagctttcagacatcagcagctagcagattgcagatcccggccctctcgtgatgcatataggcaaggtgcctactgcttcgaggaggtgatcgaattttggatgtgacaagcctgatccagagcaatgctgtaatcaagatggtataatccagactaagctcgtttcagaattcataagaaattaatctgcatgcagcatggaggaagaaacggctgtagctaccgctcccttagtttcaagttataagatattttaactttaattaaagttaaaccactttaagtttgaccaagtttgtagaaaaaaatagtaacatttttaacctaacacaaatttatttgaaaatatattcaattattgatttgatgaaactaatttagtattataaatattactatatttgtctaaaaacttaattaaatttgaaacagtttaattttgaccaaaatcaaaacgtcttataacctgaaacggagggattagatagctacctgccaggttcatcgaccactcgtgacatgcatggatgtgtccatggcgcatatatacagtatgtagcagcaagggcaggcatgagcacaagagcatgcatgcgttgagaggataagcagatggagccggcagtacgtatagccgtctcgccacatggatggacgtgatattctctgcttggcgagctcgccattcgagacattctcggcgctgtttgatcacttcatacgcgctccgggcctaaagagctccaagagatgctgcatgctgtcttgttcacaagagtttgtatcacgagagcatagtagagccctccagctcgtgctccctaaagaaatggcacgcatggcttgttcgcttcttcctggtttgcaattggtgttcttgttgcatatgctaactgctacccctcttgatttgtcccaaaagataagccagaataacgtgaatggccaattgtcctccagtccagttccttgtcctcgcctctcattggctcatttccatggttattggagccatgcatgcaagaattctttggttttgtttcttggtacacctgccagctcattggattcctgactatcctttacaccaccaattggtatatgtgggaataacatttgctaattaaggcatgctaaggttgtgttaactctttcattataataatatatactagt

SEQ ID NO: 23511 - DNA, 6411 bp, Oryza sativa
taaatttgcatcttgtgaatatatgtgcccccttaatttggtaatggcgaagacattaggaaaattataatgtggactaagggcgatacaactatatcggccattgtacatcagcaaaccacaaccgattacaacatggaaaaacaactaagggcgatataaccatatcggccatctcaaggcgatgtaaacacatcggctgtcatgcatcggcaacactagacgatcatgcattaacccaaacacttgggtaatatttcttcaagtacttgccattgagtgctcgtccataaacttctccatcaagcccttgcaacatatatgcccctttagacacaaccttatagatttggaacggtccctcccaattcggtgaccacttgccgaatttgttatcccgagttccaatcggcaaaatcaacttccatacaagttcaccttccgaaaaagtcttgggtaccactttcttattatagtaccgagcaacttgttctttatctttagttaccttagcaagagctcgcaaacgtgattgaaccaagtcctccctttcatcggccataaggttataatactcatcggctgtcaaaccatcttgcaactctactcgtcgtgagccaactctaacttcccatggcaaaatagcttcacgcccataaacaagcttataaggaggaacttggattgatccatgacaagccatccgataagaccacaagcttcggctaaacgagtatgccattgccgaggataatcagaaattttccttttaatcaacttgatcaagcttttgttagatgcctcggcctgcacgttagcttgtgcataatatggtgaagaattcaacaatttgatacccatactatcggcaaactaaacaaattcatcggacacgaagattgaaccttgatcggttgtaatagtttgaggaataccaaatctatagataatatgttcttgaacaaattgaatagcatccccagaatcaaccttcttcaaagggatcgcttctacccacttggtaaaataatcggttgccaccaatataaacttatgtcctttgctggacagtggattaatcatgccgatcatatcaattccccaacctctaaacggccatggtttaataataggattcatagccgatgtcggcgctctctggatcgctccaaatttctgacagtcttgacaacctttataatatctaaagcaatcctccaacatcgtcggccaaaaatatccagcatgtcgaagtaaccacttcattttatgcgccgattgatgagtgccacataccccttcatgaacctcaccgattgcaacttttgcctgatcggcactcaaacatttaagcaacactccatcgatcgtccgataataaagctcattgtccaacaatgtatacttcaacgctttatatcttaacttccgagaaggcgattgagatggatcctgtaaataccaatagacatcatatctccaatcatcagctgttacggtagcaacctcaatctgaacatctttgatcatcggcttatatcccgatgccccttaggctaaatcattagcttcaatattctgctctcgagatacatgcttcaaagttactagccgaaattccttcatcagttcttgtcacttgtcacgtcctgataaattcatcccgaaataaaaatcattttctaaaaggaataatagaattaattaaaattcgaaaagaaattggcaaacactaaaatacgtacaagaaaaattcgaatgtggcccggagaatttttgttaaattctccttggtctaaaaggagccctcaaattttagtggaattttcagagcacaaataataattattaagaaataaacaaagttaaaatggttttataaaaagaaaaaccctaaaaagtcttcttttcccccccttccccctcttgggccggctcggcccaactccctccctctctctcctctcccccgcggcccatcggccttcccccgcgcgcgcgccgctgacgggtgggcccgcccgccaccctcgctgacgggtggggcccacctgtcatcccctacctcgcgctgcgcccgccgcccgcccgtgccctagcgccgccgccgccgccgaatccgccgcatcccgccgttcccgcgcgccataaagagggggaaatcactccccgtgattccctccctctttcccccctcttttccctctctctctccctcggattcgttcggaaagtctcccgcaatcctcgccggcgccattgatggagtccgagatttccgcggccgattccttcctccccggccgccctctctccctcccaaccctatttaatcgctccccgtgcctctctcctccgtttccgccgctcgccgctctctctccccgtcggaatcaagcccgcgccgtcgtcctctctctccgccgtcgccgccgagctccggttcgccgccgtcgtcgccccggacctcctcccgcttcggcaccgcctccttcggcttcgccgcgtccttgccgacctcgtccgctcctccgtttcgcccgccgaccgtcggagcgccgccgtcctcgtcgctccgaaccgcgccgccgcctctcgccgcttcggtcgccgtttccgtcgccgccatcgacccggggtgagctgtggaccgctcctttcgcttcccccttccctcctctctctcgggcgccgctccgccgcgtcggtggtcgccggcggcgaccatcggggcgcgggtgcgccgcctcccgtcggccgtgccggcgaggccgccttcgggcgcgccccgcggctgccaggtgggcccggccgtcagccgcccgcgcccgcgggtgcggctgacgcgtgggacccacggcgccggccggcgtcagccgcgtgcacccggtccaccgtggaccgagaggctgtcgcgtgggccccactcccgtggacccggtccgcgcgccctctctctcggctgacgcaataaatccaattttaaattaaaatttaaatgaagaaattcgcaaatattcatttaaagagcatataaacttcaaatggccataacttggccatttgaactcggaattggaccgttcaagtctctaatttttccttaagaagtcaagaacccatttttgtgctttgtttctgcttgttatatggagtttattagagtaaaagccttttcttttccgttggtcgtgtagacgctgcagcttcggaagatccgctcttcgtggaagttgaagccgacgtttgggaaagcgagcaaggcaagtcacatcatccttgaacatattgaatcccagtttgtaaaattatgttgatttaaattattgcattatcgctttatttaaattcccgcgttatcactgttttatctagccatacctatttacctttgttatgaccttattattattgttattgttattattaccttgttcaccctaggttaaacaaaaccccaactagtgagtactctattcatggttccactagtatgaatttaggtagatgcttcgctgattaaataggacaacattaggtggtttttataactttagactttgggaattctcatatcatttggacactatggaattgttggtttatggtggaattggacatacacctctcttcctctttcaaaacccctaaaacctgttttcggtggggtttgggtgcatgccagttgtgggaagtagcaccccggccactataaggattaagctcgggcctctgttgcaaagcactaccgtacttccacatgtctagtgggtaaggcttagtttgtggctcagtctggttataaacaaaagtacacggattggagatgtgtgaagtcgggggtcgatggacattctccagggcaaatgaaggctacacgagctgcggcccggtagtcgagatgtcatggcagagggttggtgccctgctgctagggggctcaatcctgcctacctgtcccggaggttccggccgtaggtgggattgggtcggtactcttgtctatggctaggatgggttggaaactatgtcacgtcttccgtctgtataccgtggtggtatgtggcacgtggttgcacgtgaggaagatgtgtcttgtgggtaaagatgtacacctctgatcagagtataatctattcgaatagccgcgccctcggttatgggcaagccgagcaatgtacccaagtcagtgttttaattcttaaaatttgctcaacaactaaaatgtggaatggttggcctgggttggcttgggacgagctgggacccagggtcgggttgccagttcggtctgaatcatcgtaggccttgggttaaggcaggttcgtgtgggttcacggccttgattaataatactgtgtagctctaggatcgtctttataaaatggctttgggcaactaagtgacttttaaatgctgctttctgcaaaacttaacccctatattattatcccctttacccccttgcattaattatgcatctccggtgtggcttgctgagtactgtggttgtactcattcttgctcaatctttcccctcttcagtaagagaagctttggagaagatgtcttaggtggagtcctggcttataccccagttgagcgcctgtgaagatggagccgtaggcccgctagtccgctgctgtttatttttgattgtcaggcctgaagcgcctttgtaataatgtaaatattatcgatataataaagatgtgtcttttatatcatgtttgtgtggtgtaccccggcttttcctgggacggggattaatacactagcgttcgggaaaaggaaattttcccggtcgcgacatcacttctcattatagacccttaacgtgtcattcttgcactcatattctcctgccaattgactgatcaccaacaaataatcccccatgatttcgatagcatcggcctcaacttccttgagtaactgcaaccctttgagaactgcctcatacccagcttgattattagtcgcataaggtttaatagtataagcaaactcaaatcatgccccccgaggggaaattattactaagccgataccacaaccatgagtacaaactgactgtaacatcccggcctagggcttaataggattaatagaatactcatattaacaagttacaacttcttttccggaagccaatcatcaaagaactccgaggttaagcgtgattggtctggagcaatttcgggatgggtgactgaccggaaaattcttcccgggtgcacacgagtgaggacaaagtgtgcagaaaagacttgtgtaggtttgtgagggcagtctatgacctatgaaagctgccaggcgggcccggcctgggaaaggcgggacgttacaaaatggtatcagagccgactctcgcggtttcacgggcggtgtgtcgcagttgcgcaggcatggtgcgcatggctggtgtgggcccggagtggtcacatagcatggcacattgtgagggcagtctatgacctatgaaagctgccagatataagcgggcccggcctaggagaggcgggacgttacaaaatggtatcagagccgactcgcggtttcacgggcgcgtgtgtcgcagttgcgcaggcatggtgcgcatggctggtgtgggcccggagtggtcacacagcatggcacatgcgctggcactggacacacggacgtggctaagaggggacgttcctggcctagggttgattgacgggggcgtcgatctctcttaagggggtgagggtgtaacatcccggcctagggcttaataggattaatagaatactcatatgaataagttacaacttcttttccagaagccaatcttcaaagaactctaaggttaagcgtgcttggtctggagcaatttcgggatgggtgaccgaccgggaaattcttcctgggtgcacacgagtgaggacaaagtgtgcagaaaagacttgtgttggtttatgagggcagtctatgacctatgaaagttgccagatgtaagcgggcccggccgttacactgacccatcaaagaataaagtccatggcacaatctcaaccgagcctattgaatcatcacggtgatcaacaataaaatcagctatagcttgccctttaatcgccttcggtgaatcatcacggtgatcaacaataaaatcggctatagcttgccctttaatcgccttcagtgactcataccgaagatcaaactcagttaaggaaaatatccactttccaaccctttctttcaaaattggatcctatgaaagctgccaaatgtaagcgggcccggcctgggagaggcgagacgttacactaacccatcaaaaaataaagtccatggcacaatctcaaccgagccgattgaatcatcacgatgatcaacaataaaatcggctatagcttgcccttaatcgccttcggtgac

SEQ ID NO: 23512 - DNA, 2406 bp, Oryza sativa
aagcgcctttgtaataatgtaaatattatcgatataataaagatgtgtcttttatatcatgtttgtgtggtgtaccccggcttttcctgggacggggattaatacactagcgttcgggaaaaggaaattttcccggtcgcgacaagctggtatcagagccatctcgactgtaggataagccaagtggataaaacctaaggacatattttataaataaaactatttgcgaaagttcctctttttcttcttcccctaatgctatttgcaaaagggttactcttttcttccttcttcaaatttcaactagtaccagatggtcaggtcagtgaagaagaagacatcgtcagttgtctgccgaagctccggaaggctggaggatccgctagcgaagtggaggaagcagtgaagccagctgtgaaggagtgaagatcttggagaacccgtcgcagaacctaagccaccctctagggcagagtcgttagtcgtgtgtttccttgcttgtgtgtgtagcgcatggtttgcatcagtgggttgtgatgtaaccatgctaggttgtttgcttaatcaacttgcagaataagcccaacatacatcataacagcaaaaggcatagatctgttaaggtcctatccttagtttctaatctgtctctccccttttgttttccctctctccctctccaaacctttgcaacagatggctgacaatgagaaaggcaataaggtcagaagacaggacattggtacctcaagctcccgagtgaatgaagcaccagacaccagttgtgtgacactggtccaacacctgattaaccagaaccgattgcttatagagatactacagcagcatcagacgccaattctgaacctgagtcaaatacaacctcaagtgcagttggaggcagtccaagcactcacaccacaagtcagcatgccgccagcatcccgaaggacccatggtgacgtgccacatgttgactcaaaagaagcaagtatcatttgttttatgtgtgatgagcaagggcactatgcaagggagtgtcctcagcagaaaagaaaaacaccaatgcgaaccgaagatgaagtccgtaagatgatcattaccagcaccgaatggcctccaccaggaatgacaaaacgtcagagaagaaataccttccgaggggcaccacagttgacagagcatcttttagctaatggaggtagagtgtctgatagtgaagattcagatcaagtctcctcagatgatgaagaggagaagtctccccaaggtttcaaccagaataaaatggaacataaggcatgttcccgttgtggagaaatcggtcatgttgccagctcgtgtgccactacatgcgttcattgtgaggaagaccatccacccgacaggtgtccaacgagcaggatcacttgtttcttttgtgaaggaactgatcatgtaccaaaagattgtcaattcagttttctgctaacgaagaacatggccaaccaacccgccagttccaacggagagaagcatcaaggcaacacaaatcctcgccaagattacagtttcagcctaactccagtgccaggacagaggaatcaaaatgagaaaagaaaatgccgagtccgggaagatatctgttgcttcaattgtcaaggaatgggtcatttcgtcgacaagtgcccaaaaccgagaaacatagctgccagcacgtcagtccacgcaaccccctgcaatcagaagcttgttcctcagcgaattgtcatccatgcatcccgaagcagtcctatagcccgcgttgcaacagctccaactccagcgagtgcattaccacaaggtgtcaatgctcaatttcagccccagccatcaattgacaagacagaggccagtatcggcattgtacctttggatgttccagcacagcagccaagaaatcaagtaccagatgaagaacccgagcataagaaagttattgtctgttacaactgtggtacctgttaaggaagcggacatgcccatcgccaagtggtcactggagcaaatgcagtacctgttaagcctagcgctaatcagaagcaaccataatactcttatatcagtgttcaaatacttttgttttatagttgttccccgtcaatcatgtaataacagagaaacatgagataatgaatgagtttgataagtttattgagggatccatgttaagattgcaagtgctgtgagttgtgtacattttgttgctgattagggagacctagggtctcatttccgtaagctcataatctattatgaatcaaataacctagcgattgatggcgaagaaaatcaagtgatcaaccaaagagacatttgtttggactgagagtttcagatgtgtcttcttcggatcaaaggcatgcacccgttgtggagaaactggac

SEQ ID NO: 23513 - DNA, 7979 bp, Oryza sativa
atcacgcgctaatgctcgtattaattagttcgaccgagagggacgtgctcattttattctttttaggacgacagggacacgcacgtcgtgtctcgatcgatcggtttaattagcatcatggaccacacaacaacattgctaggctaggctgttgttcgaggaggccaataagttatactccagttcgatcgatcgatcgatcgatccgtttatagttttagtagaaaatttccggatttgcggagggggtatgaaaactgcggtggtccacggtccatcgtgaccacgacacacaatctagctggactgggaacaaactgcgctacgttagtctgctaattcatcagaaagtccaggttgatgtgtgctggcaggcagggctcgctcgctcgtcgcgtacgtacgatttgatggacagatacatctcttgtgtgtcgtccgtcacggggtgtgtggctgcacgcgcatatacagacgcatagctagcgatgtacgtacacctggcaataagtcgtgtagacatgtcgtgtcttgtgtaaacaagcagacacggcttgcgtacgtcctggccaatggcaagtgtgaagtgcatgtgttggcctgaacggtcacgctctcgatcgctgcaggctaacgttcggatgaaccacaactaccggccggctgcaaattgtcgagacctcgaccgatcgatcgatcgatcgcattaactcgcatatatgcatgcggcgcgtgaccgccgtacgtacgtccgacgccgcgcgtcttgtcactgcacaagcgcagagcgcgtatgcctcgcggccgtgatcgatgctgcaggcctgaggccgcccacatgcatgtggatgcatgcatatgcagtacgggacgcagctggcgaccatccaagtatccaaccagagacttcagtttgcaatatttgcacgcagcggtaccaatttacatggagctagtacgtactctcgtgatctatgtctctcgcagaggacaccgtacactagctagctgccggcctctcatcatgtacgtactactttctccgtttcataatataaattattatagcattttcttcatttatattgatgttaatatatatatatatatatatatatatatatatatatatatatatatatatatatatatatatatattcgttaatatcaatatgaatgtgagaaatgttataatgacttacattgtgaacggagggagtaattcaaaactactttccggtgttcactacacgtacaacatgcatgcagtggtgtatagaggcgtataggcgagccgatcaaagaggaggtcaaatcgtggtccttggcaggggcgagaaatattggtagttggctttatttttaattgcttagaatgaaggttctgagccttagtttttttttcacacttataagtacaaattcaacttctacatcttacatatcgtagtcctgagcctgtattaatatgtgatatatcacttcataaatatgtaagttcaaattcaacttctacatcttacataaatcgtggtcctgtacctatattaatatgtagtatatcactccataaatatgtaatcgtggtcctgagcctgtattaatatgtgatatatcattccataaatatgtaagttcaaattcaatttctacatcttacatcagaaaaaacaaattaaactacaactagttaatgtatgttcatagttattttttttttgctttttttcgcgaacgcgcaaaatgattgcacatcaatttattaagttttttttttgcgatatgtagaaattgaattttaacttacatatttatgtagtgatatatcacatgttaatatatcttctcaaaattcttaataactatttgaatgacatacaatgacatacaagtaacgagtatacgtctccgtgagagtttaaaatccactctagatgagtatgtaggagtaggaggaggaggaggagcaatgttggtgaacagatcagactgatgagtatgcagggcccgggggcgtattcgacatgagcacacatgtttgttgcattcgatctgtctcgaaatattcgccgtgcacccacattcccctgttttattggggaggggagcgtacgtagacaggataggagtcgtagtagctctcgatcatgtgatctgaacacatcagtagagagagagactgacgctgagatggcaccaacatacatatacatgcgaaatacgcagcagcattcgttggccagctggtggggtgacatagtgctgtggatgcatttggctgcatggaattttgacaaacatctcgtgaacgcgaactgttctaaccttgtttctatatgcccgagactagcagaagtactcgcattaggccccgtatcgacgtaagatctgacattttgtctcgtgtgcatgagatttgcacttgtcactatcctcccctgtttttttaaatgattccctgaagaaagttttctcctgagaaaacgatgtccttgtctgattctatataacttgcatctttggactgaattagttactgttacaattagttagtttggtggggacttgtcttctcggatgcttggactagaaaagtaaaaaagaagaaacaaagactgccgtcttatatctgttgaccatggataaatctcaattggcaagtagtagttatactcatttatcgcaaaagctgaaaaagaaacaattgcagatttagacaagtctgctgaagtgattcagttggcagtagcttgtggctcatcgctcacgcatgctgggtttcagaatttagaagagaaggggcaacggatccatgcttatcatcattgagatcgatgctaaattgtcatgattaaggagtttaactatagcatttttgtggattgtggttgcgccaagtctgttccaaagtaccatttttgggaatacgtaaggagcgtatctttatattaagaggagtaaaagtctgtacaggtgaaagagaaaacacagcaggagacgggattacaggaagtcacccaagagcattaaaccctattctcgcgatacaatgttgcgacctgagcgctctaagagcaagtttaatagtatagcccactactagctccaatttatttatagccaatctaatagctaattcatacaataattgcttactatactattagtatatggtcccacctatcatacacacattacgtcttggagttcgtgctgcagctggctacagatctgtagcccgctgctcttctctctcatcttttatcttattaaaatatggttgtagctgactaatagtctgctattgtacctgctctaaaggcatggccggtatggcagtattggtgagccgccacagcgctgcctcttccaccattgcccttgcacttctgtctagcttctgtgcttctggttgaacaccctgttattccattccttccagattgttcatgctgcgagagtagcaatggtatcgaaacctcgccgttgagagctcggtaaggtttccctcttgtcacacaactaggagtggaatgaggtttcattgacgggcaagcactccgagcgaccgattgccaagagcagtagccaccagagctatcttgattctggacatgcgaccaaaatatggttgatgctttcctcatgctcatcgcataggacacacatgctggggtggggcaagcccctgatgcttaacctgtccgccgtccagcagcggttgagtgcgtccagccaactgaagtaacggcaatgcggcggcgccagcgatttccagatctgcgtgaattaaaacgggattagaccgaggaacaatgcttggtaggcggagcgggagaagtacaggcctgaactctcccatttccaaataaattggtcaattggtcctgccgatccgagagctctatctcccgcaacaacgaccggagatgttccaaagtaccatcatcgatcatggtatgtatacagacgagaggtagcgacgagacgagtcaagttgtaggattcagacaagatacgtacgtactcgtaattgttcgtgccatcccgctgtgccggcccgaaattctgttcggcgacaaaaacccaacctgaccaataatgttgtcgatcatacacggtacaacgtacaatacaaagccatgcatgcttaattcacaagcctgtccttgaacatgaaagatcatcgaccatttctgttctccttcacgtgcatcaatcgatcgcgatgaacacacaagaattcagctagctagctagcgaaataacaactccatcgatcgatcgatcgatcgcgatgaacagggaaagaaaactgcatttgcgatgaacagatagaactgctcatactgcctaggattctcggcctgtactctgtaggatgcaacagaggcgccgaggcggcgtgccgcgtgccactgcaacaacaaccagtagctccaaaggtcacgtgagcgacggccgtgatcgagcgatcgagctgaggcctgagcggctcagctacagctagctctctgaaactctctgctcgagtaggtacattcacatgcgatttggcgcaatacgaagctctctctgtcgcgtcgagtatacgtctaccctacatgcttcgctcactcacgttgtactacagtctacagctgcaagggtacaaagtacaaactggactagtacgacatgctccagccgtccagcgagcaagcgcactagtagtaccagaggcggagtaaaaaggaaaaagaaaaaaagaaaaacgagaaggccgactgaaacttcggtttgtagtgcagaagcccaatttagaaatttttcggcctatgggcctcatcaatgcgacagcccagcccaagttttgaacgggaaacttattattgagtgtattgtggcccaaagaccaattcagtccttaacgtctcgacccagtgacacttttccgtcacatttgcagtaggcggtgtccaactccaatgtggatgactgatgatcgcgtcaatagtcaataacgatggtcaatctagccgaatggcatattctctcaaaaaagaaaagaacatatcaggcacgggcaaagaaccacctcaaatcatttttttttcatacaaaggaaaaagaagggaaagaaccacaaaattccccttttgcgatgacacggtgcctccctccatccaaaattagagccatccaggcatccagcacaaaggcctggccggcgaaagggccaccaagcggcagatggcggcttcccgaatgttcgcggcttcgcacgcacaggaattatgcactcatcgattatctgaatcacattattaaaatatttttgctaagcagagggataaacgaaaagcaacacatcaagccagtggcggagccacgaaaactccattaaattttaataatgatgagtaaattgatgatgaaatttctataacaaagactagttatattgaaatttatccgggctccaaaatttatctgactccgccactacatcaagtggaagcatagcatggtagttcacatagggctataaactgctgtaacaaaaactaaacagcgataatattgtttttaagacgataacatctcaatagtcaactcccaaaacttgagacgctctcatcaatattgtcattctttctcatctgtactacctttcttccgtttacatcatttgctccatttgtacacatttgactaggtaacacatcaactaagcatcagctgcaaaaataaatcaatgatatgataacacaacaaaagtaaactgagccaagtatcatgagaatatagaagttagtgctttgagttttgactatatatacataccagtatatcgcgacatgctggacgcagtcttggtgaaatctgtagcatccggattagtactggcacctttccaccccatcctttagaaatattgcagtttagccatgtttgaagtggattagtcttccatttgctgctattcaaaatgctttcaagtttttccagtcttttgtatcttccattgctgctcgtgggacctccaaagagctcgaagtacaggattccgagactaaacacatcagtctatgaatgaaaatgaagaaaattcttttagcaaatttgccgtagcaagctagaaattctatgaatttaaaggagagttcatcatactagtaatctctaatttgtcaaggttttatatactacttaaatattagtaatggtggtattcattctcacactaccccctaccactaatatctgagcccaccaatctattatactattatatcacctttcaacaagttctcccccatttggccatttcactattagtttcctccaaatttcaaaatcacctatttgtttaataaaacaaatgatagtattacttaaattaaatagtgcttattaattgatttaataagctagaatctcaatttgtatttcattgcaatgcacgggctctaagctagtcaggtaaaaaatacacagaaaatggtgaatgttaccttctcgttgtgagtatgcatgttccacagctcaggagacgcatggaactgagtaccccagaacctattgccccttcccaaacaagaagcagatcccatgaaagcacctaccagaaagataaacatgccgtattaagatggcaggccaaatttaaattatgtcatagggatgttagagtacgaataaatatgatatcagtacttaccacttccgaaatctccaatcttaacattgttcaaattatcaagaaatatattactgggcttgatgtctctgtgaatgaatcctttttggtggagatagtttatgccaagaactgcctccttgaaaaactcaagcttcatcaatgtctccatttttttttcggtccaaataatcatcaaaagtactgaaaaaaaatcaatttcaacaagtgatcagattgtgacttcaataaagaaacaagtgaacaaacaagaagtgtattaccatttgcacaactcctgtgccaggtatacagatgaataatgagttccagccttttcttctttccaagcaatatatagtttctttatatttgggtgacgaagcatcttcataactctggcttctctggttttataaaaatgacagcgaaattattagggtctaggaaataaataaatcttccatcattgttttagttacagaaactaagacaatttatattacctgagctcttcatcagcatgctttcttggaacatcacatctcttaacagcagatctatgggcacctttctgagtactgcatcggagcacttgaccttccgctccccttcctggtacagatgctatatttaggtctacacaatatactatattttctgaagacaaagtattaatagtgctcacttacctagggtctggtggattgagaagtgatttttcaaagaaacctcaaattcattcgcaatttcattgcaaatgaatcctttatattgcaggtcctgtgttttgtcagatagattgctctgttttcaaataagaatgattgtcataatgtgttgcacaatagtataacattgacaaatgaaaagaaataaatactaactgttaaaagacttttcccacgtggtgaatttgttgattccatatcaaagctccaagtagaatgccaagccaatctagatttatctgcacattacaagcatcactgtatcacataaaattatttaaagctgaaaagtgatgcagctcttccttatagctatggtgcaactatgaacgaaacttggatgttgagaaaaaaatacatttagcgaacatactcgatacaatttaggagtgaatttcaactgtttattttaattgctcacaatcatggtcagtatatttcgtgtcatggaaccaatttttcctaatgccaaatggtgcaccaaaatgagaacattgagacatgtatcaattaaattggcaggttaaatagtgttgcaaataacatgtgaaaacaaagaaatta

SEQ ID NO: 23514 - DNA, 4110 bp, Oryza sativa
tggttgatcactagcataattaaggcataaacatcatgatagattttagcaatcatttttacttttctagcagttaccttaattattcatgatggaggttgctatactaaaccaacattacaacatgaacaataactgaagaaaaaaccggcacaattttgcatctcaaacaattaatgggtcgacatgatataaatgtaaatattatagtaccatttttccgcatcaatgttgcagccgcccgggactcctgaggccagatgtgaatgtccaccaagttcatctgccttcctcttcctcgacgggacctggccttgctggcgtcgaagttggtggcggtcatgagcaccgatgaagcgatgactcctcctttccccatggagttcatagtcaagcgagatgtgtctactttgcagccttcagaagatacagccctctcgatcgcatcgccggagggagacgccgatgtgcttccccacggtacggagagcttgaactctgcgcgctcatgcttcccatcctcgagatcgaatgagacagtgaggaagccacgccaccgagaggaagcggcgcgaccggcggcggcgggtaagcctattgcacggcggagcatcgccgcatctggtggggaatggaggggagggaggcggtgaggtttccgaggagacgacgaagtgcggggtgggagggaggggtttgtttccctgaagaagaaagaaggtagcagcagcacgcgcacacgcggcggggtgggtgcttggacgttcgggcgtcgggaggggtgggcccgggtggcagtgagagaagggacgagccgggcgagagagatggtgtgttgcgtgctaggagcaagtgggcacaggggttgttttggtggggcccggttgtccagaggggttacagatacaggtgcgaggtgtgtgtgtgtcctgtccaatccaaatcggaagtaacccgtcgtcgtcgtcgtcgtcgtcaatttggagaacccgcggacgcggcatgggtgtgcagcaactgggaggcgccggcggcgggcgcgggggcggccggcggagccgccgaggtcgccgtgaggcaccaccgcgccttgcccaccggtgcgccgacgaaggactccgggctcctctccgcgtggtaagtaacgtgcctacctgatctccgctatggataatggattccgcgtggtgaagtttcttgatctcctttcgtgccatgagcattgttttgggggactgcctctagggtttggtaactgaataccgttcgaagggcattttgcaattgaactgtgtggaactttgatttcaaggagtacatcgatagttaggtaattatttttgaactgtacacgtatagtcattgaggaactgcagtgatgatttctcatttatagattcttttgactgacaaatctggcacttgaaaagtatttttctagtagctgaagttgacaaaaattccatggaagaggctagtagagtttctgatgcttacctcaatatgccggatgccgcccatatcaccgagcatttcctgtcttcaatgccaatacttactgtgttcatgttgatcataacatatctgttcgcgaaaacatgtcttgttgccacccacttcaattgtttagtttgggacttcttaatgctgccatacttcacatccaatgactccttgatccttttctggcccactatcatcgcttggcacgtgaagtttagaaagtaaatagttagagcttctgcacttcatgagctcctttttcggtcgctcgcccttgacacaatctggctggtatggtctagatcctgaagtgtggcgcatttgtagaagtgtgttggatgtgtttggagaggttttctttaatccctccttgtacttttcttatctcttcttaatgaaatgacatacagctttcctgcatgttcgataaagagaaagtaaatagtatttgtttgtatcaacaattataagttataacctgtaacaagtctagtttcagcttcttctgtgctaagattttcgtagcttcaaaggaacatttctcgtataaaactcataatgacatctgctgcacaagtgaaaatgggcatggtggttaggttctagttcctgttttctcttaaaaatcacattgttatgcttgttaggcagcagttaccatattggcttctaaccattatcgtgcatgatctgaaagtggcaccatgtcgccttttcagatgttaccaaggtattcacagacaatggccttgaggttcttggctggcctgttctttttaatgtatcagtggtaggtcgctatgcaaaaagaaccatgcatgatatacaacagatttgtgaaactcgcaaaataaaaggataatgcggataacagatagggagggatggactttatttgtgttctttgtcaagcagaagtgcagaattgtattagggaaattatatttggacctttggaatggactctacaaatctctttttgccatataacaaagaaaatgcagtaccaatacaaatcgtagatggcctcttgcacaatcagtgaggttactagggcacaatggagagagaaatgcaatataggtttacatttacatttacatcctaaatctttacttcttttatttgttcgctgcctctgctgttatggaaagttcgttattgaagaataaacatacctggagctactcatagtgttcctttccttgtaagggaacttgagcaggatgcaatcaagggaagccacagtacagtctcctgtatggcgcaggtgcgagcatggaatacacccatttggtgaccctaaagcatctgagcatgaaacactacagcaaaccttgacagcactgctgaagtaagaggctgcacatggagcatctattactagtgcttcttgtccataccattgacatagcttgcttcttgtttgtaataatggcatgtacgattttttttgggttcttcttgatgcaaaatacagaaatctgatgaaaaagacttgcgtttaattctaaagttctaaaacaattgaaagatgcacggtatgcatgcaaacatcctgtgttagtttgaatttaatgcttttgagatgtggggaatgaggttgtacttccatatgttataaagttgcaagttactgctagttgctaagcaacatgattttaacttgatctatttcagtgtgcattaccatttctatgtatcaatctgaatgtgcatcatgcaccctgttctcttcttcaataaactttttacattaaaaggtgctgcaaaactgctgtattattaaatcatgaaattctttcttgcaccagttgctgctaagaagtggtaaagtcttgctgaagctcttatgattcttttcctgaggcatacatcccacattgtgatgaaatatcctgagatatggagtgcattagtagatatagaagccatgggtatacatcaaatttgtcatatactaactggtgcaatttctatcgaagtgaaggttctcttgatttgtgcattaagcgatccacttttatgactactataaaggtcacatggaggcttgagatggacctgctttgctcttatttaggtaagatcatttgtgtgtgaatctgttaggttttttttttcttttgctatatcagttcatgatgtatatcacagttttcttgcgcagtttggtccatctcacagagtatttaattgccttgtcacattgtatgtttagaagtgaccatctcctatttgtgtaatgtttatctctttttctattgttacctgctgacacttctctgacactactaccttatctttttcttgtaaagctgggcagagaaatattatcattctgggtgaagacgttctctgcgaagagtctagcaaactttgtgttcatccaataggaccaatacagacctggaggtagcatctaagtaatcaattgttgtcaaaacatattttattcgttgtttgcctctgttctgccatttcctcaatcaaaatgacatcaatttgatggtatgatatgagatctcattttctacagaatgtgtgtttttccttttccttttatatgtgatacttcttccgtttcataatgtaagactttctagc

SEQ ID NO: 23515 - DNA, 4900 bp, Oryza sativa
  unsure (1)..(4900): unsure at all n locations
attatggttcaagttaagttctctctctcacacactcatggcagtcctaccaatggcgataccgatgtagggcacgcctctcggctctacctcaacggttgccccaccgtagcgcacctgcctcactcaggggtaaaccatctatgcagggatactgcctccgctcggctatctaatccgctaggtctatacccattcgagaagtatggttgtacggaggtcgtttcatgcttaacttcatggctcggtccttaattgactggggacggtactagccttttctagataccacccaaatcttccgtccgccccagtcgaaaacagttgtttagttttatttctcctttcacaaatcatgtcatcaatatcatggcaatgtggcgctcatgtctccacatgccgcatctcaattaccttcccaaaggtaattgcccaagcatatagcatttgataaatatgaatatgcatgaatctagagtagcattttctaagcatttgtcatagttgactagggactcatacgtaatcatggttacaaggatttaagggcaaacaataatcaaggcatggcataatcacaagtaggatgtttatcattgcatgcaattttatttgtaaacaaaataatttcgcaattgggatcaatatgttcaaggaatagtgatgacttgcctgctcaggatagtccttattcttgatacaatcgtgatcaaccttcacctcctggaagctgcatacgttgcctcacgactaatcgatatacaaattctataatacgcgagaaaaaaccaatatttaaacaacaatcaaatatgtacaaacaaaatatagttgttggggtcgaacctagggttgctcatactactcgtgtttgctaatggattctaatcaagctaagaactaaggtttcttaatctttatgttgtcatcatggtcttttcaggagttaaccaacatagcatttatgggatacatatttggctaatatgtggtttagtctagcaaatggctatatatgcatctatctaaatagaacggttatacactagaggttctattgccggatggattttggatcggtcaaataattactgtgaatcatttctattattatgaacatattttatttgtcacaataaattatgaaaggttaataattatccatgctctatatgttacacttgtgaggctaataatattatagttacagattatcccatcacataattttacaatgaataatcttaatttacaattgaacttaggttatattaggtcaaggtctataattaggatttatccaccatacatgttcatcatatattctctttaattttaatacgtgcaatcaagcaatttaatactacaccgtatagctataatgggttgtgcagtatatgtgtgtgcacaatatcttaatatttaatcatttactgaatagttgctatttactataggctatatagtacatgtgattttaagtggatttatgagtgagttaccgtctatactacttaagggttgatttccaatctaaacatatactattgtataggaaatgccgtttaattaatttcgtgtgggtgattttagtcacactagctctgttattatctctcataaacaagttaaagactcttctatgtgtgtttatattttagtcacgaaatatgaggctaaacattatttatatactttggacgcatgtgtataattatatagggacatatattaataaatggcactagcatttcctatgcttaaattaatttgaaacaatgcttctaattagtttacatgggttntatagtgagaaagcatgttaaagacaattattngacatctactntatagtatattttcaattttatttattagcacatttttaagttaactattatgcatcatcttgatatgtaatgaacttttaattataaacatattttattaaatcgtgaactatataccattggaaagcttatgaatttagatgaatttaggttcaagtttcactcaaatccgagttaaaacgaataagttacgctagtttaaagattcaaatttgaattaattcaaataattgcgaaatgctactgttcctaattcatttatttttagtacaaccttatccacaagctatagtgactgacaggtggggtcttcctattttcttttcttttattttatttttctttctaaaggaatccatatgggcaaatgacgggtgggcccgactcctttgactagggtcaaaccggccattaaacccggtagggcccgcatgtcatagactcgagaccataaaacttctataattagatttttaatcacccggacccacatgtaatagacccaactaataaagattaagaaggggattactattcaccaattacgtggggcccactctaatctctcctctccttctctttttctctctctcctcgctacctctctgcttcctctctctttctcgcggctcggctggaatcagcgggagacgtggcgatgacaagcggtgggggagggggaggttcaccggaccggcggcggggtcgacggagacgcggcggcggggtcgatggcggagcacggcgcggcgacaaggcgctgcgctgtggcggggcgaggcgcgtctgctcagcggcggcggcggcttccgaagaggtggcaacgccggggacaggaaaaacaggggaaagggaggggaggtggtgagggtggtgtgggaagcaatggacgggccggggggggggggtttatataggcgtggggagaggtggtcggcctgatggcgatgggacggcgcggcgcgcggagagtgaggcgacggtgcggggctcggagcggcgacgcgacgggcgggcggcgcggcgcggggctcggcgtggctcggcatggggctcggcgcgacgggacgggcgggacggcgacaggcgagtggtgcgcggcggcagcaacgggcgcgcggcggggcaggggcgcggggccgatgagacaggtgcgcagcgacgggacatcggcggcgaggacggctaggcgcggtgtggcagaggagggggaagggctaggggaccacatcgaacacctaggggctaatgaacagtgactttttcctatttatccaattttagggcatatttcctattaaaacttgtcccataaattctatatttcacacaattgatgtttacccaatagatgtgttaatttagatgaaagtttactcaatttttaatattacccatattttatttttatatatatttttctattgcattatttaaatgaggtctaattataaaattaacctagataattttggaggctttgagggttctaaaattaattaaaatatcctaatgtggcaattattattgcaatagcacattgaatgaacttatttgtataacaatgcattttatgtgggtctattcattctataaatataaattgagactcagtacaacattaacctaattgtttaaattaaacactcacatattcttatttatatataaagcttaatttatttatatgaccattattttatatgagtgattttcatgtcatgagggactcggtgaaatgttctaagtatcaatctatatattccggtgaatttcttatttttaaacacgatcattatagtggtgatcatcatttcatgtgttcttatatttcatgtgagattggattcaaatgaattaggtttgattttactgtttcttttagctaatcatggcatcaagctatcagcatggttcgaatatttaatatttgatctataaattaaattagtaattaaccttccctttgtttggatttgctttctttgtgattatttacatttcggcaagcaatatcaaccataacaaccagcatgatgcaaaagttttaaaaagttcaaaatttaagtgatttttattgtcgggaattttcaggatgttacaatatgatgctagttttattcgtccttgtcgatatgctgagtgggtttctagcatagttcctgttatcaagaagaatgccaaggtgagagtgtgcattgattttagagatttgaataaagctaccccaaaggacgaatatccaatgccagtagccgatcaactggttgatgctgcttcagggcacaaaattttgagttttatggatagaaacgcgggatacaatcaaatttttatggccgaagaagacattcataagacggcttttaggtgtcctggtgcaatcggcttgtttgagtgggttgtgatgactttcggcttaaaaagtgctggagcaacatatcaaagagctatgaattatatataccatgatttaatcggctggttggttgaggtctatattgatgatgtggttgtcaagtctaaagagatagaggaccacataaccgatttgaggaaagtttttgagagaaccaggaaatatggcttgaagatgaatccgacaaagtgtgcttttggtgtgtcggctgccagttcttaggatttcttgttcatgagagggggattgaaattactcaaagaagtatcaatgcgatcaagaagattaagcctacggagaacaaaacagaattgcaggagatgatcggcaagattaattctattagaagatttatttctaatttgtctggaaggttagagccttttacgccattattgagattgaaggccgatcagcagtttacttggggcagcgcaacagaaagctttggataatatcaagggatacttgagttctccttcagttttgattcctccacagaaagggataccttttcggttatatttgtcggccggagagaagtcaatcggctcggttttgattcaggagctcgaaggaaaggaaagggttgtgttttatttaagccgtcggctcttggatgcagagacta

SEQ ID NO: 23516 - DNA, 2602 bp, Oryza sativa
ctgcaacatcaccgcacccaggacaatcttcaatagatggcagcctcataccctcattccaacaaaatctaaagaactcgcaaccccaatgaggatcaaagccatcaccatcttcttcatgatacctctcctgctgtttactatacctcttcttatatttgttaataatcttagccgaattcacttgaaaacctcttgcacgaccaccatcgactgttcggccaactgtatgcaccatattgacaggaaaaggattgccatcaactttcatcggccttttagaatcatcaaacttgattttacctccctcaatagctgcttggatttgctgcctgaagaccttgcaatcattagtcgtatgagacccagaattatgccacttgcaataccttttcttgcccaactcttcaaccgatggaattgtgtgtccggcaggaagttgaatctgtttttctcgaagaagcaagtcaaatattttatcagccttggttatgtcaaagccatacctttcctctttccctgagttctttgcccattgtcatggtataacctttttgctcctaacccactcggctgtagctatttcagaatcatcatcctcatcatccgatccatacatgtaagggcagacatgattcacctttctagaattctttctagcctccgcaaacctttgttcatgcaaagctaccttctgtgtaagatgcgacaagctttcaaagtcttcagatgagaacttctccctgatcggagcaatcatcccttgaaaagccaaatcggctaactgggcattagtcaaactcaagctgtaacacttattcctcatctcctgaatctctgaatatattcatgtaccggctcatcatgcttttgcttgatcgacgtgagatcggacaatttcatctcataaatcccactatagaaataactatgaaactacttttctaaatcggcccaactgttaattgacccatgtggcaaagaagaaaaccaagtaaaagccgatccagccaacgacaaccggaataacctaacccttaaggcatccacagccgatgcctcaccacactgaactaaaaatcggctaatgtgctcataagtcgatgtagtatcttgccctgaaaactttgaaaaatctggtaccttaaaccgattaggtagaggaactctttcaaaccattcaggataaggttgtcggtacaaatttccagcctcctttggcctaagcccaaaatgctccttcatgacatccgcaattaaatcggcccatggtcgctgctgaggtgttccctgaggttgttgtggtatgggctcaaactgattgtattgaggaacaaactggggctgagccgatcctgcctgttggtattgaacatgcggtgattgcggctgatactgataattcaaattgcccccttggtaattctgaagatctggctgaatattgagcaccaaatgctcgggaataacttgaggtatcaccgtgccatctggttgtacatgatgaaccaagtgctctgggacaacctgatttgtagcatgctgcacaggctgaccaccaggtgttgcaaacccagccgatgcattcattgagccttgctgctgaatcgactgaacgacctgctgctttaacggtgtctgctgaatcggctgtaaagtcggccgtcttggtggtgtctgttgaactggttgtatgacctgctggattgggggtgtttgttgaataagttgcacaacttattgcctgggtggtgtttgctgaattggctgctgctgggttggatcaacagcattctgaggaggtagaaacatggatgcaacctagtcttgcgttagccgagtcacattttgtccagcatgttgtggttgctctcttaccaacaattggggattgactaattggcctggagccaaaggcggcgcagcaggtacgggagccaatgctggtgccgtcggctgagccggtgacgcactaagaagggctgactggatgactggctgtttatcggtgattaatgtccgataattcgggaatactcctcctggtaggtaaaccggtcccgtagctttatactcggccattgaaccatcaaccattgacttcatcatgtttgacaaggtattaattaataccccagattggttgatcaaagcattatacacggcatagtcaacccgatcttggaagttattgaaaaactcatgtgctgcattaccatcctgattaagatttccaccttgtaatccttgggaattatcatcaagaccttgaacttcttgagaaccatcaccttgatctccttgagaaccatctgcaacaccttgatcacttggctaagccgcaccatccggagctgatttgacctctccatccttaaaagaacctgtcccaggaacatcagcaaccaccttaactttatacttctgaactagcgttcctttacgggtttctgtgaatgagctcaaaaattggttcctcgcttgctgcatcattgcctcaagatctttttgctgttcaagtgtcaatttgtccaaagtgacgggcataattgtcacgcccagaaatttagcctaaatttccagactattttgtgtattaaat

SEQ ID NO: 23517 - DNA, 10127 bp, Oryza sativa
gcgatcctagagtggcttcagctccactccacaggcaaaactcaactggggtctgagccttggtcctctaacttcgtcttcagctcagaagcactacgcttctgaaaagggggaataatagcaaggctgagtacaaccacgtactcagcaagccacaccaatgatgcagacgtgcaaagggatacaaggacggtttgtggctatttgcataaaggcagttgtaaaacattttatttagcaaacagtaaaactgttgagtaattaaagtaacattaaatctccactgatcaacgctacaccacgttgaacaggcccaaccaacccacctggactacagtgcattgggtcgatttattaggtgtgagactaatcacggtgaatctggtcgatcgcccataaccgcgggcacggctattcgaatagttttactctggccagaggtgcacaactgtacccacaagacacaacccaccgacatgtcaccgcgtcatcatgtgcccatgatgcacacgtcaccatgtcgagtgattgtgacgagacccttcgcataaccctcccctaaccatccacaccacgctaaggtttcacccccacccctcaaaaggcagtgggcggtcccctcttgcgccgcggtgaatccggcagctggacaaccggacaccccggccgacccaactccatcacgcccaccctcgccactggtgcctaggaaagggtcgagctatacttcagatcaagcagttacccactcccgcttgtggcaagcgctgtaagtcttccagggtttcccgtgaaccggtccttaattgccatgggtgcgactcacaaaaccatgcacccacagcccaccattcagtcgcattttagttggataattacgaccataaaacatggccagatgtctcgagcacgcggctcaacaagatactagtatgtctaatactgcaattatcccatcgactgagctagtggtaattcagcatggctaagcatatagttctagctaggtcacataagtaacatgagctagtcaatttatcacccaaggttgacaaaggatagatatcaagtaaacatggcacaagcgagcagataggtaaaccctgaccccgtgtaattagcaaaacatgcatatttatttgcaaacagtaaaacatttgtaaattaggatcaacatgctcaaggggaatgtgtgacttgccttgcttcttcactttgatcttccgaactcttttccttgcgaccgcggacttccgaaacgacggaaactacacgctggcacgcaaaacgaggaaaaactctaataaaaaccaaggaaacagtacataaaaactaaacaaacatgtagagctcaattttagatgaattttgcaagttgaatggctcaattcggagttcgaatgaattagatatgaattttagaagttttgagccatttaaataaatttctacaattaaactcgatttattgcgcaattattatttatttttacaaaggaaatggtcctcgctgacgtcagcaaaggggcggccggcgccgacacgcggggcccaccggtcagcggcacaagagcgccggtccaccgtggaccgggaccaccgaggcggtcaccgccggtccacgggaaccaacggtccggatcggcccaagccgatcggacggccacgagacggcgcggctggggcacgggcacggcatgaaaccggctcggccgagccaaggcgcggcggcggcatgcggccaccggcggcagcagccggcgacgcggaacagcggcgggcggtcggcgaagaggaaaaggaggagggaggcggctcaccgagaggcgcggcgacggagagacgaccatggggaggcgaccggcggcggaaaggatggcggcggccggcacgggaggcgacgggaacggcgttccgacgacgcccgaccatggcggagccgcggccgagggccggcaagacctggggaaattattggagcggttagggagggaaataggcgaccggagcggcgagaataccacgccggagaggaatggtggggctcaccggcgaccgagagataccacgttccggtgggtttccggcgatgaacaacggtgaccgaggtgctgcacggcgctgcgaggcgagaggtgaagacggagcgacgcggcggcggctaaggcgacggtggcacacggctggaggcggcgtatggtggtggtggctcgggatgcacggtggaagggtggttgcggtggtggaatggggaaacggagcggaggccggggtagagcttggcacggcgttgccggcggcgcaagcggcgaggtgcggcgacgactagcgcggcggcagcggccggctgaaggcggtgtgtggcggtagtggctcggcctcgcgatgggaaggtggttccggcggtggaggagggagatggagtggatgccggggtgcggtggggtggtgtgatgctataggtggtggcggcgcagcgcggcagcgacgggagcggcggtggcgggcggctggagatcgccggcgagcggcggcgatgcggatcggcgtggagagctcggtagagggcgtgggagacacgggaaaacggggaaagaggaagaggaggccacggggattgattttatagctcaagggggcgaggagagggccggggagcggcggatttcgaggggaagtagggcagcgtcgtgggggagagagaaacgcgggaggcggcgacgtggccggattttgcggggagagtggggggggaaacggcgcggacgtgggcggcgaggtcccacggacaagcgcgcgcgcgcggggtggaggaggtgggcggaaacggcggcgacgttggacggctcgggcggccatggcggttgctggcccgggctggaggttgggggtgaccccgacaggtggggcccacctgtcggcggctcggggagaggagggaggatgagggaggcgaagcggacttgcgcgaaggagggggcaagccgggccgacggcccaaagagaagggaggaggggaaaaggagggcggccgggcccgagaggatggagagggagaagatcttgggccgaaagcggcccaaagacaaagaggggaaattttatttgttttctttttattttaattgatgcaatgatctttgtgctattaaaactatttctcgagctccgaaaattcacggaaaattccggagagtacattagggcacaaagaatattacaaaatattcccggccaatgatttttaaagggaaaattttaattctcccaataattcacttgattaagttgatttaacttttatttaatttctagaaaatacattatttaatgatttttaatcccgaacgaaaatcggggcgttacaataatgttgctttcatcaacctcaggcagacccaacttaagcatcttagctttaactgatccaggttctccagccgaggacggcgatgctggcggcttctcggctatgaggaaaactgctgctgtgattctgacttctaatgtgtcccaccgggcgtgccaaaagcgtgttgacaaaaaacacgaggcctgggagatctgcttaactccagtgcaggtccaaagatcgccttcggatgtatgagcgtgccagttgatttgattctgcaatcaacaagaaacaaagacaaagaaaccgtggttaaatctataaatgatagccgatcggctgattgccgataacatatcatttatctctgagccgatgtcatatgtgaatcgatcggcgatcacaaataggtaacaaggaactaaatttactcgatcggctgtagatatcaataatatgtaatccttatatcgatatatattcaaatcaagtgactgggatagatcggacgccatgccgagacagtataaatcacttagatcaaaatacatattaacaacaagattatatatgttcatagcgtagccgatcatgtagatctagcatgtatcggctaatactccgataccactctatattaagatattaaagcaagtaagatataccaaatagaagcctaacatactttaaatgcaacaagatcttaatataaaggacagatttaacatgtcaatcaagcgtataaggtaaaagtagttaaatcaggtaagatcggctgaaactccgatgctaccctaatcggcaaccaaaaggcaggctagagattatagttctaagcacgacttaatagatcaaactcaactaatgcagcattaagtatgaaaagaagaacaatatctagacaatcaagccgctggatgtttcatagagtggtagatatcttatataatctaagccaacatcgttatttaacctaatcagccgccttttactaacagatgttagccgattatagattagataatgatattgtcaaagattatataagatatatgataactcgacgaattacataaacaagattagagtatcatagagatgggagcactaatcccggaaacacaagccatcataacaagttttacctcatgtcgaagatcgaaactgatgcagctcaacccgaaagtaagaactcgtcgaaataaaactaaagcaaaaagggtggtgatgcgccgacattgtattgaacgtgtgtgttaataattacatagggctcggggtctatttatacccaagaattacaagatatgtccatattggacacgactcttatctctaacaaactctaagataccataagtctttgcggcagacttttgcccaagtttatctctaaggaaattacataaaatatcctaattaatagatacaattgccttcccaggactctatccatgcacggcaatcatcttgaagcacaccaactcgaacccgatgtcgtacacaagtcatattgtcggaatcggctgtatcacttaacccagtctgactcagacttagccgatcccagttgtagccgatccggacttcagccgattttactctatttccgcaacaatccttatcttcgattctgcttcgactccatcttcatctccgatgctgatatcaccaaatttggtcgttaacaatcatgcgttaatatatcattctattttgcatgtagagagtgttccaacccagaatacacccgtcccacatggattctaccccttattcctaggagaaaattgggaatatgccatgtctcaatgtaagaagtgggttttcccaaatacgattttcatcaatatcaccccgaccgaaagctataggcttccacttaggccgagtttagttccaaactttttcttcaaactttcaacttttccatcacatcaaaactttcctacacatataaacttccaattttttttcacatcattccaattttaatcaaactttcaattttaacgtgaactaaacacacctttactacgccatggatggagtgtacgagctgttcttgttggcttccttcattttaatggcttggagggtgatgacgacgagcttatggatccggcatcgttgtcgatgagcgcgcgggttagttgagtgcacaggtccagcaaacgatgacgacgagtgcgtggatctggcgccacccctgatgagcgcacgggtccaaatgatgacgatgatgagtgcactggtttcgccggccgccgtcgtcacttttcttcatctttgcatttcttaatttgagaaatgctagaaaaaatttattttatgttatcataacttaccgtaccctacgtaaccggcttaaagatgaaactaacaaaatggttcaaacttagaggtccaaactcatttagtcctattcacgtcaatcgtcttatcgtctgaatatatgacctcatcaactatattatcatgtactccctccgtcccaaaaaaaggcaaaccctaagtttccgtgtccaattttaactgtccgtcttatatgaaaattttttataattcgtatttttattgttattagatgataaaatatgattaatattttatgcgtgacttgtctttttaatttttttcataattttttcaaataagacggacggtcaaacgttgagcacggaaaccagggtttgtctttttttgggacggaaggagtagataatcagatttagcctcttttaagattttggcttttttggtttgactttcttaaactgaacctgtttttaattataggtgtgcaatgaagattttattttataacttcgataacctcattgttatggcttttaggttttgaacgtgtactagtcataggattactacaaacatccaatgtaggagccaattccgaaagagtcgtcggttgcggtttagccggtggtgccccctcaatcgcacgtcgggtttgagcggtgatgttgtagcggtctgacttaccactactaccgatcagaccagcatattgtgctaaatttaggatctaccatattgagagaattattggtacttttcataatctaatatcgttgtatctgaagatattatgaagatgtatgctattataggaagtagttgcaccgccaccaagcaatcggctatttagccgattctctgcttattcatgagagcatgtagcgttttctcaaagatagaattaaaacagataaaccagttatttaaactagcaacacagtgcagtaatagtgtagtactgccgccgttgacagcagctgacgacactctattttcgttgatgccggtggcgaagtccaacgccgacattgtctcgccatcgcctccactgcagccacatcccacatagtctcgcttccacagcttgtgcctatatacctcaccaagaaccaagtgcgatccgtcatggtctgcataacagcagcgccccgcgggtcagaggaaagctcccgaacagctccatggcgagcggtacaggatctcgtggcaaggcagcacaggagcacgggagccacggcgtggcgccggcgcatggtcgcgtataacaaccacgatggagattatttgtagctgcccagagatgaatgtctcggaagatggtgtaggcgtgtagcgagtacggaccgacatttacacattctgatcatactacccttcatcatgaatggactgacgtatagacatgattggtactcctaccttggtacctattactaatacccattagtaccggtaaaacagctcaaaacttaaattgcccagaaccaaaatatgattacaaatggcacgaatcctgtagaggattcgagaagtttagaagtgttttcagctttcgctgcctttatgaggttccacaaaattcgcagtattcggggcacttcgttgcgtcacaagtatcctgggttatttctttttccatgatgctgtcccaggaaagtgtcaaagaacgaacaccttcctgtcacctaatctgatgatcacttgctgattgcagttgaacataggcaaggccacccgtcattccagctgcaacgttcctccttactctaccaattgaggaatatgcatatgtcaggaccagcgtcggagccaaggcccggcgaccctgagcagctgcccgggctctgccggctacatgcaaccatgtcccattagattaaatctaattacctagctaatcatatttaatcaccgtatgaattgaaacaacaatagtatatagtgtacatacttataacgatttagtgtaaaatagcaaagcaaatgctcactctaaaatgatctacaaatttgtatagatttgtgtatactatatttgttgttaaacttgcctaggctcacgatccgccactagtcaggacaaaacactgtgatcctcatttagcagcatgtcctacttacttcccccgtttcacaacgtaagtcattctaacatttcccacaatatatctagattcattaacatcaatataaatatgggaaatactaaaatgacttacattgtgaaacagggaggatttgccaactacacagccaccgatcatgtactcgcagcaatgatctccagtgccctgacctcaaccactgattgaccaagagagtttcacctgttttgcctgtcacaaatacctgctcactagtagccaacacagacaagcgtttccagctatagtagcttcgtcaggaagtcaggaacgaatcctgtgctatctagtacactctacaggagctacaaccatctctccaccacccatgccctgcaaattcttttttaaaaaaagagagggtattttaaatctggtcaggatcaattttcaaatgtgctgtatacatttggtacctttccaacataatcattggcctctctcaacttgcagagtattccaggagttagaaaacatccaaaagactggccctgcacttccagtaaacctaaaaggcaaaaaacaattatgctcctaacttttcataagagaaactaaagaaaactaaaaatagaaaatggttaacatcgtaatgttgagctggcctgcaaagcctgtgtcagcgtacttcttcgcaatgacacctgctacttgaccacagacagccctctcaacattataatatcttggaacctcctcattctcaattacatcagatatctgcaaaatagaatatataaataatgctgcatcattaagcaagatacaagtatacaactgcacacttcgctttaaactacaattaagggcatcgatcgtcaaaattaatttctggtttcaagctgaccaaatagcagaatgaaggattactttgattgactattcacaaatcagtcactagggaggttaatgtaactgagaaaggaatggaaaacattacatcaggatttgcaaggattgtctcatcaagaacagggccattagtgtggacatcttgaacacatccagtagctattcatagccacagaaccaaaaccatattcatccacgcccatgacactagccataaggacatattggcaacttctgaatccaccatccaccctaccatcctctctcacaatcaattttgcataagtgtcaggagaaaagttaactagcattagaacaaacaagatatttcaatagggtaataacaaacaaatagatgaggctaacctggtgtgcttctgaaagaccaagttcccaaggaccggcagaatgcttaatcaaactaattggcctagctccagtgccaccatcataatctgatgtgtgacagaaatacaaatatttcaaatataagttttcataaataatctaagttaaatgctgcaataatctaacttcattcgaagaagactataatgtttagtacatccattcagtttgtaaattagttcagtatcttcattagtatgagattttttggaagagaccatcatgcgctacactgctaaaattttggggccattctactccctccattccaaaatacaagtatttccagcattcaaaatttgttccacaatgtaagcatttccagggcactgatttcaatgcacggaaatccataaattttcagccaattaggtgcttgggaagagaatctaagcaattcaaaattcaaattttgaccattgtggtgactgaaagggaatcttatgacttaatgttagtactccctctatcccaaaatataagggattttggattttgactggttaggacacatcctaatactacgaatcacgaatttggacagggagcctgtccgtactaggatatgccccatcctatcaaaataccttatattttgggacggcgggagtatatgctaaacaacctagaaatgcttatattttggaacgagggaagtagtaaatttctcaaaaaaaatcctccaaaatctctaacagcttctaggacactttttttcactaaatagtggcattcgttagcaagtactcagcgtcagtgcatatcccattcagtaaaatatagctaaccaatatctcaaggaaggaaatatttctcaatctggagaaagacaaactacaaaagggagttatatcattgtgaataccatataaattggcaaattatgtagcataatattgcaaacaaaaccctatgcaacttgatgaggtatgcattgcatccgtagcaagagttaatccgcgttaatatgtagaatgaaattagttaacatgctctgcttctttatttctgtgagatacagtacacattataaagtaaatttggcaaat

SEQ ID NO: 23518 - DNA, 2956 bp, Oryza sativa
catactgcgaatcaacttgattcactgattattgacagctacctgggagaacctatccttttccagattatgtgtcaagatgtatcctccactgctcaaacatgctttttctgtcaaccagcttaggttcaagctagttgttatcaccgaaaagtatttttagcattttcttttaccctaaaattgctcttgactcagtgctaatcagttgtgaggcaacacgttatccagaaaaagaggatccctgagttcctccacctcccaaccaaccccattcaacacagacaaggacagaggagtacaaaacctagttatcgagaaaagacattttgaaaataggggtgctttgaaaaactccgatgagctctctgttactatgcattttctttctcctttctatggacaaacttttggtagcatgtccgtccgaatttaaactagtgtcatttgaagtcacagtaaaattgtttatcttacgcctctgtggaatggaacacctcactctatgagaagcatgattctagcatttctagtttatcactagtttgtcaattggaacatgtaacatttacagaatcttccatgtgggatgatccattaatatcaaaatagtattcattataagcggatgtagagaagggaaatggcagaacttatccagcaagagatggatgactggaaatcagaacacatatgtacagacaaaagcattacctgcaatatctcgttcaatgacttttcaagggccagcttcacatcagcaggatgcagagcgccactttcataatcagctgtaagttcctccatgctcagaaaagtcctaaacaagatagaagtaatcacaaaccatagaataaaagcatacaaatataatgcatgattacgttatatgatttagttgtgaattgttaggtattgatgacaccgacaggacaaaacaattgtactaatactgttgaattgtaaaattaagatttgtccagaaatctgcggaagtgactctgcaacttcttactttttgccaccattccctttcttctggaccacctcaaacattccaaaccaaggcaagatgatatattttatgtactccaaacatggattgccttctgctagttttggagggcagaaagctttttccattttaaaacatatatcctcctgaaatatacaacaggtaaatattgaacaatctccattgtcaaccttcaaacaataactaatgatttcgccaaaacatcgatcagacgatgagctgcataaggtagcatatttcaacaactctatggtcacactgattgacaaaaccaaaccccataccagaactgttcaaaatgtcaaataacataataattatcacatatagggttcaagtaacaaaaaagctaaaacaaactggttaataatcatctgttgcagtgcataagaacaaagttagcctcttttcaaacaaagaatggggagtcttcccttgttactcatctccctggatcaagatgagtttattgcctaagcatataatagcaggttcgagttaaacttatgttgcagtaaaaaaaaaaggatggaacgaagagaatatataaacaggattggcatcatataggatgagtataacggtagtaaaaccttatcatcttccatgaagatagcccaagctggatgcctcctgttctccatttgagggtattgtaataaattaggaagcatatctgtagtttgagttaaggatgtgcacccgagtatgtttcggtgcatgtaccttgtgcaagtgtcttggcatgtaagtaccaccatccaagaaccaaataccaaaagcacaagcacatgtaacaacttggaacaatacatataaaagtgaaaagatactgtccaaaacagcaattgccttattcttctttttgaaatgcttataatattgtctagctaataagttggcatcatgctgttccattcccaacagccatatgtctgcctgcagttgataatgtatgcattgcaagaagctttaaagaagtccattacaaaatcccatgtaaaataaaatacagaagcatatttgaacactattactttagttgatatggcaatcacagaattggttgcacaaaagtttcacaacaatcagtctagtgaaagtgaacagatacataatctacacttgaaaccaaaaaaaaaagaggagtatgttatatcaataggccttgtgtacaagaattggtgaggtgcaagatcaaagggaagcaaacagggttggactgcatagtcaaataactatattaatagaactacactaattgcttccttcatttgtccctactaagtttaaagcaccaccactacttttgctcatttaacaaattagcccctgatatttccagaagttattaatatatcagcggttactgttagataaattgactgaaacataccaatggcaacacatttgcaaacagaggtagtaggtacattaaacataccttctgaaataatatgctagcacactgcaagcaaatgtaaaaaatctcatcaacatttaattttccaatcgcataagaatttctactcccacaaaatctgctaggtaaacagtaataagaggacctgcatgtactgatccaacatccgatgctcaatcagtaggctctccagtgaaataacccttgaaaactcaaatgattcaaacaagaatatacctttttattctacgcacactgtttgtccttgcaatatccatgacaattggccagtactcatcaccatgttgacgtatttcatctgacaaccagactagatctactttatcaagagccatgccagttgctttccacatctcaatattgtacctgccaacagtccgcatcttatttagattgccactaatctcactgttcatctgggaaaaccagtctgccattaagattttaactttgaaaccagattcaaccattttatt

SEQ ID NO: 23519 - DNA, 3550 bp, Oryza sativa
tgagacaaaacgttcatgcaacattattttctcacaaagaagcttggtggcattgttgtaactaactaaaagagacagaacaaaagttaattgtaaatagcaagctgatggtactatcagaatcaactcttgactacaatttggtggaaccatggaaaggatgttctcaataagttgcaattttgaagcgcacaaaaataataggcagttattattattgtctggtctatggatttcgtttgtgccaaagcataaacatcgacaactgattagtgagcacataaagaacaaaagatgtttttttcctgaaaatttcagtaacgcggaagacttataaatgttttagaatccaaatgataattataagacaccgcatgttttcttatgaaacacactagttcaactttacacactgaatccaaaggatgtacacaagtaaaatcgtggtattcttttggatttgttgtgcaacccaaatggttgtacatttaggcactgctttttttttaaacttcaagttattcctgatgaggttgcagtgcatttaaacaaaaattgcttttaacgacactacagactaaagagtgcatctgcataaagctatccctgttttttcttagcagtgctacagtatggtatatatgaaccatataatcaaagataattatcagtttcaataagtagcatctatgagagctaccaaaaaatgtgctcctatacctgagaaatgtgcatccaggggcatggatcacaccaaacataacaaatgggggcatgtttcttctttagcagtaacttaagctcacgatcgttgacccgatcctccccaatgctcttcagtgctgcaaacctcaggtcaaaactcccctcaacagtatccctgaatgtaaacaactaatttagcatgccaaccttacaaagcttagttcaatattgaagttcagaagcgagcaaggttatccattagagtcgacagcagcaacagctgaattctccatgttgccattactacggtgcttaagttctgttcggagatatagtccagcattggcggagctcctctgtagcaaaataatcaggttgcggttggaaagatgttgcctgctatttcccattttcttttatcatgaataacctaacccatgaaatttaacaagaatcccgaagaacatgagtcggaaattcgaccctacctactggggcatctgttccaacttccaaccaatcaaataggcatagagagagataaatcttaccccgggagctgttcttcggggaacttttgccgttgtgacggcgtgctgccgtggagatgacaaagctgctgctgtggcatctgggagcggcggcgcggcgaggcggaagcctcgacggacatagtcggcgttcgcttccatgttttgcccacgaggccaaacgcccgcgctagcattgcccccacacggacacgggagctccaaatccaggggcgaccggctaatccggtcgcagcctccgcgcctgacttcgtcgacgacgatcggccgccgtcgccaggggttagggttagcggcggcccaagtcttcccccttatattctttttctgtttttctagatataataaaataaaatgataccgtactgttttgtactcctgtatgttgatatggggcatttttagaaaattagcccagggctaattttgggggctaattttgggagctaacgtttagttatgaatttataggctaaacattagcctagagtagtatgtttggatccattggctaattcaaggctaaagggtagagagagtagaaagagagcggagaaagggaaagagagagaactgctttttatggtccccacacaaaattagccccatttagcaccccttggaggggctaatgttttgagggggctaattcactttaaccccaaattagtccacctgtttggatgcttgagggttaattcagggctaaaaggtgagtgctaataattagcccatggaaccaaacatggccatgatgtgttttttcttcaaactcggtactcccgccgtcttaaaataacctatgaccccttacaatgaatctaaacgctcacatctcctactagtttagtttatcctgggacagaaggaatacgtgttttgcaaaaagtttataatatgaaagttgcttttaaaaatcatattaatctattttttaaggttttttcatagctaatacttaattaatcattgttgacaaaaaacacgaggcctgggagatctgcttaactccagtgcaggtccaaagctcgccttcggatgtatgagcgtgccagttgatttgatcctgcaatcaacaagaaacaaagacaaagaaaccgtggttaaatctataaatgatagccgatcggctgattgccgatgacatatcatttatctctgagccgatgtcatatgtgaatcgatcggcgatcacaaataagtaacaaggaactaaatttactcgatcggctgtagatatcaacaatatttaatccttatatcgatatatattcaaatcaagtgactgggatagatcggacgccatgccgagacagtataaatcacttagatcaaaatacatattaacaacaagattatatatgttcatagcgtagccgatcatgtagatctagcatgtatcggctaatactccgataccactctatattaagatattaaagcaagtaagatataccaaacagaagcctaatatactttaaatgcaacaagatcttaatataaaggcagatttaacatgtcaatcaagcgtataaggtaaaagtagttaaatcaggtaagatcggctgaaactccgatactaccctaatcggcaaccagaaggcaggctagagattatggttctaagcacgacttaatagatcaaactcaactgatgcagcattaagtatgaaaagaagaacaatatctagacaatcaagccgctggatgtttcatagagtggtagatatcttatataatctaagccaacgttgctatttaacctaatcagccgccttctactaacagatgttagcgattatagattagataatgatattgtcaaagattatataagatatatgataactcgacgaattacataaacaagattagagtatcatagagatggaagcactaatcccggaaacacaagccgtcataacaagttttacctcttgttgaagattgaaaccgatgcagctcaacccgaaagcaagaactcgtcgaaataaaactaaagcaaaaagggtggtgatgcaccgaaattgtattgaacgtgtgtgttaataattacatagggctcggggtctatttatacccgagaattacaagatatgtccatattggacactactcttatctctaacaaactctaagataccataagtctttgcggcagacttttgcccaagtttatctctaaggaaattacataaaatatcctaattaatagatacaattgccttcccatgactctatccatgcacggcaatcatcttgaagcacaccaactcgaacccgatgtcgtacac

SEQ ID NO: 23520 - DNA, 1191 bp, Oryza sativa
tccaattttttttcacatcattccaattttaatcaaacttccaattttaacaatccttatctttgattctgcttcgactccatcttcatctccgatgctgatattaccaaatttggtcattaacacatgcctcccaagtccgggatatttggtaatgttccggatttgccgtataccgactccgagcaagtttcgcactctgccgttttccaactgctattccagcgctttaaatactaaccgttgtccccaagaaatctcacaccgtgacttccattttcaccgcttaagcaaaactctgccttctctctctccggcgactcctccgacgcacaaggcgatccccaggtgacttcatctacggccagatctccacctgcggcgatgtcgtcctctgccagcccatctgccgcaccatcagccgagtacgctgaggtaagttcctatcggctagatcccctttcttatcatcagatcggttttcccttgccatatattgctctcttcttctcggttactttgaatttgtagcatctttccaatctagttgcaattcccagcctgtcacatgaaaattactactttctcggcccagtcggcaaccctgatcccaccgagttcatcattggtgaaaccaataggattcctttcagattaaccaacccagacctaggtcactggaagaataccttcaaatcctggccgtctctagagaaaacttcacccgagaaaagttggacagcatggttcaagcgcatgtcggctggtaaaagagttcactgggacgaaatcggaatcggccaagcactcgaccttaccatagccaactcagctaaggacgaacccctaatagcagctgcctcttatttctggtccaacaccatcaacgccttcttgttcaaccaagagccgatgaccccaactctcatagatatcatcatgatcacaggcctggatgtcacctcatcggctaaccctatgagcctgaacacgaaaaaccaatacgacttcaagaccaagagcataggcggctggtcaggctatgtagcagcatatatgggccaaggtccggtcacccctcgagaacatgtggcctttttgctaatgtgactagaaaaattcctcttctgtggatcaagctgtggccctacaactaattggcaatttgtagctgaggccttagaaacaaag

SEQ ID NO: 23521 - DNA, 1278 bp, Oryza sativa
atctcatcaaccttaatgatggatcggctgctcaatctccaaggacctcctctaggcagcattgacaacataaagctggcgaaccttcaggagcaaagcatttgacagatggtggggcgaatggaagctgcacttattccatcaatcggcttttatgtatatgacagacctctttccaaatgttgtccctcaagtaagtcttaactcacttgattttcatttgaataactgcctagctgattaatccttggctaactttccttttgacttgcagacaacagaatcctctccccctcgccaaagcaacagtggcaaggatattgagtatgccctaggattgatccctaacggaggtgggccatctccccccgtcatcggctataatgcccccaagacttcagctcttcttcaagagctcatcagagatccagccgatgccggcaagaagaggaaaaccagatcatcggccgtaaatatttcagccccagctccaaataagaaaactaagacaaagaaaaccacaccagctgatgatctgcctgctctagatccatccattgaacaaactctagatgaagaagtaattgaagacgacgttgatgaggccgcagccgaagtaagtgatatagaaagaacaccattggcttcacccaaacagacccctccaactccttctgctccagtacacttttcaagagtaagcagctctctttgatcccttttgtaatcattttaccttatagccgattactcacaaatttagtaattgcagaaaaagaagactgctgtgaagaagaaattgactgcaacaacatccaaaccagctccactagtaagatagtctcaattctttttacaaaatccttaactctgataatagccgatatcaactgacacttgtccttttcagccttctcctcctccttcaccacctgtctagccagaaacaagcaatcgtactccatcggctgcagacagtcataatgttgaagaagaaatacaaccaactgctcctgctatcccggtaagtctctttttattcacgaacttagatcggctacatctatttagctctaactctctttaaaccattattgcaggtcttagccgatcttttctctttcgacattagagactatcttgatgagacagaagaagataccacaagcaaagccttagctcccttatccgatgatatgaagaaaatttttgaagacatctctcatcggctagaggcataattggatagcttggtggccgactgtggttctatccgag

SEQ ID NO: 23522 - DNA, 2867 bp, Oryza sativa
caatacactccaatatgtccaaaaatcatgttttggactttttgttgagctttttgattcctgaagaaaacatcgcaccctcgtgtgccaatattggcattaattgataaaagttcgccgcacgaatcacgaagtgagtttttgccatgaatgcacccaatacactccaatatgtccaaaaatcatgctttggcgttttttgaactttttgattccagtagaaaacattgcaccctcgtgtgccaatattggcattaattgacaaaagttcgccgcgcgaatcacgaagtgagtttttgctacgaacgcacccaatacactccaatatgtccaaaaatcatgctttggtgctttttgaaaattttcattccggtcaaaaacatcgcacccgtgtgggccaaaataagccaatattgacattatttgacaaaagttcgccgagcgaatcacgaagtgagtttttgccacgaacacacccgatacactccaacatgtccaaaaattatgctttggtgctttttgaacattttcattccggtcaaaaacatcgcacccgtgtgggccaaaataagccaatattggcattaattgacaaaagttcgccgcgcgaatcacgaagtgagtttttgccatgaatgcacccaatatactccaatatgtccaaaaatcatgtgccaatattagcattaattggcaaaacttcgccgcgcgaatcacgaagtgaatttttgcaacgaatgcacccaatacactccaatatgtccaaaaatcatgttttggactttttttgagctttttgattcctgaagaaaacatcgcaccctcgtgtgccaatattggcattaattgataaaagttcgccgcacgaatcacgaagtgagtttttgccatgaatgcacccaatacactccaatatgtccaaaaatcatgctttggcgttttttgaactttttgattccagtagaaaacattgcaccctcgtgtgccaatattggcattaattgacaaaagttcgccgcgcgaatcacgaagtgagtttttgctacgaacgcacccaatacactccaatatgtccaaaaatcatgctttggtgctttttgaaaattttcattccggtcaaaaacatcgcacccgtgtgggccaaaataagccaatattggcattaattgacaaaagttcgccgcgcgaatcacgaagtgagtttttgccaggaatgcacccaatacactccaatatgtccaaaaatcatgttttggacttttttgaactttttgattcctgatgaaaacatcgcaccctcgtgtgccaatattggcactaactgacaaaagttcgccgcgcgaatacactccaatatgtccaaaaatcatgttttgtcgttttttgaactttttgattccggtcaaaaacagcgcacccttgtgagccgatattggcattaattgacaaaagttcgccgcgcgaatctcgaagtgagtttttgccacgaacacacccaatacactccaatatgtccaaaaatcatgttttcgcgttttttgaactttttgatttcagtagaaaacatggcacccttgtgagccaatattggcattagttgacaaatgttcgccgcacgaatcacggagtgagtttttgccacgaacacacctaatacactccaatatgtccaaaaatcatgttttcgcgttttttgaactttttgattccggtcaaaaatatcacaccctcgtgtgccaacattggcattaattgacaaaagttcgccgcgcgaatcacgaaagtgagtttttgacacgaacgcacccaatacactccaatctgtccaaaaatcatgctttggtgctttttgaacattttcattccgatcaaaaacatcgcccccgtgtgggccaaaataagccaatattgacattatttgacaaaagttcgccgagcgaatcacgaagtgagtttttgccacgaacacacccgatacaatccaacatgtccaaaaatcatgttttggcgttttttgaactttttgattccggtcaaaaacaactctccttcgtgtgccaaaatatgccaatatttgcattaactgacaaaagttcaccgcgcgaatcacgaagtgagtttttgccacgaacgcacccaatacactccaatatgtccaaaaatgatgttttggcgtttaatgaactttttgattccagtagaaaacttcgcaccctcgtgtgccaatattggcattaattgacaaaagttcgccgcgcgaatcacgaagtgagtttttgccatgaatgcacccaatacactccaatatgtccaaaaatcatgttttggcgttttttgaacttttagatttcagtagaaaacattgcaccctcgtgtgccaatattggcattaattgacaaaagttcgccgcgcgaatcacgaagtgagtttttgctacgaacgcacccaatacactccaatatgtccaaaaatcatgctttggtgctttttgaacattttcattccggtcaaaaacatcgcacccgtgtgggccaaaataagccaatattgacattatttgacaaaagttcgccgagcgaatcacgaagtgagtttttgccacgaacacacccgatacactccaatatgtgcaaaaatcatgttttggtgctttttgaacattttcattccggtcaaaaacatcgcacccgtgtggaccaaaataagccaatattggcattaattgacaaaagtttgccgcgcgaatcacgaagtgagtttttgccatgaatgcacccaatatactccaatatgtccaaaactcatctgccaatattagcattaattggcaaaacttcgccgcgcgaatcacgaagtgaatttttgc

SEQ ID NO: 23523 - DNA, 11772 bp, Oryza sativa
ctgaaaagatcaatgcaatggcacaatatggctaggtaaatgatacgaatttttttgtatggctattttctggttacaggaagataaaaactcaccgagcaacgaaagctctgataccacctgatgaaccctgagttcctctcgacactcaaggctattgttggcccgatctttcggtgagttgtgataactacgatttgggagaaacgttgacgatccgactacaaccgtacgagacgttgtgttgcgccttagcgatcgatacacctctccgtgggttgctgatcttgccggtgcagatcaaccctattcctgcaagcaaatcgaagaaacaagcaagaacaagataaaagcaatctgatattgcaaataggaatttaatacaaatgataagttggggtttcgaatacaagcagacggacggtctagccgacacgcgcgctgcaagcgaagtagcaatggctaaactttcatctaaacaaaacccaagaaaccctgaaggggtaactagctatatataggggtgggaggacgacctaggggtgcctagggtcgtgctccaccagcttggggcgcaccccacatgggccccacctgggccggggtcccaaatgaagttacaagcccataggcccattacaggtgttgcagcaccttgtttcttcagttgctgccgactgagatggaatttggcaatgaggcttgatgcattggaaagaggactccgagagctttccatcaagtactcacgggctgaaaacggaggtcgtatggagcttcggcggccgtttgaagtcagcagtgtagcaggtggccgaattgaattttggcacttggaggactcgaacttgatatcttgttgttcatccatgatgtgagcaacggatgtatccgtagtagccatggtcacatcatcctccccttcttcacggaaaaccgtcctcggtttttccatatggtgttcttcatatagtccattcaaaataacctgtttcatccaatcaaaactagagaaacttgaaatagtgtgattagcaataacatgtttctctaaatccgaacaaatgaaaactctatgcaccaaatatattcctctatcattatatttgccaaagatatgaaaaatagcattagttagacatggcaaatcagacttagcaaataatttctccttcatattatcgagctcaccaaaatcatcaaactgaacatagcccaaagtatttaaagaagatagcaatttacgttcctcaacttcattaacaatatgaacagcatgcttaaaatcagcacacaaagaaacactaggaatagcatgttcattcactagttgtggcatggatataagtgaagcattatcgcacaactcttctttatcacaaggaacagcgagtaaatcaacttgtgacaaaggaattccagcatttggttccactaacggttgctctacttttgcatgaaaagtggacaaatttacttcgttaacaatgcaatcaccttgattaatttagtaccttttactttaccttggatgtcctcttttgatgatggaggtgtctcgaacttgagtgtgaacaatggaattggtggctctttcatgtctctctcctccttttcgtgattacgcacttcctgcaaatagttagtaattggaggcaaagacatagcgtgtttccttttcatatcctcctctattttactttcagcattgcaagcaagttgtaacaaatgagaaagagatgtatatctttgacaatcaagcatgtcctgaatttctttgttaagcccacataaaaacctcaattctttagctttttcgcattcatctaaaccacaacgtaataaacaagcttgcatatcatgatagtatgaagtaacagttctggtatcttgttttaaacattgcattttgttgaacaaaatgtcagcataatacatgggaacataaacatctctgaaatatcgtttcaggtctttccaagattgtggtattttgttatacctacaaagatgtttccaatcattagaagcatgtttaattaaaacactagaggcacacataaccttttgtttctccgacaagacatgcttttgaaattcactatcaaccgctagctcccaattaatgtaagcacgaggatcatagtttcccacgaaataaggcagtgcagatttgatcttacctagaacatcatcacttacctcataatggtcatgttgatccctcctcatgtctcgacgaagatgtcgatgttgagcacagctatccccaattatcttgcgtatccctgccattgttagtagaaaacaagaaacatacgcaaaaatatgcgcgttcctattaactagtggtagtggcagctcaaaaatcgcacacactcaagcttttaaccaagctcttacaagatcttaccaatgcaagtggaatggtgacatacaccgactcaaccaagcaccccaatgaaggttggatgtatcgatgccttggcaaacacttgcggtacggctgtaatcaaatatgtggagctctgggtaggcttaaatatgtagcaaaggaatagcaaatgctcaaatcagataatgcaaagttgaataattgttcaaagtcaagtaccgtgctggtcctaggctagaacgtactagagacgcgagcctagacacaaacgataccacaagatagcactaggaacaactcatgcacaactctgatatatgaagttcagctcaaacataacagtattttctcttttctttctttcttctttcttcttttctttttttttctttccttttcttttctgttttttttggtgcggctttttttttctcttttttttttttgcacctttctgcctttttttctcacttttttcttgattttttttaacaaaaactgactcaaggaccttaatgtaagattacagggactcaaacataaatataaaatttacagggactcaaatgtaaaagtctaaacccaaaattaaaattatacaaaaaatggaatgctgaattcatgccggttccgtttttccaaacagatctcgaaaccgacaccaaacaaaaattcgccaaggtgtttgacacaactcggaaccgtggaagagagggagggagtcggactcggccaaaggggccagtgggactcggcaaggaggtggagtggatggcagccgaatttggtgtatgggataaaaaggaaactgatttttaaccaatccaatctactatatctttccaaaacaaacttgactacttccaaaatcagatatggtaattcaccttcctcctctcgtgcacgacacaggcacggccaaaacaaacacacacaaggatcggcaaactctagatgcaactcaagaactccaaaactaaccgatagaaacttctgaaaactacaaaaatagaaccgtggcagcgagccgattccgttttcgtaggtcccgacaacaacagagacacggtggcagcgacgactgtggtacaaaacgtgaccagaactcgaaactctaaacgaactagacgctaagaccagcaacacgacgtgacgatgcaacacaaaattcaacaaagcaaaaactgaaaagaacaatgcaatggcacaatatggctaggtaaatgatacgaatttttttgtatggctattttctggttataggaagataaaaactcaccgagcaacgaaagctctgataccacctgataaaccctgagttcctctcgacactcaaggctgttgttggcccgatctttcggtgagttgtgataactacgatttgggagaaacgttgacgatccgactacaaccgtacgagacgttgtgttgtgccttagcgatcgatacacctctccgtaggttgttgatcttgccggtgcagatcaaccctattcctgcaagcaaatcgaagaaacaagcaagaccaagaataaagcaatctgatattgcaaataggaatttaatacaaatgataagttggggttccgaagaacaagcagacggacggtctagccgacacgcgcgctgcaagcaagtagcaatggctaaactttaatctaacaaaaacccgagaaaccctgaaggggtaactagctatatataggggtgggaggacgacctaggggtgcctagggtcgtgctccaccagcttggggcgcaccccacatgggccccacctgggccggggtcccaaatgaagttacaagcccataggcccattataggtgatgcaacaccttgttcctgtgattctggccacacgagatagaattcagagaagaggctggatccgttagaaagagggctccgagagctttccatcaagtactcacgggccgaaaacggaggtcgtatgcatattcggtggccgtttgaagtcagcagtgtagtaggtggccgaatcggattccagcacttggagtacttgatctcgatatcttcttgttcatccatgatgtgagcaatggttgcatccgtggtagccatggtcacatcaaatatgtccaaaaatcatgttttggctctttttgaactttttgattccagtagaaaacatcgcacgctcgtgtgccaatattggcattaattgacaaaagttcgccgcgcgaatcacgaagtgagtttttgccacgaatgcacccaatacactccaatatgtccaaaaatcatgttttggctctttttgaactttttgattccagtacaaaacatcgcaccctcatgtgccaatattggcattaattgacaaaagttcgccgcgcgaatcacgaagtgagtttttgccacgaacgcacccaatacactccaatatgtccaaaaatcatgctttggtgctttttgaacattttcattccggtcaaaaacatcgcacccatgtgggccaatatatgccaatattgacattatttgacaaaagttagccacgcgaatcacgaaatgtgtttttgccacgaacacacccgatacactccaatatgtccaaaaatcatgttttggtgttttttgaactttttgattccagtagaaaacatcgcaccctggtgtgccaatattggcattaattgacaaaagatcgccgcgcgaatcacgaattgagtatttgccacgaacgcacccaatacactccaataagtccaaaaatcatgctttggtgctttttgaacattttcattctggtcaaaaacatcgcacccgtgtgggctaatatatgccaatattgacattatttgacaaaagttagccacgcgaatcacgaaatgtgtttttgccacgaacacacccaatacacaccaataagtccaaaaatcatgttttggctctttttgaactttttgattccagtagaaaacatcgcaccctcgtgtgccaatattggcattaattaacaatagatcgccgcgcgaatcacgaagtgagtttttgccacgaacgcacccaatacactccaatatgtccaaaaatcatgctttggagctttttgaacattttcattccggtgaaaaacatcgcaaccgagtgggccaatatatgccaatattgacattatttgacaaaagttagccacgcgaatcatgaaatgtgtttttgccacgaatacacccgatacactccaatatgtccaaaagtcatgttttggctctttctgaactttttgattccagtagaaaacatcgcaccctcgtgtgtcaatattggcattaattgacaaaagttcgccgcgcgaatcacaaagtgagtttttgccacgaacgcacccaatacactgcaatatgttcaaaaataatgctttggtgctttttgaacattttcattccggtcaaaaacatcgcaaccgtgtgggccaatatatgccaatattggcattaattgacaaaagttcgccgcgcgaatcacgaagtgagtttttgccatgaatgcacccaatacactccaatatgtccaaaaatcatgttttggcgttttttgaactttttgattccagtagaaaacatcacaggccatctacaaacaaaaacaaaagagaaaagcaacattttaaaggtcagattttgacgataaatgaagcagcaggacagagagagactagaggattttcacaaataagaaaggatttttatttcgaaaatattgctaaggcttgggatctaaggctcgtcctagggtcaagggggctctgataccaacttgtcacgaccggaaataacccaacgggcgttccttacgtgcgtgcattattccttgtcccaggagacaagcggaagcgtaattaattaatttattacatgggcggcgaagacccagcacacaagaagacaaacaaaaaatagcggaagactagggcgatgaccacaggcgcttgacggcaggcacgagctagacaccaaagccttcatcatccaggggctcctcttctgggtttgggaaaaattgagcaagactgagtacaaccaccgtactcaacaagacacacccacaagtgcagaataaatgcaagggagtacaagggagccataatataggggggttagggtttgcagtaaacagcattaaaagacacttagttgctcaaagctattttgtaaacaccgtcctagagctatacaatattattaacaaaggctgtgaacccacacgaacctgccttaacccaaggcctacgatgattcagaccgaactggcaacccgaccctaggtgccagctcgtcccaagccaacctaggccaaccattccacattttagttgttaagcaggttttaagaattaaaacactaaattgggtacattgctcggcttgcccataaccgagggcgcggctattcgaatagattatactctgatcagaggtgtacatctttacccacaagacacattttcctcacgtgtaaccacgtgccacataccaccacggtatacggacggaagacttgacatagtttccaacccatcctagccataaacaagagtaccgacccaaccccacctacggccggaacccccaggacaggtaggcaggactgagcccctagcagcaggacaccggccctgtgccatgacatctcgactaccgggccgcagctcgtgtagccttcatttgccctagagatgtccatcgacccccgacttcgtccatctccatccgtgtacttttgtttataaccagactaagccacaaactaagccttacccactaggcatgtggaagtacggtagtgctttgcaacagaggcccgaagaccggtccatatatggccgaggtgctactgtcaaaaccatgcaccccgagcccagcctaaaaccattttgagggttttgaatagagggggaggtgtgaatccaattccacaataatccaaccattccatagtgtccaggtgataagagtattcccaaagtctagagttgtaaaaccacctaatgttgcctaattaaccagcgaagcatctacctaaaatcatactagtggtaccatgagtgtccactagttggggttttgtttcttctagggtgaacaaggaaataataacaataacaataataaggtcataacaaaggtaaataggcatggctagataaaacagtgataacgcgggaatttaaataaagcgataatgcaataatttaaatcaaaataattttataaactgggattcaatatgttcaaggatgatgtgacttgccttgctcactttcgcaaacgtcggcttcaacctccacgaagagcggatcttccgaatctgcaacgtctacacgaccaacggaaaataaaagggcttttactctaataaactccatataacaagcaggaacgaagcacaaaaatgggttcttgacttcttaaggaaaaaaagagacttgaacggtccaattccgagttcaaatggccaagttatggccatttgaagtttatatgctctttaaatgaatatttgcggatttcttcatttaaattttaatttaaaaagggtttattgcgtcagccgaggggagggggcgcgaggaccgggtccacgggagtggggcccacgcggcagcctcacggtccacggtggaccgggcgcacccgggctcgcaccggccggcgccgtgggccccacgcgtcagccgcacctgagggcgcgggcggctgacggccgggccccacgcggcggccactcggcgcgcccgaaggcggccactcggcgcggccggcaggaggcggcgcccgcgcccctatggtcgccggcggcggccataggcacggcggagcggcggccgagagaggggaagggaagggggaaaagaggcggcggtccacggctcaccctaggtcgacggcgacgacgaaaaaggcggccggagcggaggaaggcggcggcgcggctctggtcgacggggtcgacggcgttcctgcggtcggcggactcggtgagggggtggacggggtcgacggcggtgcagcgaagccggaggaggcgacgccggggcgggagacggtcccggcgagcggagaaggccggccggaggtcgtcggcgacggaggagtgatgaaccctgagttcctctcgacactcaaggctgttgttggcccgatctttcggtgagttgtgataactacgatttgggagaaacgttgacgatccgactacaaccgtacgagacgttgtgttgcgccttagcgatcgatacacctctccgtgggttgctgatcttgccggtgcagatcaaccctattcctgcaagcaaatcgaagaaacaagcaagaacaagataaaagcaatctgaattgcaaataggagttaaatacgaatgataagttggggttccgaagaacaagcagacggacggtctagccgacacgcgcgctgcaagcaagtagcaatggctaaactttaatctaacaaaaccccgagaaaccctgaaggggtaactagctatgtataggggtgggaggacgacctaggggtgcatagggtcgtgctccaccagcttggggcgcaccccacatgggccccacctgggccggggtcccaaatgaagttacaagcccataggcccattataggtgatgcaacaccttgttcctgtgattctggccacacgagatagaattcagagaagaggctggatccgttagaaagagggctccgagagctttccatcaagtactcacgggccgaaaacggaggtcgtatgcagattcggtggccgtttgaagacagcagtgtagtaggtggccgaatcggattccagcacttggagtacttgatctcgatatcttcttgttcatccatgatgtgagcaatggttgcatccgtggtagccatggtcacatcaataacctattcgaatagccgcaccctcggttatgggcaagcctagcaatgtacccaagttagtattttaattcttaaaacctgtcaacaactaaaatgtggaatggttggcctgggttggcttgggacgagctgggacccagggtcgggttgccagttcggtctgaatcatcgtaggccttgggttaaggcaggttcgtgtgggttcacggccttgtttaataatattgtatagctctaggagcatgtttttaaaagtagctttgagcaactaactgtcatttaatgctgtttactgcaaaccctaaccccctatattattactcccttgtactcctttgcatttattctgcactcgtggatgtgtcttgttgagtatggtggttgtacttagtcttgctcaatttttcccaaacccagaagaggagttgctggatgatgaaggctttggtgtctagctcgtgcctgccgtcaagcgcctgtggtcgtcgccctagtcttccgccgtttttcgtttgtcttcatgtgtgctgggccttcgccgcccatgtaataaattaactatttacgcttccgcttgttaaactctgtattgtatcaacttttggtgtaccttgccacctgggacaaggaataatacacgcacgtaaggaacgcccgttgggttatttccggtcgtgactcatcacattctaactcaaaagtcttaccaaagtttggaagttgtagcaatggtgcgtgtgtaagcttgtccttcaaagtgtcaaacgacttctcctgtgtcttttcccaatggaagaccacccctttcttcatcaactcattcaatggtgcagcaaaggtactgaaatctttgacgaaacggcgatagaatcctgcaagaccaagaaaactcctcacctgtgtgatggattagggaaccggccaactctttatggcttcaattttcgactcatccacctcaattccctgtggagtaacaacatatccaagaaaagaatctcgttccgtgcaaaagatgcacttttcaatgttagcaaacaaacgtgcatcgcgtagagcattaaaaacagcacgtaaatgatccatgtgttcatccaaagacttgctgtaaatcaatatgtcgtcaaagtaaactaccacaaatcgtccaataaaaggccttaaaacctcattcattaagcgcatgaaagtactaggtgcattagtcaaaccaaaagtcattactaaccactcatacaaaccaaatttagttttaaaagatgttttccattcatctccaagtttcattctaatttggtggtagccactacgcaagtcaatctttgtgaaaattatagaaccacacaattcatcaagcatgtcgtctaacctaggaataggatgacgatatcggatagtaatattattaatggctctacaatcaacacacattcgtcaagaactatctttcttaggaaccaaaattacaagaactacacaaggactaaggctttaacatacatacccgcggtccaaaagatcttgaacttgccgctgaatttccttagtctcctctgggttggttcgataagcagcacggtttggcaatgatgctcctggaatcaaatcaatttgatgctatatccctctcataggtggcaatcccgggggtatctcagctggaaagacatcctcatactcctgcaaaaggttagtaacaacacgaggtatcgaactagcaatatcatctagagaaactaaggcttgtttgcatatcaagaaatagcaaatatcatcatctgaaatttcagcaatgtcacattttgttgcaagcataacaccacccttcaacttaattccctcaaccttagaactaggtgaaagcttatcctttttaggtaggaaaatagatttagccacttgctgattttcagattcatcaagtttcaaactagcagctcgctctttatcagcttctacaatttcagcaggggtcaaaggtagcaaagtaattttctttccattatgcactaaagtgtagcatcattatcatgttcccaagcatgaccttgaaaaagtgaacaagcttgcataggaaccacatcacaatcaacagaatctgcatatgagccaatggaaaacgaaaccctacaaacctgtgttacctttgctcttccaaaatcgtttaaccactgaatatggtaaggatgtggatgtgtacgtgtggtcaagccaagcttcttgaccaaatcagaactcaccaaattgttgcagctacctccatcaatgatcacacgtgcacgacagttattgatgacgaagaaaatctgaaacaaattatggcgttgcaacctctcaggctgctgtacctgcatgctgagcacccgctgcacaacgatggtcctgtagtcagttgtgtcatcacgaccaaagacttctccatcctcatcctcaacttcttcttcctcctcttcctcttc

SEQ ID NO: 23524 - DNA, 858 bp, Oryza sativa
tcaagtttgttttggaaagatatagtagattggattggttaaaaatcagtttcctttttatcccatacaccaaattcggctgccatccactccacctcctggccgagtcccactcgcccctttggccgagtccgactccctccctctcttccaccgttccgagttgtgtcaaacaccttggcgaatttttgtttggtgtcggtttcgagatctgtttggaaaaacggaaccggcataaattcagcattccattttttttataattttaattttgggtttagacttttacatttgagtccctataaattttatatttatgtttgagtccctgtaatcttacattaaggtccttgagtcagtttttgttaaaaaaataagaaaaaaaagtgagaaaaaaaaaggcagaaaggtgcaaaaaaaaagaaaaaaaaaagccgcaccaaaaaaattcagaaaagaaaaggaaaaaaaaaagaaaagaagaaagaagaaagaaagaaaagagaaaatattgttttgtttgagctgaacttcatacatcagagtgtgcttgagttgtttctggtgctattttgtggtaccgtttgtgtctaggctcgcgtctctagtacgttctagcctaggaccagcacggtacttgactttgaacaattattcaactttgcgttctctgatttgagcatttgctattcctttgctacatatttaagcctacccagagctccacagatttgattgcagccgtacagcaagtgtttgccgaggcatcgatatatccaacctctattggggtgcttggttgagtcggtgtacatcaccattccacttgcattggtaagatcttgtaagagcttggtt

SEQ ID NO: 23525 - DNA, 20216 bp, Oryza sativa
tattgttggcccgatctttcggtgagttgtaggtaactacgatttgggagaaacgttggcgatccgactacaaccgtacaagacgttgtgttgcgccttagcgtctagttcgtttagtgtttcgtgttctggtcacgttttataccagagtcattgccgcctccgtgtctctgttatcgtcgggacctacgaaaacggaatcggcttgctgccatggttctatttttgtagttttcaaaagtttttatcggtcggttttggtgttgcatcaagggtttgttgtttacccaggcttagtgcttgtgccgtggttctgttttgcccgtgaggaagaagaaggggaaaggaatatagaagatctgtttggattcggttgggtggaaggaaagaaaaaaaaaggaaagaacagaataggaaagaaaaagaagattagatcgggtggaaatccgtttccttttattttgtgcactgaatccaaacactagtgctggccgcaatattcagctccacctctccgtggtgacttccttcctccgagtccgactcctccctctcttctgtcggtttagatccataccgtgtcttcccgcatagcttggtgaaaattttcagagtgtccgattggagatccgtttgaaaaacggaaccagtataaattcagcattccatttttgtataattttaatttttgggtttgcacttttgcatttgagtccctgtaatttgtatatttacagttgagtccttgtaatcttgcattaaggtccttgagttggttcttgctgaaaaaaaatttaaaaaaaagaaaaaaaaggcagaaaggtgctaaaaagaaagaaaacaaaagccgcaccaaaaaaagaaaagaaaaagaaaagaaaagcaggaaagacaaaaaaaagagagagaaaaaaagaagaaaaggagaaaatcattttgttatcattgagctgaacttcatatatcagagttgtgcatgagttgctcctagtgctatcttgtggtatcatttgtgtgtaggctcacgtctctagtacgttctagcctaggaccagcacggtacttgactttgaacaattattcaactttgcattatctgatttgagcatttgctattcctttgctacatatttaagcctacctagagctccacagatttgattgcagccgtacagcaagtgtttgccaaggcatcgatacatccaacctccattggggtgcttggttgagtcggtgtatgtcaccattccgcttgcattggtaagatcttgtaagagcttggttaaaagcttgagtgtgtgtgatttttgagctgccactacctactagttaataggaacgcgcatatttttgtgtatgtttcttgtttgctactaaccatggcaggattgcgcacggggaaatgagatggtcatgctcaacgtcaacatcttcaccatcaacgagatatagcgacttcttcacgcatcacatatgaggtacctgataatgatcttgcaagggtagaatctaaattgccagtttttgatggtaagtatgattctgccgcttatgttaattgggagctagcagtagaaaaacaatttgatgagtatgatttttctaatgctcaaatgattaaggctgttagtaataagtgtatcggttctgcatctttttggtggcatactgtgggaaataagcttgaaacttgggatgaatgcaaaatactgatgagaaaaagatttgtgttttcatactatagacgtgctctctttgagaaatttgaacatataaaacaaggtgacaaaactgttagggagtactttcatgattttaaaatttgtatcacttatagtggtttacaagaatctaatgagaacacaatgactagatttttcagagggcttaattccaatattcaggttgggcttgttaatgtgacatataatcatataggccaattgttcatgcttgcttgcaatattgagcgcaaaattttggagaacccaatggagcaacaagctatgcttgtgcctcctatcgctgatattttgcaggaagttcagaacagtccccaaaatgagaagaacgatatgtttgagatgtcacttccatcactcgcgaatgaggagaaggctgatgcacctacattatctgaagagggcataaaaggtaaattaaatggtgcagaaattactcaagatgagtatgcttctgatgaatttcatttttccacttgtcatgctagagaagagcaactattagtggaaccaattgctgagatgcctttgtcacaagttgatttacttgctgttccttgtgatagagaagagttgtgtgataatgcttcacttatatccatgccacaactagtgaatgaacatgctatttctagtgttttattgtgtgctgattttaagcatgttgttcacattgctaatgatattgaggaacgtaaattgataacttctttcaatactttgggctatgttcagtttgataatttttgtgagctcaataatttggaggagaatttatttgctaagtctgatttgccatgtccaactaatgttatttttcatatctttggcgaatataatgatagaggaatatatttggtgcatagcgttttcatttgttcgcatttacagaaacatgtttttgctaatcacactacttcgagtttgtctagttttgattggatgaaacaggttatttttgaatggactatatgaagagcaccatatggaaaaaacgaggacgattttccgtgaagaaggggaggatgatgtgaccatagttactatggatacaaacattgctcatatcatggatgaacaagaagacatcaaggtcaaggcctccaaatgctggaatccgattcggccacctgctgcactgctaatttcaaacggccaccaaatctccatacgagctccgttttcggcccgtgagtacttgatggaaagctctcggagtcctctttccaacggatccagcctcattgcgaaattccatcttattgagccgcaattgaagcaacaaggtgttgtgtcacctgtcatgggcctttgggcttgtaacttcgtttgggaccccggcccaagtggggcccatgtggggtgcgccccaatctggtggagcacgacccttgtcgagtaactcttgcacttgtgatgcagcaacgggggttcccgatctttcgatgagaggaggataaacttcgatttggcgaaggatacgacgttggcggtccgactacaactaccacaggggtgttgcgccttagcaaccggtacaccgactccacgttgttgctgttcttgccgtgccaagaacaaccttgaacctgcaagcaatcgaagaacaagcaagaacaagttgacaaggaaacagctcacggcacttgtcaaatgatgaaacttaaacaaaccaaaatggggttctgaatacaagtatccgggtggtctagccgacacacgcgagtacaaggaagtagctgcagctaaacttacatcaaaacaaaacccaaagtgcaaaatggtggctgctaggagtttatataggtggaggaatgaccaggagaggaggtgggagcaaaccctaggttttgtggacctctaatgggctgtaatgatactaggcccaagcccaagtttctgatgtaaagaactattttcgttattctgagcagcctgggtcaaacttgatggtgaggccacacatagctgaaagtagacgacgagatctttccaacaagtactcatttgccccatttgccctccggagtgaagagcattgacttcatcaaatcagcgctgctagtgctgctggcgatttggttcctctcccatattcctaacaacaagtagatcacaacaaccatttagtagcacccaattctgagaagaacttgtatgattagctaggaatgactttacctgataattaagttcacgagcttgagctctagtcattggtccttgctgtgcaataggcgtggttgtatcgttggaagggatgtcctcatcaacttgacgctgattctcctttgtttcctccgggttggtcctgtatggcgcacggtttggcagagaggccccaggaatgaggtcaatttggtgctcaatccctcgaattggtggcagccccggtggaacctcctttgggaaaatatcagcatactcctgcaaaaggttagtgaccggaggaggcaaagaaataggagtatcctcaattggaaataaggtttctttgcaaaccaaagcatagcaaacaacagtgtcagtgtcaacttcatccaaatctgattttgttgcaatgaaacaagatcccttcagcttaatctcatttttattattttgaacagagttggtgggtttcttcttatgcttctcaagttcattagccgcaataagatgctcactcctagtatgctcctgatttttttgtttgctagctctagcaagttcatcctttaaaataacttcaggagacataggatgtaacacaagtttttttccattatgcacaaaggagtattgattggatttgccaaagtgtaaagaatctttatcaaactgccatggcctacctaataacatagaacatgcttgcataggcacaacatcacagttgattgaatcatgataagaaccaatggcaaaatgtactcttaccaatcgtgttacctttaccttgccactgctattaagccattgaatatagtagggctgcggatgtggctgtgtgctcaatgaaagtttctccaccatttcagcactagccaaattattgcagcttcctccatctatgatcacgcggcaagagcgttccttgatcacacacttggtttgaaacaaggtgtggcgctgattctgttcagccctttccatttgtgcgcttagcactcgctgcaccacgaggctctcatagtgctctgcagcttcagccctaatatgttcctcatcttggtggggcgcgtcaccttcccctgcattgttagttgcaagcaaagcataggtttcttcatctaaatcactagcggaggagtacccaccatcagctctcacgatcattacacgagtgcttgggcagtccttgcgcacgtgaccatagcccttgcagcgtaggcactgaatatctcttgtccttcctgatgaagctactgatgatgagctcttggaaggtgtagcagcaacccctcttgttggttcactcgggcatggtgtagagtttgttgtagagggacgcagcttgttgcttgaggacgatggtgctgctgctcgagttgacggtgcagcagcgttgggagatgtccaagagctagcacaacctgcagaaatgttagtcctgaagctagctcttcgtccctgtacttccctttcagctttacaagcaagatgaaacaaacgattaattgaattatattctttgtaggctagaatgtcctgaatttctcggttcagcccacccatgaatctagccataccagcatcatcattttctaccaatccacaacgaagcattcctgtttgcaaagcttgataatactcctctacagatttgtttccctgtctaagttgttgcaatttgtgtagcaaatcacgtgcatgatatgaaggaacaaatctagctcgcatgactcttttcattgcatcccaggtttggggagtgttatttggattggaacgaacaaattcactccaccaaatggatgcaaaatcagtgaactcactagtagcagccctaacacgtttattctcaggaaaattatggcaagcaaatttctgatcaatggctaactcccaagtaagatatgcatcagggtcatattttccatcaaagcaaggaatggtaaacttgatcttgcctaaagaatcatcattatcacgtacctcccgccgtggtggagcgcccatgccatggcgctgccggtgctgttgtctttgtggacgaccaagtacctcctcattatgctcagtgtcagcagcgtactccagttcttcccttgctgcgatgctgctattagcatcatggccatgtggttgcgcctagccgatccatcatgaccatcttggcccattctctctaacgtattcaagatacctgcaagagaagtgttcacagccacaagggacatctccaatgaggaaagcttggagttggtgtcaatttgagcagcctccaattgaccaaggcgatcattggcgaccctaacatcctcatcaaggccttcagcatgctccctcacttggcgctcaaaatgttgtatgatgcccctcgtacgtggtgaatgttgagggtgctcccccgatcctcctgtcatggttaatgggaagaaacaattcacaagaaatatgtcctatcaactattggagctaggtgttgtccatctccacttctaccaaacttgtgcaaacgagttcttacatgttcttactttgttatgtaaaaggcgttggcaaacagcaagaacagcaacaacggttagtagtaccggagccgacaacagcacgatcctgtgatatagtagataaaaatttgtggagctataggtggctgcaagtaatatcaaggtacagctagaaccacattaatcaaagcaagttgaataatcattcaacgatggtattgtgctggtcctaggcaaaaccctttagagacgcgagcctagtcacaagcgtagccactcaaaatagcacgaaaataacacaaacaaaacagcaacaacaacaacttcctctcttcccttccttttttttttcttctcttcacttctgattttttttctttcttttttttttgttttctttcttttttttttgtacagcaagctcaaagcttcagccaacaagtcaaaacaagccttagcaaaataaccttttctcaaacattttcgaaatttcacaagcttcagccaacaaatcaaaacaagaagtaatgatgggttggttggctagttacatgattcagccaacaagtcaaaagtgagagcacttaaatgctttcttgggaagggctgattcacttcaaaaagttgcaaaagggttggctgttggtggaggcagcaataaatgcatttgggggtggctgatgtggtgatgagggtgctgctggttgtggtggacgaaatttggtggggttggaggtggatttcgtggtgaatatggtggtgatggtggcagcgggatgaagataaatgaagtgatggtggaagtgtttgcggtgacgaaatcgtgagcagaactcgaaactctaaaggactaaactactagaaccagcaactcaaccaatcgatgcaatcgaaaactcagcaagcaaagactaagtagaacagcaaaggctcaacatgttttggtgatttcgggtctgacctattttagtggtttttcttttgggctgtaggtaaaaacaaagaagtgataaaatctctcaccgagcaacttgagctctcataccacttgatgcagcaacgggggttcccgatctttcgatgagaggaggataaacttcgatttggggaaggatacgacattggcggtccgactacaactaccacaggggtgctgcgccttagcaaccggtacaccgactccacgttgttgctgttcttgccgtgccaagaacaaccttgaacctgcaagcaatcgaagaacaagcaagaacaagttgacaaggaaacagctcacggcacttgtcaaatgatgaaacttaaacaaaccaaaatggggttctgaatacaagtatccaggtggtctagccgacacacgcgagtacaaggaagtagctgcagctaaacttacatcaaaacaaaacccaaagtgcaaaatggtggctgctaggagtttatataggtggaggaatgaccaggagaggtggtgggagcaaaccctaggttttgtggacccctaatgggctgtaatgatacaaggcccaagcccaagtttctgatgtaaagaactattttcgtcattctgagcagcctgggtcaaacatgatggtgaggccacacatagctgaaagtagacgacgagatctttccaacaagtactcatttgccccgtttgccctccggagtgaagagcattaatttcatcaaatcagcgctgctagtgctgcttgcgatttggttcctctcccatatttctagcaacaagtagatcacaacaaccatttagtagcacccaattctgagaagaacttgtatgattagctaggaatgactttacctgataattaagttcacgagctcgagctctagtcattggtccttgctgtgcaataggcgtggttgtatcgttggaagggatgtcctcatcattatggtcattctcccacccctataagtagctagataccccttcagggttgctggggttttgataaattgtaagtttagccattgctacttcgcttgcagcgtgcgtgtcggctagaccgtccatctgcttgttcagaaccccactttatcgtgtatcaattcatctttgtgcgtcttgtctatctagcaattcagttgctttttatcttgttcttgcttgttctcgattgcctgcaggaatagggtcatctgcatcgacaagatcaacaacccacggagaggtgtatcgatcgctaaggcgcaacagaacgtcttgtacggttgtagtcggatcgtcaacgtttctcccaaatcgtagttatcacaactcactgaaagatcgggccaacaacagccttgagtgtcgagaggaactcagggttcatcacgttgcctcaaagaaagagacagccgaccattggcctggccggttaggccgaaccagggtgttcggccgaacccctggtgggcccaaccggccccactttcagccgttggattccaacggtcagtgtggtcgtggcacaataaattttcattgaaaattttattttggtttgctctggaaaattcatttgaagaatttcctaaaaattcaaaaagcctaaatgcattttgaaattcaaatatgtggtgatacaaaaatttaaattgttgaaagcaaatatgcggatacatacctcctttcggtttagtgcactgatttttcacccgtctccggaggtgatggagcgggcatctttagcttttccttccacaccttttttgattttggtgcggatggcggcttcttctgagccggctgatctgacttcttggccggtacgggtgattttaccggcgttttccaataacggttcctgggcatcgttgtttccttctccaggaaattctgcataaatatcaccaagctgtccgttttgggtggctccacttcgaccacttgaatattctacggattcggcccgtactttattctgaccatggagcattgttccgtccttggttgaaactcaaacttttcctccttcccgttgatatggaaacggatactccccgttcccacgtcaatgttggctcctgcggtactaaggaatggacgccctaggatgagcggcatctccttccccatgtccatgtctagcaccacaaaatcaaccgggatgaagaaatcccgtatcttgactggcacattctccgctattcctgctgggtaacgaactgatgagtcagccagttggaggcgcatcggtgttggttccaacactgtgaagttgagcttgtcgaagacgtcttttggcatgacgctaacgctggctccaaggtcgcaccaggtctggtcgaattgttgtgccccgatcgagcaggtgatcgtaggacaccccggatctttcttcttctccgggagcttgtggagtatcaggttgctgcattgttccgtcagcttgaccacctccgttgttggcagcggtctcttgttgttgagtatgtccttgagataacgggcgtatgttggcacttgcatagcatccaacaacggcactttgatgtggatcttctggatcacaaaacgagcgaactgctcgtcctttcgttggggaaacagcagcaaccgtgtgtcgcagtactcctacggcacagtcttttccggctgaatctccttgtcagccgagtcgatagatggtgcttcttttgacatcccattccatggccttggaacccgtcgtaaacatgtgacataacccttcacccatcctagccgtgaacaaaagtaccgacccaaccctgcctacagccggtatcccgggacaggcaggccaggattgagccccgagcaacaggatctagaccgggtgcgccacacgcataggggtgagaccacccgcgtactagtccagtgccatggcatctcgactaacgggcaccgacccgtgtagtcttcatttgcctagatatctcgattaccgagccgcagctcgtttagccttcatttgccttagagatatccatcgtcgcaacgacttcatccatctctatccgtgtccttaatggcaacattggcacacgagggtgcgatgtttttgaccggaatcaaaaagttcaaaaacgccaaaacatgttttttggacattttggagtgtattgcgtgcgttcgtggcaaaaactcacttcgtgattcgcgcggcgaacttttgtcaattaatggcaacattggcacacgatggtgcgatgtttttgaccggaataaaaaagctcaaaaaacgccaaaacatgatttttggacatattggagtgtattgggtgcgttaatggcaaaaactcaattcgtgatttacacggcgaacttttatcaattaatgccaatattggcatattttggcccaaatgggggcgatgtttttgaccggaatgaaaaagttcaaaaagcgccaaaacatgatttttggacatattggagtgtatcgggtgcgttcatagcaaaaactcacttcgtgattctcgcggcgaacttttgtcaattaatgccaatattggcacacgaaggagcgttgtttttgaccggaatcaaaaagttcaaaaaacgccaaaacatgatttttggacatattggagtgtattgggtgcgttcgtggcaacaactcacttcgtgattcgcgcggcgaacatttgtcaattaatgccaatgttggcacacgagggtgcgatgtttttgaccagaatcaaaatgttcaaaaaacgccaaaacaagatttttggatatattggagtgtgttgcgtgcgttcatggcaaaaactcacttcatgatttgcgcggcgaacttttgtcaattaatggcaaaattggcacacgagggtgcgatgtttttgaccggaataaaaaagctcaaaaaatgccaaaacatgatttttggacatattggagtgtattgggtgcgttaatggcaaaaactcaaatcatgatttacacggcgaacttttatcaattaatgccaatattggcatattttggcccaaataggggcgatgtttttgaccggaatgaaaatgttcaaaaagcgctaaaacatgatttttggacatattggagtgtattgggtgcgttcatagcaaaaactcacttcgtgattcgcgcggcgaacttttgtcaattaatgccaatattggcacacgaaggagcgttgcttttgaccggaatcaaaaagttcaaaaaacgccaaaacatgatttttggacatattggagtgtattgggtgcgttcgtggcaacaactcacttcgtgattcgcgcggcgaacttttgtcaattaatgccaatgttggcacacgagggtgcgatgtttttgaccggaatcaaaaagttcaaaaaacgccaaaacaagattttttggtatattggagtgtgttgcgtgcgttcgtggcaaaaactcacgtcgtgatttgcgcggcaaacttttgtcaattaattgcaacattggcacacgagggtgcgatgtttttgaccggaatgaaaaagttcaaaaagcgccaaaacatgttttttgggcatattggagcgtattgcgtgcgttcatagcaaaaactcacttcgtgattcgcgcggcgaacttttgtcaattaatgtcaatatagctagttacccgttcagggtttctcgggttttgtttagatgaaagtttagccattgctacttccttgcagcgcgtgtgtcggctagactgtccgtctgcttgtattcggaaccccaacttatcatttgtattaaattcctttttgcaatatcagattgcttttatcttgttcttacttgtttcttcgatttgcttgcaggaatagggttgatctgcaccggcaagatcaacaacccacggagaggtgtatcgatcgctaaggcgcaacacaacgtctcgtacagttgtagtcggattgtcaacgtttctcccaaatcgtagttatcacaactcaccgaaagatcgggccaacaacagccttgagtgtcgagaggaactcagggttcttcaggtggtatcagagactttcgttgctcggtgagtttttttctacccataaccagaaaatagccatacaaaaaaatttgtaacatttacctagccatattgtgccattgcattgttctcttcagtttttgctttgttgaattttgtgttgcatcgtcacgtcgagctgctggttttagcgtctagttcgtttagagtttcgagttctggtcacgttttgtaccacagtcgtcgctgccaccgtgtctctgttgttgtcgggacctacgaaaacggaatcggctcgctgccacggttctatttttgtagttttcagaagtttctgtcggttagttttggagttcttgtgttgcatctagagtttgcctatccttgtgtgtgtttgtttttgccgtgcatgtgcgcgtgaggaagaagggagaagatgcacatgaggaagatggaaggagaagattagactagattagattgctttcgtttctatttggggccacgcagaaaaggaatcggtttccttccttcagaaattctcaccgagtcccaccaccttccatgcggcattccccccttgagtccgactccctctcctttcggttcaatctacaccgtgccatccttacaccttggtgaatttttgtttggtgttcgtttcgatatccgttcagaaaaacggaaccagtataaattcagcattccattttgtataattttaattttggttttagacttttacatttgagtcactgtaaattttatatttatgtttgagtccctatagccttacattgaggtcctcgaatctgattttgtaaaataaaatcaaaaaaaaagaaagaaaaataggcagaaaggtgcataaaaaaagaaaagaaaagccgcacccaaaaaaaagaaaagaaaaggaaaggaaagaaaagaagaaagaaagaaaagagaaaaaactgttatgtttgagagctgaacttcatatatcagagttgtgcatgagttgttcctagtgctgagtctgactccctccctctcacgtcggtttcgcctgttccgagttgtgtcaaacacgttggtgaatttttgtttcgtgtcggtttcgagatccgtttcgaaaaacggaaccagtataaattcagcattccatttttgtataatttttaattttggtttggacttttacagttgagtcctagtaattttcatatttacatttgagtcccggtaatcttgcattgaggtccttgagttgtttttgcagaaaaaaaaatacaataaaaaaagtaagtaaggaaatggcaggaaggtgcataaaaaggaaaaagaaaagaaaagccgcaccaaaaaaaaaggagagaaaaaaaagaagaagaaagaaggaagaagaaagaaggaaaaaaaatcagttgtatctttgagctgaacatgatctatcagagtgtgcctaagttaaaaaaatcagttgtatctttgagcagaacatgatctatcagagtgtgcctaagttgtttctagtgctatcctgtggtatcgtttgtgtctaggctcgcgtctctagtacattctagcctaggaccagcacggtgcttgactttgaactttttcattccggtcaaaaacatcgcacctatgtgggccaatatatacaaatattggcattaattgacaaaagttcgccgcgcgaatcacgaagtgagtttttgccacgaacgcacccaatacactccaatatgtgcaaaaatcatgtcttggtgctttttgaactttttcaatccggtcaaaaacatcgcacccgtgtgggccaaaatatgccaatattgacattatatgacaaaagttcgccgcgcgaatcacgaaatgtgtttttgccacgaacacacccgatacactccaatatgtccaaaaatcatgttttggcgttttttgaacttttggattccggtcaaaaacatcgcaccctcgtgtgccaacattggcattaattgataaaagttcaccgcgcgaatcacgaagtgagtttttgccatgtatgcacccaatacactccaatatgtccaaaaatcatgttttggcattttttgaactttttgattccggtcaaaaacatcgcaccctcatgtgccaatatttgtattaactgacaaaagttcgccgcgcgaatcactaagtgagtttttgccacgaacgcaaccaatacactccaaatatgtccaaaaatcatgttttggtgctttttgaactttttcataccggtcaaaaacatcgcaccggtgtggtccaaaatatgctaatattcgcattaattgagaaaagttcgccacgcgaatcacgaagtgagtttttgccacgaacgcacccaatacactccaatatgtgcaaaaatcatgtcttggtgctttttgaacattttcattccggtcaaaaacatcacacccgtgtaggccaaaatatgccaataatgacattatatgacaaaagttcgccgcgcgtgatgtgaccatgactactatagatacaaccgtcgttcacatcaagatcaagccgtccaagttctacaatccagttcggccacctgcaacagaatcgacttcagacggccgccaaatatgcatgcgagctccgttttgggtccatgagtacttgatggaaagctctcggagtcatctttcaaatggatccagcttcatcaccaaattccatcccagtcggccgaaatcacaaaaagaaggtgctgcgtcacctacaatgggcttgtaacttcgtctgggaccccggcccaagtggggcccaagtggggtgcgccccaaccaggtggagcacgaccctagggttcccttaggtcgtcctcccaccttcttaaatagttaggttcccctttagagtttctcggggttttgatagattaaagtttagccattgctacttgcttgcagcgcgcgtgtcggctagaccgtccgtctgcttgttcttcggaaccccaacttatcatttgtattaaattcctatttgcaatatcagattgctttttatcttgttcttgcttgtttcttcgatttgcttgcaggaataaggttgatctgcaccggcaagatcaacaacccacagagaggtgtatcgatcgctaaggcgcaacacaacatctcgtacggttgtagtcggatcgtcaacgtttgtcccaaatcgtagttatcacaactcaccgaaagatcaggccaacaaaagccttgagtgttgagaggaactcagggtccatcagcgcgaatcacgaaatgtgtttttgccacgaacaatcccgatacactccaatatgtccaaaaatcatgttttagtgttttttgaactttttgattccggtcaaaaacatcgcaccctcgtgtgccaacattggcattaattgacaaaagttcgccgcgcgaatcacgaattgagtttttgccatgtatccacccaatacactccaatatgtccaaaaatcacgttttggcgttttttgagctttttgattccggtcaaaaacatcgcaccctcgtgtgccaatatttgcattaactgacaaaagtgcgccgcgcgaatcacgaaatgagtttttgccacgaacgcaaccaatacactccaaataggtccaaaaatcatgttttggtgctttttgaactttttcataccggtaaaaacatctcacccgtgtggtccaaattatgctaatgttggcattaattgacaaaagttcgccgcgcgaatcacgaagtgagtttttgccatgaatgcacccaatacaatccaatatgtacaaaaatcatgttttggtgctttttgaactttttcattccggtcaaaaacatcgcacctgtatgggccaatacataccaatattggcattaattgacaaaaattcgccgcgcgaatcacgaagtgagtttttgccacgaacacacccgatacactaaaatatgtccaaaaatcatgttttggcgttttttgaactttttgattccggtcaaaaacatcgcaagctcgtgtgccaatatttgcattaactgacaaaagttcgccgcgtgaatcaagaaatgtgtttttgccacgaacacacccgatacactccaatatgtccaaatatcatgttttgttgcttttcaaaatttttcattacggtaaaaaacatcgcacctgtttgcgcgaatatataccaatattggcattaattgacaaaagttctccgcgtgaatcacgaagttagtttttgccacgaacgcaccaaataagctccaatatatccaaaaataatggtttggcttttttgaactttttaattccggtcaaaaacatcgcaccctcgtgtgccaacattggcattaattaacaaaagttcgccgcgcgaatcacgaagtgagtttttgccacgaacgcacccattacactccaatatgtccaaaaatcatgctttggtgctttttgaacattttcattccgatcaaaaacaacggacccgtgtgggccaaaatatgccaatattgacattatttgacaaaagttcgccgcgcgaatcacgaaatgtgtttttgcgacgaacacacccgatacacaccaatatgtccaaaaatcatgttttggctctttttgaactttttgattccagcagaaaacatcgcaccctcgtgtgccaatattggcattaattgacaaaagttcgccgcgcgaatcacgaagtgagtttttgccacgaacgcacccaatacactccaatatgtccaaaaatcatgctttggtgctttttgaacattttcattccggtcaaaaacatcgcacccgtatgggccaatatatgccaatattgacattatttgataaaagttcgccacgtgaatcacgaaatgtgtttttgccacgaacacacccgatacactccaatatgtccaaaaatcatgttttggctctttttcaactttttgattccagtagaaaacatcgcaccctcgtgtgccaatattggcattaattaacaaaaaatcgccgcgcgaatcacgaagtgagtttttgccgcgaacgcacccaatacactccaatatgtccaaaaatcatgttttggctctttttgaactttttgattgcagcagaaaacatcgcaccctcgtgtgccaatattggcattaattgacaaaagttcgccgcgcgaatcacgaagtgagtttttgccacgaacgcacccaatacactccaatatgtccaaaaatcatgttttggttctttttgaactttttgattccagtacaaaacatcgcaccctcgtgagccaatattggcattaattgacaaaagttcgccgcgcgaatcacgaagtgagtttttgccacgaacgcacccaatacactccaatatgtccaaaaatcttgctttggtgctttttgaacattttcattccggtcaaaaacatcgcacccgtgtgggccaatatatgccaatattgacattatttgaaaaaaagttcgccacgcgaatcgcgaaatgtgtttttgccacgaacccacccgatacactccaatatgtccaaaaatcatgttttggctctttttgaactttttgattccggtcaaaaacatcgcaccctcgtgtgccaacattggcattaattgacaaaagttcgccgcgcgaatcacgaagtgagtttttgccatgtatccacccaatacactccaatatgtccaaaaatcacgttttggcgttttttgagctttttgattccggtcaaaaacatcgcaccctcgtgtgccaatatttgcattaactgacaaaagtgcgccgcgcgaatcacgaaatgagtttttgccacgaacgcaaccaatacactccaaataggtccaaaaatcatgttttggtgctttttgaactttttcataccggtaaaaacatctcacccgtgtggtccaaattatgctaatgttggcattaattgacaaaagttcgccgcgcgaatcatgaagtgagtttttgccatgaatgcacccaatacaatccaatatgtacaaaaatcatgttttggtgctttttgaactttttcattccagtcaaaaacatcgcacctgtatgggccaatacataccaatattggcattaattgacaaaaattcgccgcgcgaatcatgaagtgagtttttgccacgaacgcacccaatacactccaatatgtccaaaaatcatgtttttgtgctttttgaactttttgattccagtagaaaacatcgcaccctcgtgtgccaatattggcattaattgacaaaagttcgccgcgtgaatcacgaagtgagtttttgccatgaatgcacccaatacactccaatatgtccaaaaatcatgttttggcgttttttgaactttttgattccagtagaaaacatcgcaccctcgtgtgccaaaagttcgccgcgcgactcacgaagtgagttttttgccaagaacgcccccaatacactccaatatgtgcaaaaatcatgtcttggtgctttttgaactttttcattccggtcaaaaacattgcacctgtgtggggccaatatataccaatattggcaataattgacaaaagttcgccgcgcgaatcacgaagtgagtttttgcgacgaacgcacctaatacactccaatatgtccaaaaatcatgttttggctctttttgaactttttgattccagtagaaaacatcgcaccctcgtgtgccaatattggcattaattgacaaaagttcgccgcgcgaatcacgaagtgagtttttgccatgaatgcacccaatacactccaatatgtccaaaaatcttgctttggcgttttttgaactttttgattccagtagaaaacatcgcaccctcgtgtgccaatattggcattaattgacaatagttcgccgcgtgaatcacgtagtgagtttttgccatgaacgaacccaatacactccaatatgtccaaaaatcatgctttgatgctttttgaaaattttccttccggtcaaaaacatcgcacccgtgtgggccaatatatgccaatattgacattatttgacaaaagtgtgtttttgccacgaacacacccgatacactccaatatgtccaaaaatcatgttttggctctttttcaactttttgattccagtagaaaacatcgcaccctcgtgtgccaatattggcattaattaacaaaaaatcgccgcgcgaatcacgaagtgagtttttgccgcgaacgcacccaatacactccaatatgtccaaaaatcatgttttggctctttttgaactttttgattgcagcagaaaacatcgcaccctcgtgtgccaatattggcattaattgacaaaagtttgccgcgcgaatcacgaagtgagtttttgccacgaacgcacccaatacactccaatatgtccaaaaatcttgctttggtgctttttgaacattttcattccggtcaaaaacatcgcacccgtgtgggccaatatatgccaatattgacattatttgacaaaagttcgctacgcgaatcgcgaaatgtgtttttgccacgaacccacccgatacactccaatatgtccaaaaatcatgttttggctctttttgaactttttgatttcagtagaaagaatcacatcgtcgtgtgcaaaaattggcattaattaacaaaagttcgccgcgcaaatcacgaagagactttttgccatgaatgcacccagtacactccaatatttccaaaaatcatgttttggcgtttttgaactttttgattcctgtcaaaaatatcacacccgcgtatgccaacattggcattaattgacaaaagttcgccgcgcgaatcacgaaatgtgtttttgcgacgaacacacccgatacacac

SEQ ID NO: 23526 - DNA, 707 bp, Oryza sativa
ttcctgcagccctgaagcaaataaacaaagagaagtctgctctactggccctgccccgcgccgcgttcacgcttggtcctccgggcctgtgctcacacgtggtcctgggagtaggtgaaatgatccggtggcacagcacgggtagcacgagtgtctggcggtggagtggcctgcgcctggtcctgcgtctgcaccggcggtgcgcctcccagctgtgaggggccgatgacgtcctctgtcgagcctgaagcgaagtcgaagtcagtgatgtcgaagagtaaggcggaagccaccaagtggtccgacgaggtcccaacatggtccaatggtggaccctgactcgacgtgccggctgcctgtgacgaagtcccggtgtactgctcgacttgcaagcgttcgataaaatgttaggcaccttaccttacgactaaatatgtagtacgcttgtcatctcggtacaaaaacactcacggtgaactgaagcagccacctcttcgtaggtccggtgttgcggtggtgtgccaacggctggagcgggagatgtggtgcgcgctgtactggtgcgaaacatgctgttagatcgtccttccagtccacacccgtggtcactggcccaacagcgtctcccgcgagcggtagccccaacaagtacgatacgtcctgtaggataggggctacttcaccgcacagcaagtgaaaagtgtgcg

SEQ ID NO: 23527 - DNA, 1244 bp, Oryza sativa
atatgcgtgctgcatatatgcaaatatacatccacatcattaattttcttaattttcttgatactaattagagattatttttgtctcttcgcatgtactggtggagccaccgccaaattcgccgtggtttccatagaacacgtcggacgatgccgccgcagattagtgtcctcgactgcatggttggttggtcacaccaccgttgttgggcgtctacatcttcaccactggtctgcctttgtcgccgccgactggtatctccgcctacacggttggttggttacagcaccgttgttgggcttctacattctcaccgccggcctgtctccgtcgccgccgactggtgtatccgcctacaaggctagcctgttatgccgccgttgttgggcgtctacgacctcaccaccggcctgcctctgtcgccgccgactggtgtcctcgcttatatggttggttgatcacaccaccgttcatgggcgttcacgtcttcaccgaccggctcgccttcgtcgccgccgactggtgtctccgcatacacggctggcctattatgccgccgttggtgggcgtcttcgctttcaccgtcgaccgcctccgtcgccgccgactggtgtcctcgcctatacggttggttggtcacaccaccgttcatgagcgtctacgtcttcactgaccggcatgcctttgccgccgccgactggtgtctctgcctacacggctggcctattatgccgccgttggtgggcatcttcgctttcaccatcgactgccgactggtgtcctcgcctatacggttggttggtcacaccaccgttcatgggcgtttacgtcttcaccgaccggcttgcctttgccgccgccgactggtgtctctgcctacacggctggcctattatgccgccgttggtgggcatcttcgctttcaccgtcgaccgccttcgtcgtcgccgactggtgtcttcattgttattgatggatgactttattcctacattggctacctctgccatcaccaaggggaatattacaaagataagtcatcattaattttctttatatgatattttccttttcctctgcctcactacatcaactggtttgccgttgactagtgagtcggggactacatatattatatcatatttttcaacaattttcataatatttatcttgatggcgtgtgaaataatctgagtacaaaagtacctatcgagttatggagtacatcttcctatgctttccgt

SEQ ID NO: 23528 - DNA, 723 bp, Oryza sativa
gggctcgttggatggaccgagtaacgcaaggtgctaagtattactcggaataaatcaaaagcatagagataaaataatttattttctgctcttaacaattgcaaaagtacccgagtagtaaactccgatccgtgaaactttgttccattaatgacgaactcatgtcactcatatgcatatttgggaagtgcctaggccgactcccggtgcttgggggctataactagtcgggcagagtgtttaaacgtaaggagtcatctgctcggggaaaccaaaattaacaagaggagaaatacatatttgtaaacattttaaaatacttgaattttcctcgagtattatatttacattagatactactcatcctatatgtttgttctgcagaatccagatccagatatgcataataggaattcatggctttaagcctatctcctacgcttcaggaatggatcagtcagaacatcaccatcggctcgccttcgccgccgctgactggtgccctcgcctatacggttggttggtcacaccaccgttgttgggcgtctacgtcttcaccgaccggctcgccttcgccaccaccgaccggtgtctctgcctgcacggctggcctattatgccaccgttgttgggcatctacgtcttcaccgaccggctgccttcgctaccaccgactggtgccctcgcctatacggttggttggtcacaccaccgttgttgggc

SEQ ID NO: 23529 - DNA, 1396 bp, Oryza sativa
atatgcatatataatatatgcatattatatttatatatgtttcaatacatatgtacatgcataatatatatgtatttatacatatatatgttatgcaaatgcatatgtgtgtgtatatatatatatatatatgaccaaaatatatttacattatagaaaatgtgtacacatgcatatagaaacatatgtagtcatgtattaattacaatccattatatgtcctagctagctacgatttcgacgtagtagtagtcgctagctcagaagctaaggacctatgaattgtgtttccgtcgtagtagaattcacccttgggatcaaggatttgttcgttgatgaatcccatgagttgttcttgaaccgccgcgataaattccttgtgtgtggtcaggttatctctcatgcgaataaactatatgaatgtatgaaattgattagtaattaaacaagaaatcgatacgtaatgaaattttgaatttatttgtatgtacatcgagctctcttgtggtgatgatttggtctacaagacagtggcaatactcgcacacgtaatagccgcacaagttagttccctgcttttgctttgcgcactacaaataaatgacaaacaacgagagatctaattaatatacacttgtatgcatttgaatcggagaaatataaatgtagagcatgtgtactcacaggaaatttgaacttccgcctaagtctttctctccatttgccgcggaccaaatgacggaactgataccaagccttacatggagtttaaagctatgattcgtagtagcaattaacataacaagattttcttaattaacagaggaacttatgacggtacctatctataagttcgaaaaccttgtcaaacgtagactcttttttatccattgagtcatatacgttgacggtgcaggccgacaggtcgaagagtaaaagcacccagtggaatctgcaatgtgcgtgggatgcattacatatgaaacacttagcaagttcgtacgggaatgaaatttgatataggaagacagtaaaattaaactaactctgtgttgtacggcaacagtatgaacgtcttgtaatgctgcaccttcaggagatggacgagattgtcctctgtggcttgcagatattggtcgagcattgcgacgtttactttccgagggtcaatgaatccagtatcgaaaaccccccgccgtcgggccctttgaatctctattctacaacgataaaagggagtatattattttctatagtctacttatatacaaggacctaattaattaaaggagacgtagtaagaaatctaactgaacgatatacttacaaaatccagcaactcataatagagacgtcgagggcgtctagctggtatagttcgtagattcccttgaaa

SEQ ID NO: 23530 - DNA, 668 bp, Oryza sativa
gcccgtgataaacatgtcctgtagtcctgtactattggttgatgctaaggaaaaaaaacaatgcagaattccagatgctggctaagaaacctggaacttgaaaagagtaatattccaatctactgaacatgctctgtttgttttttttctttcctggttgtgtgttggttgttttttgtggtggtactggtatacctgtcgttatcaggtcattgaaaaatgggcatatgctaattttcaccggtgcatgtcacactagagtcatgcaattgtttatcatgttacttttgttgtttaacatatttatttcatcttgcagactctggatcaacagttgagaacgagcaggtaccagaaacctctacgtccagatttacgtggaccattgaagatttttcgaatcacagaaagctgtactctgatgtttttgtggttggggggcacaaatggtgagtaaaaacggttttttgttgcttcttatcatgcaccactagtcgtagcttaatttggtgctcctatacctccttgcaggcgggtgttagtttttccaactggaaacagtgtacagtccctttcgatgtacctagatattgctgacgcaaatgaacagcctcatggatggagtaaatatgcacagttcagccttgctgtgatcaaccagttagaca

SEQ ID NO: 23531 - DNA, 14660 bp, Oryza sativa
ctgggcattaggcctcatttcgccttgttctgccgcatcttcttcctcaagccccagccaaataagagcaaaccatgcgtcgttgggggtgctggtttccaactcaggggaacactaagccaaaaatacttctccatgcccttcaagacctcaaataaaggctggcacgcaaactggttttatgttcaaaaccccgagcctattcttcccgagtactcctgtcttcctccagtttatcgggatacttggaactcactaccaatgggagatgaagctgcacaagcagtagaactgatggagaggatgataaagctgaaagagcagggccttcaaggagaacagatcacccgacactttatcaagtgtcggttagctccaatcaaagaaagatctcgcacagccttcgaatttgacggcaagcatgacccaaaccgtgaagatccagattctcttgacttcaagttcatgaaggaaaggatgtataagatcttctcaaacgccatcgttgtcagctactcacacttgctgccagtcataccgttcaatgcattcaatcctcctccaccggtacgtaatcatacacttcaacctttctcaaaatatgatcttgttttcttgttgaatcagttaacaatgaaggatattacacccaggaatttgctttgatgaagtcggatcccccaatcgctcaacgccgatctccccgccatcaaactgggcaagggagcagaggaccaagaattcggtctgaaactcaaccaagtgcttctgatccagtcagccaatcagattctcgaaagaggaagttggttctaagtgacgacgaagccgatgataccaccaggagacctggagaccgagagacaaccaagaaactaccaaaacaggctactccaaggaagaaaacatccagtcgccctgtgccaaagatcaggaagtcttctaagtgcaactcatataatgatctctcttgcattgatgcgcacccattgcggcaataatactgataatcaaatttgcaggaaaccgtctgatatagatccatctgggaaagactctgacccgactaacacagacacaagttcttccaaagaaaccgggccaactgctaggaatcatccgagtgacaatcagccggcaaccgataatgtagaatccggtgatcaacccccgactagaaaccagtcggccgaagccaaagccggagttaatcaagagcccccgactagaaaccagtcggacgtagggccaagccaagagatttcagaagtcgaaacccaagcagacagccctcgcggacaaaacgccagcaataaccagagatctggatctcctttaaaggcatccgaatccactcgtcctcgtccaggaattattacgggtaaacactttgtctgaaaccatgttgacccaaataactctgatcaattgtctaacctttgtcagtgaatacattaggaccaatgattggtgatgaagaagaaatccccgtatacgagcagccgaagattcgtgccctcccattctggtcaagtggtgggatgacaacttgcaacctcaaggaattgtaataaaccggcaaaaagaagacgaagaggtatgcctactgaaaaaggcactcaaccaagcgactcgcattgtaaatgtaagtcccttgacgcctgacctcagccatctcgtttgccgtctggcccgagcgctgataaaactgctccacagaggattcatcttaggaacgaggtgaaaaccgcaaccctagagagactagttccgcatcttggaaccctcgaggccaccaagagtcaactgcacgaggccagagaacttgccaagaagaatgaacatgatctgagggatcggattgctgagcttcaggagtccaatttcgaactgagtggctcatcaaaaggttcgcgcaaactctgcccaactgatttgtgctgttatctctgtaatcttgattaaccgaagttaatgtagtgcaagctgccaagatatctcaactagagaagcagatccaaactctggaaaatgacaaggttgagctggcaagacagagggattcggctttaaaggaggttgaaggtaccaataatcgacacttcaaaagccattatcttctatatactgattcattaatgtgaatctgttgatgtagaccgcaagatcaagtctcaagcacagtttgatgtcttagttgacaagatcaacaagcttgaaggagccagggataaagtcgctaatgctactactccactcatctaggccatgttcttcaataacgccggttcgagtacacttgatgctaccgaaatcttcgacaagctgagagtcgctccagatacttatttcaagaacatcaaagatgctggaagtatgggagcaagtctggcgttggcgatgaccaaatccctttatccaagggttgatatggatgccattgatggctttgcagacgggacgagcgaagaagctgctcttgacctcatcagtgatgcgcaaaaagctgctgacaagattgctgctgatgtagttgagagattccaagatgtcgaccttgggccgactgggtctgataagtctgacgatgaaaaaactgatactgattgatgtaacaatgattttgatgatcaatgacagtggaggctcaatttgtacaatactgatgaatttatgctatgcttggtgttccatacttagcttctgatttcttaaaagcctttgttaagccttattgagcctaaaacccgcaaaagctattaaaaaccttcagtccttattggctaagtcgaaagaccaaacagggcaatgataaatcaagtaagcaaattgaattgataaaaatcacactccattattatcatagtagctccctgactgaaaacttcaaggaaaaacttgaagttagcagtcaaagaggaaagatacaaacgaaatgcctaagcgtaaaatcgacgaaggtgttcaatattccaataattgttgatgagagtaccgtcttcgcgcttgagtcgataagaacccggccgagtgacttcagcaattatgaacggtccttcccataagggagataatttatgccgatcctgtgttgtttgaattttcctcagaaccaggtcgccgactaaaaaggctcgcaatcgaacatttcgattatgataacggcgcaacccttgcaatcgagtcgactgaattaaagctgcttctcgagcttcttctagtcgattgatgtcgtctactcggccttcttcataaccctcctcgttgaagttctgaaatcgtagtgattccaattccacttcactcggcaacattgcttctgcgccataaaccaaaaagaacggcaactggccggtagcccgactaggagtagtgtgtaaataccaaagtacggatggcagctgatctacccacttgccagtgtagggatgtagtcggtcaaaaactcgtgctttgatcccttgaagtatcatgccgttagcgcgttcgacttgtccgttactcatggggtgtgccacggaggcgtaacaaattttaatgccgaagtcttcacaaaagtctttaaatgctccgccagtgaattgagtgccattatcagtgatgatccaattaggtaccccaaaccgatgcacgatgttaatgaaaaaatctctagctttatctgctgtgatcgtgatgaccggtttagcctcaatccacttggagaatttgtcgatagtcacaaagagatgcgtgtaaccgccgactgcccttttaaacgggccgaccatgtcaagcccccagaccgcaaacggccaggacaacgggatggtttgcaactcttgggctggcagatgaatttgtctggcaaaaaattgacaaccttcgcatatccgtacaatcttgtcagcatcagacacagctgtaggccagaaaaaaccttgccggtaagctttgccgacaatggtccgtgcggcggcatgattaccacaaataccagaatgtatatccttcaacaattgtctcccttcttccaaagacacgcagcgctgcagtattcctgatggacttttcttgtacaactcagcctcatgaataatgtaaagtctgctgcgtctggaaatccgctcggcttcatttttgtcttgagggagttcttgtttagtcaaaaattttatgagaggttctctccagtcggtttcgatcatgcttacgccttgagtatccatggcttcaattgtttcttttttgggtacggttggttcgtaaagatgttctacgaacacatcagaaggggctgcttcccgttttgaaccaaatttggccagcctgttggctgcctcattgttatgtcggaggacatgggtgagctcgagtccgtcgaatttatctttcaacttgcgtacctcttgtcgataagcggtcatattatcatttaggtatgaccactctttcatgacttgattaacaaccaactgagagtctccacggacgattaattggcgaatgcctagagagatggcaatccttagtccatggagtagcgcctcgtattccgccatgttatgggacgcagaaaaatgtatccacaatacgtagctcaatcattctccagtcggggaaatcaagacgaccccagctccagtgtctataagcctcttcgacccatcaaaatgcatagtccaatgttccatcttttcctctggcatatcttcttggcactcggtccactcggcaaagaaatcagctaaagcttgtgacttgatcgaagttcgtggcttgaacgatatgtccaaagacatcaactctaaggcccacttcgcaatccgtccgtttgcttcgcggttatgaagtatatccccgagtggaaacgatgtgaccaccgtgaccgagtgactttgaaagtagtgagataatttcctgacggtaattaagacaccatataataacttttgaacctgaggatatcttgtcttggagtcggctaaaacctcgctaacgaaataaattggtcgttggactttttgaatatggccttcctcttcgcgctcgacaaccaggaccgtactcacaacctgggaggttgccgacacatataacagtagcggctcttgtggacgtggtgaggccaaaactggtggagtggtgagaagtttcttgaagtcttcaaaggctttttttgcttcgggtccccactgaaaattgtcagtcttcttcagcagcttgaagaagggcatcccccactcgccgagtcgtgaaatgaaccggctgagcgccgccatgcaaccagtcagtttttggacgtctttttgggagcttggcggtttcatgttgaggatggcgttgattttctccgggttggcctgtatgcctctttgagataccataaatccgagcaacttccctgacggtactccgaagatgcacttttccgggtttagtttcatcttgaaagcacgaatgcttgtaaaagtttcttctaaatccgcaatcaggtcatccttctgcttggtcttgacgactacatcatcaacataagcttcaacattgcgaccgatctgagttgaaaaacatctttgaatcatgcgttgataggttgctcctgcgttcttcaatccaaatggcatggtgatgtagcagtaggccccaaagggcgtaataaacgaggtcttcaagcagtcggattcttttagtcggatctgatgatatcctgagtaacagtccaagaagctgagtaactcacagccggccgttgagtcaaccacctggtcaatgcgaggtaacccaaaagggtctttgggacaagatttgttgaggtcggtataatcgacacacatgcgccattgccccgtctttttccgaaccaggactgggttagccagccagtcgggatgaaggacttccttaatgaagcctgctgctaacagcttggttaactcctccttgatcgcatccttcctgtcctgtgcaaaacggcggagtcgttgcttgatgggtttggcgtcttccttaacatgtaaagagtgctcaatcacctctcttgggataccagacatatcggatggtttccacgcgaaaatatctttattattctgaagaaaggtgatgagcgcgctttcctatttacaatctaactcagcgcctattacagcagtcttatcaggatcggagggatctaagggaatctttttcgtcttggcatcactttcttcgttcttcgtcagcttggttgcaggcacttctccctcacttgccgtggtcgcagccagtcggatctcttcgcgggcgagagtagtctcgtgagtttgggccatctcgcaactttctttgtcacatgtgacggcctgcttgatgtcgctccgtagtgatatgactcctcgaggaccatgcatcttcatcatcatgtaggtgtagtgtgggacggccataaatttagctaaagccggtcgtccaagtatagcatgatatgctgtctcgaaatcagcaacttcgaaacaaacattttctgtgcgaaaattctcccgagtgccgaaggtaattggaagagtgatctggctgagtggtgtagctgacaatcctgggataacaccgtggaagggtgcattacttggctttaattccatgcgaggaatctgcatatcgtccaaggtcttagcaaaaaggatgttgagtgcgctgccaccatcgatgagagtccgtcggagcttgacattgcgaaccactgggtctagtaccagggggtaccgccccgggtggaccactcggtcgggatgatccgagcggtcgaatttaattgctatctctgaccaccgaagatattggggcgtattaggctgaaccgcattgatctcccgttctgttagcttctattttctcttagactcataagctaggggtccgctgaagttgtgattaagttctttgcgatgatcttgaaaaccagtcggggcattgtcttcatcatctttcttctttgatgtgccttgatcttcgtttgaaggtttacgtgcgttcttgacgtattgctccgcgaactgtttgtagacgaagcaatctttggccacgtggttggaattgggatgatgcggacattgggagttcattatcttgtcgaaggtgttgacgcgggaacgttgtcgggaagatggagaggtggtcgccacaagttcttcgggcttacgcttgcgatcattgttgttgttacttccactccctcctgcggtcggcgtatccttctttggcttccaagtggtgcccgactgtttggacgcggtaatagcatcttcggctttggcatactcgttggctttttcgaacatctgcttaaccgtcctgggaggtttacgtccgaacttgccgactaggtcctcgtggcgaatgcctttagtgaaggcggcgatgatgacgtcgtcggtgatgtcggagatcttgttgcattgttcggagaagcgtcggatgtaatctcgaagggattctccagacttctgaacgatgttgtagagatcaaactgtgtgccggggcgttcaaaggtaccctggaagttggcgatgaagtgatcacgaagttccgcccatgatccgatcgtgccacggggtaggccgtgaagccaggatcgggcggaatccgctagggccacaggcaaatagtttgccatggccttgctgtctcctcctgctgcgcggattgcaagtccgtagacgatgagccaagactccggattagtggtgccgtcgtacttctcgattccagtcggcttaaaaccggctggccaatccactcgacgcaggtcattagtgaaggcagctactccatccacgtcgtcgtcatagcgatttggtgaatggcggtgacctcgtgctgcacggcgctggttgatcgtgtcgcgaaggtcgacgggacgctagtgaggtggagagcgaggccgttcgactcggcgctccctgtgacgtttgggaggcgagtgaacagatcgtttgttgtgacccctgctcctgcgactagatattgtgccgatgatgctgaggcttggctaatgataatcatgagatcggaggtgagggactcggctaccagtcggggtacgggtgcttgcagagttggctggaaccgaggcagcgatcatggtcttcgtctggttcaagatgttgacaacatgatcggcttggttgagtgcatcttccttgaggagggtgtcgaggagagtgattgctgcaaccgcgttctgctggggggtgcgaaagaccgctgttccatcgacgtcttgttgcccaatgagctctcttgctcggcgcccagattccaaggcgcgctgtcgtcgatcttcagcctcctttgcaatccgttcgcgatcctgttgctcacgctgtagtcgttctcgctcttgtcgctgtcgctcttcctctagtcggcgacgttcagcttcttgccgtgcgcgatcttggtccgcttctcgggcttggcgctgttcctccgtttcgttgtcagccatgaatacgccgaagaagaggggcgtgtagttatcctcatagctgtcgtcgaagttgtcgaggtcgccgtggtcgtagtggtagccgaagtcatcgtagtcgaggatcttggttggtcgagaactgacgccgggggagctgaggtagccatccaactcttccgtcgagactgtcccaagaggttggagtataacgccaacctccctagatctagatcggatcagggccgaagctggagctcgcctagatcttcgagtgggagatgtcttgactgtgaagacagcggccaaatcatcaggaagtttcatcaggattgggggataggacccgtcatcttgatctgatcgcggaagagtagattggatctcgtccgagtggtttgaagccgactcgggagagatgatcttggagtaggcctcgggcgagttcggaataccgaatggcacggggacctggtctctccccgactggtttgaatccgagtcaaggagagagatcttgccgaagtcattggtgatgaagttgaagctgccgaaccggaacgcctgcccggggggaaggcgaagtcgtcgatgccagaaacgaaacccatcgcacttagtcggcgagaatttgacgctacccctacctggcgcgccaacggtcgaaacaagatttcggcaataataaaagggggtggctatcaagcttggaaagtggatgggtttggagacgaaggatttttatacaggttcaggccttcttattcaagaagtaataccctactcctgtccggggatgattccgccgagtgtgttattgattgtataaactggaaaaaagaatcgccccaagaggaacccggacccctccttatataggggaagggatccgtattacaaagtacagtccatatcctaacggaatatgggattacagataaaatacaatcgtaaccgactaggatcccgggtattttcttgacatacaagtttagaatctaacccgagtcctcataaagatattctatctatatttggtaccgtatatccagctggaatataaccgccatgtagatatggggtaaccataatctccacagtcggtttgttaagcacacttaatttttcgtacacaactataagtttagattggacaattttgtgcaccggttcgatctgcgtccctttccccggatttatatccttggtaggagaacaaaccctaataatcaaggcagtggatggcctaatcatcttgcagactaacaggttccttctgacatataagaactggctcagcccttgattagttcccaactttttcttcaaacttctaacttttccatcacgtcaaaactttcctacacacataaactttcaacttttttcttcaaactttcaattttggcatggaactaaacacaccctcactggaaaaagattctaatcactcgagcaaatttcattatttactgtattccaactaaataattattatgaaaaaaataaaaaaaaaagataaggtagataccaaacagacataccagttctaatttaatttgtacaagttgtaaaaaacaactattaaactctaaatagtatttttatattcacaatcaattttccaattgagtgattttaggtacaagtcctagacttatcacgagcgctcacatttacaactaattattttttcagtggtaagtgatgtatctgttgatagcgaggcgcttatggtgatttcgtaaatcttaatatatgctggtccagtcttccgaagttgataataagggtaggatgtacgtgtatgcgttgggatcagtatacgcgcattttgagtgtctgcatttgcaccaagtttgaaaaaaaaagagtttgcctaggctcacagcacaggacacatgcattcctatctgtatgtgatcccgtggtgcctgatctgattgcgacgctggagaaagggacagcatgctaacttattaagcatgcacgtcagcacgtgtaacaaacgccgttgataaaatagatgtggtggtgttcacccaatattatatatggtttgattgactaaaagtaagtttaatagtatagcctactgctagtagtttcaaatcatctatagccaatgtaatagataattcatacaatagttgcttactatatacaattagtacatggtcccacttgtcatacacacattacgtcttgaagtccgtgctgcagttggctatagatttgtagcccgctactattctctctcattttttctctcattaaaatatgtttacagctggttaatagcctgctattgtacacactctaagagaactaaaagtaaaataataggcaaatatgaatggtgtggtgttgtgggagcatgcagcatgctaccacctattacaatttaaaatcctgatgtacctaataatgttatgtatatgtgaacgtaattttaatataattttattgaggctagggaatttgttgttgatctctgtctctaaggacgtgcgagatattcgtggttgcaaaacaaagtggtggtcaatctatactattgcatcaatttaaaactcgtaaagtattattattgataaagatatagatctaaatatatatatatatatatattacatgatgtcgtcagtcttgtcaactgctgtgtgaatcacctattagagggtaaggtattgtagaactgctgtttgtagctgtattgtgatgacgtgggaataaattttaaactctccgtctcattgttgtttacatgtcgtctaaatagttacgacaaaatttaacaaaattaacatggtaaattaatatgatatatatcactctacagatatacaattcaaaatttaacttctataagttgtaacaaaaagagctaatgaaactatagcaagttaatgtgtattcacaatttaaacttgtatatttgttgaatgatatatcacatgcatatttattctttttcttaacttgaatacgttgaatttaaatatgtacgtacgtttgttgagtaatgtatcacatatcagtgagatcttacctaataatataggcgccgttgttttgccttaattagccagatctaatccactgttcatctgatgtagcagacatgacatagcataaattgcacatgatcggacactatctttgcctgcttgctttgctacaatacagcctgcctgagcagtgtatcacactgtcgtctgtcgtcgtcgtgccgctgatcaatttggccaaagcaatggcgatggcgagcgcgaacgtcctcctcctccccgaggccggctccggccacctcatgtcgctgatcgaggccggcaagcggctgctcgctcacggcggccggggcgacggcgagggccccgcggtgaccgtcaccgtgctggtcgtccgcccggcgacgtccgagtcggccgccgaggtcgacgcgcacgtcgggcgcgtcgaggcatccgggctcggcgtccggttccaccgcctccccgccgtcgagccgccgccgatgggctgcgccgccggcaacgtgcaggagttcaagtcgcggtacatgcagctgcaggcgccccacgtgagggctgcggcggcggagctgggcgccgcggcgctcgtcgtcgacttcttcgccaccggcgtgctcgacgcggcccgcgaggccggcgtcccgacgtacgtgtacttcacgtccaccgccgcgttgctcgcgctgatgctgcggctgccggcgctggaggaggaggtccccgtcgacttcgaggagttcgacggcacggtcgacgtccccgggttgccgccggtgcccgctggttcccttcccgcgttcatgggacgcaaggagagcccgaacttcaagtggttcctctaccacggccgccgcttcatggacgccgacggcatcatcatcaacacagtggccgagcttgagccggccctcctcgccgcgatcgccgacggccgttgcgtgccgggacgaacggcgccgccgctgtacccgatcggcccggtgctcgacctcgaggacaagccgtcgtcgaacgctcgctgcgtccggtggctcgacgcgcagccgccggcgtcggtgctgttcctctgcttcgggagcatgggctggttcgacgccgcgaaggcgcgcgaggtcgccgcggggctcgagcgcagcggccaccgcttcctgtgggcgctgcgtggcccgcccgccgccggcacggtgcacccgacggacgcgagcctcgacgagctcctcccggagtggttcctggagaggaccaaggggagggggctcgtgtggccgacgtgggcgccgcagaaggagatcctcgcccacgccgccatcggcagcttcgtgacgcactgcgggtggaactcgacgctggagagcctgtggcacggcgtgccgctggtgccgtggccgctgtacgcggagcagcgcctgaacgcgttcgagctggtgcgcgacatgggcgtggccgtgccgctcggggtggacgggaagcggcgggacagcttcgtggaggcggcggagctggagcgcgcggtgaggtcgctgatggacgacgcgtcggaggtggggaggaaggtgagggagaaggcggcggagatgaaggccgtgtgccggaacgccgtggcgccgggcggcggctcgtcgtacgccgcgttgcagaggctgctcggggcaattcgcggcggcttctcgactatgacccagtgacgtgcagccgcggcgtgcgtgcggctggtttgagtgtgagtgtgagtgttcgtcgtcactaccgctaaatttttatttgatggatccaacggtcagggtgcagtcctcgatcggccgccttgaactaatttgccagctttgatctgattttggctgttatgttacactgtaatcagtagccgaaaatgtctgccagttcatggtgagcggatcgcattagctcactgtgaattcttttttttgctttacactgttttctgttgaacaagacacgacaaaacattgtaatgttggaattagttgtaccaaaatttggacttgataaatataagttgtactccctccgtcccaaaataaatgtagttttgcactattcacgtttaacgtttgaccgttcgtcttatttaaaaattttttaagattagtatttttattgctattagatgataaaacataatagtactttatgtgtgactaaatatttttaaatttttcaaaaattttttaaataagacggacggttaaatgttgggcacggatattcacggctacccttattttaggacggaggtagtatatgcctgctgaattctttcttattttattcgcacgaactgtaatgtactaattggggttgccaagattgatgcatcggattgaacgaccctgaccacaaaatctaaagcaaaatatggtcctgtcttgtcccgacgggtcctcaaatccctgtcgagggaatgtaagatcgaggtcactgcatccgtccaaagcgcaactaattttgggtgtcacatctgtttgatcggacgttggaagaagttttcggatacgaatgaaaaaactaatcgtgccaatcccagtgtggtgagttccgggacatgggtcatctcgacaaacaaatccaatatggcacatccactcactcacccacccacgatcccttcgtgggtcgacccatcctgtctgttcttgctcttctcattgttcgcgaagcagcaatgatgtgaagtcagacaattcataattataatagatcaatacagcaaaaaaaaatcatcacagattagccatacgaaacgatatttatcgtgtgtactacgcgtataagctgtggaatcttgtatatagtggtttgatggatatatgggtcgagccagcggatcaacatgggtcgattaggttgacccacgatgtttttgcttcatgttttgtggatgcaataagtacaccagaggtccctcaatttaacagcgagatttttttagtccatcaaccacaaaaccagaaatgttcacccctaaactcactcaaaccgttcgaaaaagatcccatgccagtatttgcgcccggttttgctgacgtggcatcctagtcagcaataaaaataaaaataataaatatgtggggcccacatgtaagtgagagaaaatggtgtagaccccacatctctccttcttttctttttctcttctcttctctccttctctcgagca

SEQ ID NO: 23532 - DNA, 16675 bp, Oryza sativa
taagccccaattggccaatcccctacaccgttgtctcctttctgccccgccagtgtccacaacctctcgtagcaagcccgaaacacctccggcggcggcatggcgtcaaactactcctccaggttgtccggctccaccgtgtcggcctgcgacaaccgcgtatctatgccggcggggccgcgcggctggaaccggttgtaccagatgccaaagaggaagacgtagagctacgccgtgggcacgaccagctccggttaccagacgaggatgaggtagaggacgtggacaagaacggtggtggaacggtgtggacccccgtttttataacaggaatcaatcgtgtaaacagtaccatttccctggatcaagtagtctggtacacacgaattcatagctgaaataccaaatgcacatacacgagagtctagtacgaattattacatcataagcccgcaggcacagtcttaaatcatcagaccgagcggtccggaatacattcaaaaaacagaagtaggtaaggcagtggagttaaggcagcggcacgccattgccacaggcaacgaccgtaattaagacctactgagcgccatcgtcttcatcaccctcctggtaataggcatagggatcctccgaagcttcatctccggcctctgattaagtttatatttgcaagggtgagtaccaactgtactcagcaagccaccacagcaacaatgcatatgacaggggtattcaaaggatggctatggttcttttgcgcaaagcaagttttgtaattctttccacaaacctaagacctagcacagactgatcaacttttagtaccagtgttcatatcaaacaatgacggttttgtccaccatccattgtgatcccaaggatagcttcccgccattgagtcatcatggttttctgaggacgtccacattcccgcctctcaggaagtggctccatcagtatagaaatcatcatgcaatatcccatcccacacaagttaagaatttagagtctagccaagtgtaatacatgtcccggtgctcagtaactacgggcacggctattcgaatagatttggtttactcacactgcagtggatgtacactttacccgtactccgcgactgcccaacacatgagcctcgtcccaacacatgagacgcgccacggcaaagcttttcgataacctcgcattggcagtacccgctccatgaactttacatcctcatgcactctaggcgtacatggtttctagcagtgagaggagttctggcgcacccgggaagggaagactcacacatgcattaagttataattatgtttagattctcacatggcagtcctaccgatggcgacaccactgtagacacccgcctcgcagtcctaccaatggctgccccaccgtagagcccctacctcacacatcaagaaaccactatgtatggatactgcctccgctcagctatctattccgctaggtctatacccatacgagaagtgcggttgtacgggggtcgtttcatgcttaacttcatggctcggtccttaattgaccggggacggtactagccttttccggataccacccaaatcctccatccgccccagtcgaaaacagttgtttaattttatttctcctttcataaatcatgtcatcaacatcatggcaatgtggcgctcatgtctccacatgccgcatctcaattaccttcccaaaggtaattggccaagcatatagcattcgataaatatgagtatgcatgattctagagtagcatctctaagcatttgttatagttgaccaaggactcatacgtaatcatggttacaagggaataagggtaaacaataatcaaggtatggcatattcacaaataggatgttcatcattgcatgcattcttatttgtaaataaaaataatttcgcaattgggatcaacatgttcaagggatagtgatgacttgccttgctcaaagtcttgcgggtcttggccttcacttggatccgcaactccctcgggctctatagttacgtgcgaaaattgatttgaattcggttagaattcaaataaaaatccaaataaatccaaatggaagtcgaatgcgaaagtcgattcttttatattaactttactattcacgaactagggcatacccaatttcgatttatacatcctaaactatttttgcgggtataaatattttgttatcataagtttttaatttaatctacccgagtattatatccatataataggttagaaatttctatcgcgagctaaatatcggccggaatccaaaaattatcttataatattatacgatttaatttagtctatgactaaacgattaaatataatatacgtctaaaattcctattaattaaatccgagtacctactgtgaattgatcacctatagagattaccaaaacaatctataattatattaaattttttcaattctacgactataattgatctataattaaattctaattattttaaattttctaacttccctaatctccctctaatttctatttatttatttattttcttttctttttctctcctcttttctttcttttcttttcccttctttcttttctctccctttttcttttctttctttctctcctttttctttctttcttcttttctctctttctctccctcccggcttcttctccctcctctctctctcggctctctggcgacggcgactgagcaaggggaggaggtggccgcttaccgacgatggcggcggcggtgatgacggcgcgacgacggcgcacggcgcggtggcacgaaggcggcggtgcggcggcgcgagggcggcgcgagggcggcggcgcggcggcacgaaggcggtggctcggtggtgagggaagaggggagaaagagggagatggagtgggggaaatggagagggggtgtggagtatttataggggagagggggaagaaagagaggaggaggggtggccggcctgacacgacggcggcgcgggggctcggggcggcgcgcggggctcggggcggcacggggctcggcgcgcggtgatgggacggcgcggcgcggcgcgggactcagcgcacggcgatgggatggcgacggcgacagcggcgcgggctcgaggcggcgatggaacacgcgcggcgatgggatgagcggtgacggggcgcgtgggcgcgcggggtggcgggatggcggcgcggcggctcggggcgcgaggcacgcgcggtaggggagatgggacgggcgcgcggcggggcaggggcgcggggcgtgaggcgacgacgcgacggcgatggcgcgcggcagcaggcggcgatggcgacgtcggcgcggctcggggcggctaggggcaggcgacggaggaggggcagggctacggaaccacatcgagcaccttccgcgcaatgaacagtgctagttttcattttatccttatttaacctattctctatataaatcttattcattaattccaaatttttacgcaaatgaagtttacataacatttgtgttatttcaaccaaaagattcactctagattaacattacccatattttatttttatctaattttcttgaatttaattaattcttatttcatcgtactaaaatttaattattgctaatacggtcgcgataatattttatttatttccaacctcacctaatctttattttaatttatattttaattatttatttagccaatttgatttttagggtttattcctagttagttattcattattcgcgattaataaattccgagatcaaaatccaatgaaattggcgaataaaatcggcatgatacaatttatttaaaaagtttttgaaggtccgtatttttagagttttgcttttactggtcaaattttcagggtgttacaaacgggctgcgccaccgctgcacgccgtcgagccaccgcgcgagcccgacggcccaggtgagcacccccatgatgcggaaccagttcgccttggcgcgatgcacgctccacgtgtgcccgtcgacgtcgagcatgtggcgcaccacctcccgccctagcggcagctcagaccgctccagccacgcggcgatgatgcgcacggcggcagcacagagcgcctccgagctcgccatcgcgtcgggccgtctctctccccctctcccaccgccgccgccactctctgccaccagccgtctcacgcaccgacgcgcctactcgagaaaaggagagaagagaagagaaaaagaaaagaaaggagagatgtggggcctacaccattttctctcacttatatgtgggccccacatatttttttatattttttgctgactggatgccacgtcagtaaaacaaggcgcaaatattgcgatggaacctcctttgaacggtttgagtgagtttaggggtgaacatttctagttttgtggttgagggacctcaaaaaatctcgctgttaagttgagggacctccggtgaacttattcctttgtggattgggtcactgggtagatatcgacctagcctacttcttagaagcggtgaatggtgtggcaacatataacgaccactcgaccagtagggatgggcgtggtagggccaacccgctggactcattgacccatccaacaaaattggcttcaatgggtaaatgggctggcccaaaatagaaaagttggctccaatggttaaggggtccaacacatgctaccttcatcggcctccacaccggggcaacgtatcctatgcacacatctaacctcgtgcactcatgcactcggctgttatatacccatcgatcctgatctaacggatacgatctaggtgactaggtgaggtgtttttttcagaaaagcgcccgcatactccatacaaatttgcagatgaccccttaccttctttactcttctccgtgctcattcctaatcgatccccatccccaaaccttctccctctccatgtggcaggaagtcgacgcgcgcaaaaatcataaagaacaaaattgtattggtcctttttacaaataagttcatttgaacaattcaaattttgaattttcaaaatttgacaacttcgaacaaaaattagggttaataaattatttcaaatggaaaagtcgcccaaaccaaaattgtagaactcatcgagatgaatttttattttggtcatttctccatctgactatgtgaacaatttgaagtttgaaattcaaagtttaagaacttcaaataaagttttttattagtgaacgacttcaactgaaaaagttatcaataaaaaagttgtataatctatctagatctataatttttattttggtcatttattcatccgataaaacgattttaatattgttcacaaattttacatatctcccacatggtttcaaaaattataagacagaagtgtaaattttgtgaacaatattactatcacttactcggatgaagaaatgacaaaaataaaagttatagatattgatgagttatacaactttgttgttgatgactttttcagttgaaatcatttagaatttgaaaatattgtttgaagttttcataatttgaaattcaaattcaaattattgaaacaaagtcatatagcagaatgaccaaaacagaagttgtagatattgatgatttatacaactttgttgttgatgactttttcagttgaaattatttagtatttgaaaatgttatttgaagttgtcataatttaaaattcaaattttatataggtcaatcaaactcagatggagaaataatcaaaataaaattggcagatctcaataagttatacaactttgtttttgataactttttcacataagttcatttagtatgataaaattcaattcgaagttttaatattttgaaattaattgagagaagggaagcaatatagacttctcggctgggctggtggtccgaaaagggaggaggggaaggggaagccggcccgaggagggagagaggggctgcgggctgagggagggagagaataacacttgggccgaaaaaggcccaaggatagaaagagattttaatttgttttccatttattttaataggttaaatgaactttgtgatgtaaaaattagttattgagctccaaaaattctaggaaaatttcagagaataatttagaccatgtagaatattacaaaaatatttccgaccatgatttttaaagtaaaattttagtttcctcattaattcacttgattaaattgctttaactcttaatatatttttctagaaatgcaatatataaatctacgttttctttgtcccccttatgacaaattattattcgtcataatgttccattgaaatactttatgacgatttctagttggtattaacaacgaacatcttttttttttgtcactaagccaccccatctcatacaaatcatcataaaatggaatatgctaataaagaatagctctgatgtcacgaggaatttgtcacagaaggtcatatttcttgtagtggccatcggccatcctcacgtctagggcaggccgcatcactggcgttttggcgcctgtagtgtgttcatataatcatgcaactagctagacattgaactgggcggaactcaagcagcatcagagcacagctgggctataggcaacggtggggtagcgcccaggtcaggccgcagccgctttgatgccgtccttcaccaccggcacggtcgtactgctgcttgctgcgcgcgtggttcatcgccagctatagatcgaatctatgttgtggtggtcgccgcgatggcaagcctcctgctgaccgcattcgatgcactcggagcatttctccattattttcgttaaaaaaaagttctccattcaagtatttgtgctttgtgttaactgattgcaaaattgtccgtgattgcaaaggcactgaaaattgaataacgatttgtgtccatttcttaatttctctcgttagtttgcttgattggacatcacctaccttattcttggcatgacagcctccatgccatgtttttttcctcaggcagtgtgtagttccatgttaaaattaaaagtttgaagaaattggaacgatgtgacataaatgttagaagtttgtgtgtgttgaaaagttcgatgtgacggaaaagttgaaagtttgaagaaaaaagttgaaatctaaacagggcctcaaataggcgctgccgctgcttgcacgtcaggctctacacaccggcgaagagagaccagttagccgcgacaggaaacggtaggcacgtcagtgggggcgattcttccttccgcacggagaagttgaaggtttgggaatggggatcaatctggggagtacagagaagaggaaagaaagcaaacggtcagatgtaaatttgtatagatgatgcgggtggttttctgaaaaaacacgtctgcttagaccgtattcgtctgatcaggatcgaagggcctataacagccgagtgcatgtgtcgaaacatgaattcggcaataataaaagggggtagcgcacgagacctaaaagtggatggatacggagacaaggatttagacaggttcaggccctctcaatgagaggtaataccctactcttgtttggggatttgaatccaccaggtatagtatagatctgacgatctagttgtgtcatgccccctagagggcctcctgcccaccttatataggatggggggcaggattacaagatagaaaccttaaccaatacggtatcggtttcttaaatctactttacaatatcatcaaaccaggacttcaggccgttccgtaatatacaaggaaacataatacccaagtcatgatccattacatattctatagatataaactatcccctatatccagtcggataaccatgccgtgtaggtatggggtacccataatctccacagtagcccctgagaccttcacagtcgaaaagataatcttctctcgaactagattactccaaaaccgagtgcttcaatcatctttgccatgatttcccgagtacttttaccaaatctgaagactgtggagggctgaaaaataaagtcaggtgcatcgactggatacacctaataggtgtagcccccgactatgtggttagctgaacaaactaagcatatagtcaaggaataaataatccaaccaatgagtggttttgataattgtaatcaaccaagtgacttgatatcaatacatagcatatgcgatgtgaatccccaaataacatgatccaagtgatataccaactgctttgtaaaaattgatgcgagcaacctaaacttgactacatcattgaaaatacacatagcaaaacagctataaaaaagcttgaatgatgtgaataaagaaatttccaaagtattgggcatacgccatgcgcacactgctttaacagatgtgcttaagtccctaaaagacacatggtttcaccacacccgaaaatatacggcatatgtggtgtaacatccgagtaaataaactcaaaaaggattcaccaaccgcctggaaaatgaccataatatataatcagcctaagccataatattggtcaataaaagtgcacacttgtggcaagaaaacaacgatattgtatccaatcaattgcttaaaaaccccaaacaacaccttgacttctataaaaaagtcagcggggcagctatataaagctttactgtttgacaccttttaagatgcattgtaccaactcctaaaaagttgagtaactgcggtataaaaggattttaaggtattgggcacttgatcacgcgcacttttgcctaagaaaaaatatgcctaagtccctaaaagaacgtggcaggccacacctaaaaatatgggctgcagacatattaggcctaggctaaaaaatataccttcgacaccctttaaaggatgacgcatgtaacatgctcccgagtaataaatcttccgggtgatatagaccaagtgtagttcatattaatagcttctgatctgagtgattgtccctcatgggatactccaaaatagatataaaaattgaatcccgactggcgcaagtattcggttgataacccttacggggaataatgattggtccaatcgttgagcataagagatcgactcatgaccatgaatccatgttaaatgtatccggaacaagtccaaattgaagatataatcctcgcgcttgagttgatgagcccctgagcatatagcttgtcattctgtcgtagtcaaaattgtacattggctatagctgatgcagtcgacataatggccagatgactaacatggagatgatatcacccatcaaagctgacgaagatgttggtggtggtaaaaacaatgacaccaatcaaaggtgatgaagtcacatagccatggaggcgaggaaaccagtcagcggcaggcagatcaactaacaatgaagatgaaggcacccagcaatagcgacagagttttgtagccatggtgacgaaataatcagtcggagacagacgagacagctggtgaagaagacgaagacgcccatcagtaaaggcataataagccagccatgaaagcgaagacaccatgggcggcggcggaggcaagccggtggtgaaaacatagactctcttcaatggcaatggcaaaatccatcaatcatgaagatgaagaaaatagtcggcgacggcaaacgcaatcgactgtaatgacaattagcagcaacagacatgatcgactatgatgacgaagttgcccatcgatagcagtagattaggctatgttgaagaggcttgacaggatgttgatgaagatgacgatgtcggcgatccagtcaatagcggtgtagcagccgatgataatgatgaagacgatcatcagcgtttgcgtagtaggtcaaccatgaaggtgaaataataagtaggcgatgacataatcatccattagcaacaacggggatgtcaaggccgatgaagcaaaggtgctggtgatgatgtcagtgacaataatccatcaaactgttgagaagatatcaaagctcgagtagtttccttgatgcgagcatgtgcataaagaagattaatgcaacgcttcttgatttacgaagatgactgcagaacttagtgttataactgttgtagatgcttcacttggaggaaagtagatgctgttgtccaactcgtctaaactgagctgattggttgataactctgaactcccggacatgtaaattaaatctcaaacttgatacttgagaaatttgaagtagatcgtggcgatgatgtagaagccaaaattgttggtgaaataattagagttgatgaagtagaaagcttgctcggaagcgaagacgaagataatgactcattggctggttaattgattgcttcatgttgacataacatctgtcgtattttgagtcttgtatttgtgtagcccccgactctttggttagttcggaaacaactgaacatagagtcgagaactgtagcttgtcgtcatcgagtagccatcacttgagtgaagatacatgttgaagatgtccgagtagaattcttgaaaattggagaaccacttgtagtagattagcatgacgtcaaatttcgcgacgcgtgccgagatgtcgaggcccatgtagacgtcgtggttggtgaagtagcaaaacttgcaaagtagcggcaatagagtttgccaatgctgaagataataaaggtgaagtcgctccactatgatgaaaaagttgcattgccgtgatgaagtgaacacgagtcggcagcaacagaagcaaaccggtagcgaaaacgcgcaattgtgaagataaaagctccagtcggcggtggcataaccagtcggcaacagaagacgatgatgtccatcagtagtggtagcggtataaaccagacgtagaggcgagggcactagtcaacagcagacgagacgatcggcggtgaagacgataaggccaacaactagtggcagaatcatgcagccaaggaagtgaagaaaccagtcggcagcagacgtagacaaattgagttgaaggtgataacgcctattagcggtggcggcgacgtggccggctgtgaagacgatatcaccagttggcgtcatacaaggcggcgagccggtcggtgaagacatagacgcccaacaacggtggtgtgaccaaccaaccatataggcgagggcaccagtcggaggcggtgaaggcagccggtggcggcgaaggcaaccggtcggtgaagacgtagacgcccaacaacggcggcataataggctagccgtgcaggcggagacaccagtcggcggcggcgaaggctagccggtcggtgaagacgaggatgcgcaacaacggcggcataataggccagccgtgcaagcggagacaccagtcggcggcggcgaaggcgagccggtcggtgaagacatagatgcccaacaacggcggcataataggccagccgtgcaggtggagacacaagtcggcggcggcgaaggcgagccggtcggtgaagacgtagacgcccaacaacggtggtgtgaccaaccaaccgtataggcgagggcaccagtcggtggtagcgaaggcagccggtcggtgaagacgtagatgcccaacaacggtggcataacaggctagccttgtaggcagatacaccagtcggcggcgacgaagacaagccggcggtgagaatgtagaagcccaacaacggtgctgtaaccaaccaaccgtgtaggcggagataccagtcggcggcgacaaaggcagaccagtggtgaagatgtagacgcccaacaacggtggtgtgaccaaccaaccatgcagtcgaggacactaatctgcggcggcatcgtccgacgtgttctatggaaaccacggcgaatttggcggtggctccaccagtacatgcgaagagacaaaaataatctctaattagtatcaagaaaattaagaaaattaatgatgtggatgtatatttgcatatatgcagcacgcatatgttatttcactggccgattgatctcctgtagcatgaacattagacgcatccatattccacacaagcagatcattggaccaatctcctgccatgcgtgcgtataggtcacaggtccgagtccggaacgaatccaagtcagagagaatcagactcgggaaacgtggtgcatgcaaaataataaatcacagatcgaactgagattgagattagtagtagaaacaaataaaaagtgcagatgattatggatattaatcgatgcatgtatgtatgcatgctgtctgccttcttgcttctttatatgctgtgaaaccatcaggagcctgcggcaattggagtatttcacgtgtggattccactgtgtgtctcctatacatagccgacggcttgcttgatagtcttgcagcacgatgagtcgtgcagaggcggtcggcagatctcatcgacctccagtgcatgtatgcgaatatgatattggagggtaaatcaatatatgattagaaatcaatctaatataaaatattgaaacgacaaaccagggatcgattagaatcatagttctaattgagattgtcctcgaccaaaaaagatgtcggcgattcctgagattgtttctattgcacttgttgacggaaaactcgacgataccctacctggcgcgccaactgtcgaaacatgaattcggcaataataaaagggggtagcgcacgagacctaaaagtagatggatgcggagacaaggatttagacaggttcaggccctctcaatgagaggtaataccctactcctgtttagggatttgaatccgccgggtgtagtatagatctgacgatctagttgtgtcatgccccctagagggcctcgtgcccaccttatataggatggggggcaggattacaagatagaaatcttaaccaatacggtatcggtttcttaaatctactttacaatatcatcaaaccaggactttaggccgttccgtaatatacaaggaaacgtaatacccaagtcataatccgttacatattccatagacaaaaactatcccctatatcctatcggataaccattccgtgtgggtattgggtatccataatctctacagcatgagtgcaggaggtttggtgtatgcataggatatgttgtcccacaccggcagcacctcatgcatcctctcagctcctccctcaacttatgcacagagatttgactaggaagtcgacactggcggtgatcttggtaggtagatgtctaaccgtagacatcttattttgttacaagcactgctacacgtattaaatttttcttaataaatttgtactaataatcgtctcaaccgtttgatcaaggaagcagttgttcaatttgaagagttgagaccacctgatgtttctgaaaaatcatgtgcagtactactgaaaatgatttacattcgttctgaacctttgaagctattgctgctcgctacgactatcaggacagttctgtttgatgattcatttttgtgagttttgaagctattgtagttgttatgtgccactgatgtatctggtggcataaaaaaagtcatctcaatgtgttgccgttaacagcgagtaattaattgtcttcaaacatgaaatcaacaggtttttctttagttaagtgactttcattttttagataatggattttcattaatccggcctctatatccacgaaggatatacaccgccaaaaggatacaagagtacttagactcacatctcaacaaggaggagacacacaaccaaaaaagaaaagaaaaccaaacgacctcagcacatcctacttctctgcctcccgccatattctcctgaaacagccagatttgatgagtggaagtctactggtcgctgccgccgctagtgcgccattgatgcaaatctccatttgtgccatcttcatcagtttcaggtaagctaacgtcatgcaccgcttataagcccactctaaaccgtcgtcattcgtggtatagtcggaactagccaactagacacaaaccgacgggatcggcttctacttcaccggattcctaggcatctactatctaaagtgctcagaccgccaccgtctcgagccaccgcaacccctagtgccgcctgcgtcgacgggggccgccgtagcccatagtgccaccggcgccgccggaagccgccgtcgtcctctgtcgcagcccctagggctgccggcgccgatgagagccgccgcagcccctagggccaccaacgccaacgggagccgccgccatcctctgccgcaacctctagggccgccggcgccgacgggagccgccgccgtcctccgccgcatcctctagggcaaccaacgccgacgggaaccgccgccgccgcagtgccgacaggagccgccgacgtcctctgccgtagccctaaggccgcctccaccgatgggagccgtcgggccgccgccaacctccgccgtcctccgccgcccccaccgccgtccaaagagactccgtcaccgatgccttgccacctccccgccgccgccgtcctagccgccggtcagctctcgcgacaggctagatctgggagctggggggagaggaagtgactttcatttggtctgatatgttttgtgttttccaaaatcaaaactctagcagaatttgatcttccttctaatgggtcgacctgcgctacccaataagatctagtgtgatgacccgttggcactgttgcagcctaggctggttgcatgggatgagtccggatcaccccgccacggaccacgcccatttatccctaacgactagtggtctggttcggccaatggcttggtgtgccaaggatgaagagagtgattggtggcacagtagtataactttgaacacaatgctgtatggtgatcgggagacaaccatagttatgttattgagaccggaccggtaatcaaaccggtgaggctcttggttcaatggttcactggttcaaccgcgtgaataggtggtctaacccggttcaatacttatcaaatatattaatcattctattaaaacacaagtggcaaggtggcctggttgttgagagagttaactctctcccatgcgtcctgggttcgaattccacccaaggacattttttccacacctacacgcacgcttccccttcgtatcccacgcaaccggttcaagcttaattgtgttgtactttcttcattctaaaatataagagaatttgggtggtaatttaggtgggtatgagctgtccagattcatgattctaggatatgttatatccacctaaaattttttatattttgagatggagggagtactaaagtgggactttgggtttgcctttaacattaatttatatatccacttatgttggtcttgacgagctttgtttgtaatggactgtgttgcatagctttgctctataatttcatggtttgatagggacccacaggtacaattgttcctataacctcatccattagcccgaagaatgaaaaattggcgctacccctagacctgtattgtgaagtcctcacaccttgggtgaaaattaccactctatgtatccaaattgtagctaaggcgaactgttattttcaaccaaaaataaatggcaagattatttactacttccttcgttttatagtataactaaaaatatattagtattttcaatacaaaataaacatattatcaaaatatattcaatgctaaatttaatgaaactaatttggtgttatagatgttacaatttttttctagagtaaattacattggtggtacacaaacttattaggtggctgtaatttaatacatgaacttgtaaaatgctcgttttgatacatgaacttatctaatccgtacgaactaggcccaaaatggcttggcaaggttaattttacctagctgatgttaattagaatgtggcatgcatacgtacagtgagtatgcataaaacatgctatatttataaatttgttctctactttatcttgaattttgtatgtttctaacccatgtatcattgctcgatattttgtatctttctctacaatcaccatatatctttctatctttttattgaacaagtttatgtctaagtagtaacattctcatatatatgtttaagtagcaaccttctcatatatatatgtttacgtagtattctaatcagcacctaaattaacaaaattagtcatgtaatgtccttttgaccttagttcgcacgtaaaagattagttcatctactaaaatgagcattttataagttcatacactagattgcacctacctgacaagtttacgtaccgccaatgcaatttactcttttttctataaggtaggtcaaacataaaaaggttaaacaacttattaatatgaagcggagggagcatttccctctatgtagaaaaaaaattcttggagtatccaaaagttttcatatgtgaaaaattgtgtctgctgaactattgagtacaactgacaactacatctgaccaaccaactactctagcctctctgtagtcctttggcccccctccttgtcatccaacttccatgcccccactatttctttagcgatccgtgaatgcgtgatccatgacgttttggcgtgaaacacgacctcatcctggaaaatcctccggttcattttccaccaaatttccaaattgataacgaatgaagattgatctggctcca

SEQ ID NO: 23533 - DNA, 7027 bp, Oryza sativa
ctgaaacgattgacttacaagccgtaataggttattagtaaaaaatattttgcaaataaaacttttacatgtgtattcttagcaatttaaaagtaaatacagaaaaataaaattacaataaaaacctatgaaacaacacataattaagtttttaaaattaaatcttagttacgtttataagctgaagggtaaacgatgagactgatacctcggtttatattaacttgatcattccaaagactcaatgatcaatagcacaagcagagtttatattaacctgatcatttgaaagaacttaatgatcaatagcacaagcatgcaaaaagttgcattgttgcaacaaatataattcatgcgtgtcggtattgggcaggtaactaaatgaagtcaagagaatgaccgggtagatgatactcccaccgttctaaaatataggacacaactgctttttaaagtggtttcataatataagagtaagtttaatagcatagccaactgctaactcaaattcatctatagctaacctaatagctcatttatacaatagttacatactacaatatcaatatctggtcccatttatcatacacacagtgtgtcttggagtccgtgctacaactggctacaaatctgtagcccgctgctcttctctcttcttatttatctccttaaaatatgtttgcagctggtttatagcatgctattgtacatgctctaaggcgtgtatgcatgcatgcaattaattagcacgttctctcccctaaatcattattattttaaatcctatactcgtaagattttcaattctattggttgcatgtattgtattaattggagtgattcatgacaacgatgagatattaattatttcttggtctttgggttaaaggtggttgtgccttaggtcattcccaacctaagacactagatatagtttccataaactccacgtcatcaagaaactagtactagacactactcttctaatgcaaacaccactattccatacttaaatttaatgtcacttatctcacatgatgtcctggatgttgtgtagaaaccatgtctcatgcaagacatgatttccttctctttcctcatttattcgtttgccacattatttttcatcctatgtggtagcttatttaatgctatggacattatcctagtcattgggttaggaatggtcttagagcaggtacaatagcaggctattagccagctgtaaacatattttaataagataaaggatgagagagaaaatcagcgggctacagatctgtagctagctgcaacgcggactccaagacgcagtgtgtttatgacaggtgggaccatatattaatagaatagtaagcaactatcgtatgaattgactattagattagttatagataaattggagttagtagtgggctgtactattaaacttgctcttatactctagatatgtaccaaaagaaaattccacatttaagggacgtgggccacgtggcaatataaacaaattgaagcgacctaattaattaatgcgtgctcatcaactcatgtgcgcatgggcagctggtaagctcgagcgacgaaaatgccaatatccaccagctgccacacactggtggagaaaccatctttcgtcggtcggccgaattccacaatagtcccggatacaataaaaaccgggactaaagatcggttaaaaagggtaacgggcatatttgataaccgggactaaagatcatctttaatcccggttcaaatgctgtcaaggcctgtcaggcccccccaggatctttagtcccggttggtaacaccaaccgggactaaagatcataacttagtcccggttggtaagaccaaccgggactatagatctcggggatctttaagccccggttggtaacaccaaccgggactaaagtcccacccctatatatatgtcttcttcctcctccagctgcccgagcaagctccaaaatttcttcaaaaaagaggggaggtcataccaaaatttccagtgaatttattttggtgattacatacaaatcggaggtgcctaaaaggtttgcaacttcatcctccaatgttttttttgtcatattacatttgcagctatgttttgcacacttttttgtctccaaaatttagttgtaagttgatgagggagaaaatttgtgtggggaagaaagaatatatagaaatttagttgatttgctaaagaaggttttataaaatagttgagaaggaaaactatagtgaaagttaatcttgaatactagaaaacaaactaaaatgaaaattaaaagaagtaaaacacattaaaattagtttaaaactttagaaatagtaaataagaattatttggtgtaatattttatgatttttgtatgaataaagatatgtcattattgtatgactgttgaaacagtttgtaattatcttataattattgtatgactgtcattattgtaagaataattatttttatactattttttttcgactcatgtagatggatcggcaatggatgtacgctgaccggcggtccaaagagtttattgacggcgtgcactattttttgagagtggccgaagctaacaggcaaagggggttttatttgttgtccatgcaataagtgtaagaatcagaaggagtattctgcatctaggactattcatttccacttgtttaagtcggggttcatgccaagctataactgttggacatcccacggagagcaaggtgttgaaatggaagaagatgaagtggaagacgacaatattccggacttttctcagtacgttggatttgaaggaaatcaaacgggcgaggaggaaagggatgctgatgttaacgatgttgcggatgatcttggtcagattttgcaggacgccaaagagaactgcgaaagtgaaaaggggacccataaattagacaagatgttagaggaccatagaacttcgttgttcccaggttgcgagcaggggtacaaaaagttggataccactctggagttcttgcaatggaaggcaaaaaatggggttagtgacaaggcatttggcgatttattgaaactcgtcaagaacattcttccggagggaaacaaattgcccgagacaacgtacgagactaggaagatagtctgcccgctaggactggaagttcagaagattcacgcatgtccgaatgattgtatcctgtatcgcggtgaggagtatgagaacctagaagcatgccctgtttgcaaagcactacgatacaagattagacgagacgatccaggagaagttgacgggcagctaacaaagaagagaattcctgctaaggtgatgtggtatttccctataataccacgggtaaggtgtttgttcaggaacaaggggaatgctagaatgatgtgatggcatgctgaagagcgtcaacaggacgggatgctgagacaccccgccgatggttcgcagtggcgaaacatcgacagaaaatttaaagaatttggaaaggacgcacgaaacatacagtttggtttgagtacggatagcatgaatccttttggagagatgagcagcggccatagcacttggcccgttacgatgtgtatctacaacctccccccctggctatgcatgaagaggaagtacataatgatgccgattattattcaaggccccaagcaacctggtaacgacatcgatgtgtacctaagaccactggtcgaagatcttaagctgttgtggaagatggaaggtgtccccgtgtgggacgaggacaaacaggagtagtttaacaacgagcgctgctgttcgtaaccatcaacgattggcctgcacttagcaacctatccggacagtccaacaaggggtacaaggcttgcacttactgtatggatgaaacaaaaagtacgtatcttaagcactgtaggaaggttgtatacatgggtcatcgtcgattccttgcagcaaaccacccaatacggaagaaaggcaagcactttgaacataaggctgaccaccgtatgaagcctaaacatcgcaacgggaaaacagtgtttgctatggttaaagatcttaatgtagtgttcggaaaggggcctggaagccagcctatagagagcgaagatggtcacgcagcgatgcggaaaaagaactctatattttgggagttaccctattgggaattcttggacgtacgccacgcaatcgacgtgatgcacctcactaagaacctttgcgtaaaccttcttggcttcctaggtgtatacggaaagtcgaaagatacactggaagcacgtaatgatctgaagcatatggaacaacacggcgaccttcacccggaaccaaaggagaaaggaagccattacttgagtccagccagctacactcttagtaaggcagagaaggaaagtatgtttgaatgcttggagagcataaaggtactgtctggatactccatgaatatcaagcgaataataagcacaaagggagaagaagttcacaaacctaaagtctcatgactgtcaagtgttgatgacacaactgctaccagttgtaataaggggtatccttccagacaatgtccaggcaacaataacaaagctatgtgcattcatgaacgcaatttcgcagaaggtcatcgatccggatagattagaagcccttcagaatgatgtggtgcaatgtctcgtcagttttgagttgatatttccaccttcatttttcaatataatgacgcatctgctttgtcaccttgtgaaagagatcagtattctcgggcctgttgtcacgcccagaaatttagcccaaatttccagactattttgtgtattaaatccctgtccaggaccagccagggtacacaaaacgacaagtaataaacagttccaaacgtaaataaagcgtaaaatacttacagaagaggcacttagtcctcacaccgaaacaaaagcagcagcagcggaaaaaggcgatcctagcggggcttcagctccactccacaggcaaaactcaactggggtctgagccttggtcctctaactccatcttcagctcagaagcactacacttctgaaaagggggaataatagcaagactgagtacaaccaccgtactcagcaagccacaccaacgatgcggacgtgcaaggggatacaaggaggggtttgtggctatttgcatcaaggcggttgtaaaacattttattgagcaaaacagtaaaactgttgagtaattaaagtaacattaaatctccactgatcaacgctacaccacgttgaacaggcccaaccaacccacctggactacagtgcattgggtcgatttattaggtgtgagactaatcacggtgaatctggtcgatcgcccataaccgcgggcacggctattcgaatagttttactctggccagaggtgcacaactgtacccacaagacacaacccaccgacatgtcaccgcgtcatcatgtgcccatgatgcacacgtcaccatgtcgagtgattgtgacgagacccttcgcataaccctcccctaaccatccacaccacactaaggtttcacccccacccctcaaaaggcagtgggcggtcccctcttgcgccgcggtgaatccggcaactggacaaccggacaccccggccgacccaactccatcacgcccaccctcgccaccggtgcctaggaaagggtcgagctatacttcagatcaagcagttacccactcccgcttgtggcaagcgctgtaagtcttccagggtttcccgtgaaccggtccttaattgctatcggtgcgactcgcaaaaccatgcacccacagcccaccattcagtcgcattttagttggataattacgaccataaaacatggccagatgtctcgagcacgcggctcaacaagatactagaatgtctaaaactgcaattatcccatcgactgagctagtggtaattaagcatggctaagcatatagttctagctaggtcatcaaagtaacaccagctaggcgatttattacccacggctgacaaaggacagatatcaagtaaacatggcacaagcgagcagataggtaaaccctgatcccgtgtaattagcaaaacatgcatatttatttgcaaacggtaaaacatttataaattgggaacaacatgctcaaggggaatgtgtgacttgccttgcttcttcactttgatcttccgaactcttttcctcgcgaccgcggacttccgaaacgacggattctacacgctggcacgcaaaatgaggaaaaactctaataaaaaccaaggaaacagtatataaaaactaaacaaacatgtagagctcaattttagatgaattttgcaagttgaatggctcaattcggagtccgaatgaattagatatgaattttagaagttttgagccatttaaataaatttctataattaaactcgatttattgcgcaattattatttatttttacaaaggaaatggacctcgctgacgtcatcaagggggaggggcggcgccggcaagtgggcccaccggtcagcggcacaagggcgccggtccaccatggaccgggaccaccgaggcggtccaccgccggtccacgggaaccgacggcccggatcggcccaaagccgatcggacggccacgaggcggcgcggctagggcacgggcacggcacagccggcctggtcgagcgatagcgcgcggcggcgtgcagccagacgaccgccggcgacagcggcgtgtcgcggcagcgggcacggggagcggcggaggaggaaaaaaaaggagaagggacggtggggattctcaccgaggacggcgacggcgagacgaccacagggaggcggctggcggcggaaaggatggcggcgactggcacgagaggcggcgggaacggcattccggcgacacccgaccatggcggagacgcggccgagggccggcggggccctcgagatgacgaagccggaggaggtggcggcacaagtcggcgtcgaccggagaggcggcgtgacgcggctggactcggcggtggcggcgga

SEQ ID NO: 23534 - DNA, 5746 bp, Oryza sativa
aggaaaaacagacttgcgccaaaaggggaggcaagccgggccgcgggaggggaaggagagaggattttgggccgagcccgaaagggaggaaggggaagtttattttgttttctttttatttaaattagtttaatgaactttgtgactttaaaattatttcttgaactccgaaaattcacggaaaaatccggagagtattttagggcacaaagaatattgcaaaatattcccggccaatgatttttaattctcccattatttcacttgattaaattgatttaacttttatttaatttctagaaaatgcattatttaatgatttttaatcccgaacgaaaatcggggcgttacacctgtgtacctacacaacatgtttcctttcgagaggtacatgggcgttctgaagaagtatgttcgtaaccgtgctcgtccagaggcaagcatcgccaagggttatggagcagaggaggtcatcgaattttgcgtagaatttatcgaagatcttcgcccaatcggggtacctgaatcacgccatgaagggagactacggggaaagggaactcttggaacgaaagcaataatgacggtagacaacaatttattccgtaaagcccatttcacagttctgcaacaatcttcattggtagctccttacatcgaggagcacttggctctagttcgcgccaggaatatcggtaagtccgatgcatggattacacggcatcacattgatactttccccgcgtggctacgacaacatctcatgggtaacgagtcgatcaaccaacaacttgccttcctggcgagtggaccgtctgggtcgattgcgacatttcagggatatgagatcaatgggtacacattctacacgagagcccaagacatgaagagcacgaaccaaaacagcgttgttcgtgtcgatgccatgggacacgatggaacaactggcacgtattacggtgccatcgaggacatatgggaacttaactatggtcctctcaaggtccctctgttccggtgccaatgggttaggttgactagtggaggcgtaatgattgatgacagtgggatgactacggttgaccttaacaaggttggatactcggacgaaccttttgtccttgccaacgatgtaacgcaagtctctttcgtgaaggacatgtctagcaaaggaacgaagggcagagggcctgacgagcctaagcgtcatgtggttctcccaggcaaaagaaaaatcgtcggagttgaggacaagactgacgaggattacgatcagttggatgggcaaccccctttcacggtgacgattgaccctagcatcctcctatcaaatgaagacaccccttactcacgtagcgatcacaaggagggaacaatagtgaggagaaagtacgtgcggtcaaccatcaccgctgtcacatccggattttcgtttcaggatttataaattatctaataaattattaatagaatttatattaaatgttctttaatttacaagtgaagttaaatgtgagaaataaaaatttcctaaatttaaagcatggatggatttaattttcattaaattctccatgattaattatactctctgcaattttctcggatttttcggagctcaattcctaaatgatacaaagaacagttcagtaattatttaatcattaatgatctaattataattatgttaagtgcttttcttgtttaaaaatccttaatttataaattgttgtctaaaagggaattattagaaatgatcttaaaagcctagaagagaagatctaattttaattaataaatcccaatataaaatggggccagataaaatttcattaagtactttgcttaattctataattcctagatttttctgggatttatttgagctaaggaagtatttttaataaacagaattgaatttcatgaataatttaaattgaaaaaggtttttaaaaatcctcttttggctttgggccgaaagtcggcccaaaaccctctctctctcctccccggcccaagccggcctgcaaccgagccgccgctctcctctctcccgctgacaggtgggccccacctgtcagggtcgtcgtcaacctcgcgccggccgccgccagaaccctagcgccgcgccgccgtcgtctccttccaaattcggccgcgtctttccgtctccggccgaatcgatagaggggaaatgatccccgcaatccactctatcttttcccttttggaatcgtcggctaatttcgtttggaaatcgccggatttgagatcgaatcggattcgattttcttccccgaaccctagactttccttcgccgtcgccggtcgccgtgggccttcgccgccgccttccaacccctatataaggacccccaagcccgccgctacccgtcgccaccctcgccttagtctctcgcaaccgatcgagctctagcgccgtgccgcctcgcgccgccgttgtcgccgccgctccagccgtgcgccgccgtcgctccagtcgtcgccgtcgctcggggaggtcgccatcgtggtcgcccctccgccgttgctgtcgaccgccagaacaccgccgtcgtcgtcaagccgaaggtcgccgccgcttcttcctcgacgccgtcgccgtccgttgatcttccgtcgccgctttggtcaccggtgagttcaccgtgccgtccgctacccgtaggtgccctccgttcgcgctgtcgtgccgtcgttcgccggcgagcatgtgctgcccgagccgtcgccggtgatgacgtcatcgccgacgtcatcgtcgccgtgtctcgtggaccaccgtggtctggatcgatcttggccgtccgttttggatagggtcgatctcggccgttcgtttctgtgagccgccgccgtgcacccggtccaccgtgaacccgagccgctgacgcaataatcctcttttccttttcaaaaataattcattattgcgtcataattcaattaaaatctaaataattgatttaatctgatttaatctttgaaaattcataactaattcatcttagctcggatttagttggttcaagtctctaaatttttctaaaattgagatctacatgttaaaaatatccacatgtactgtttatgcttgtttttgtactgtttatttggtttttattagtctttttcttcgttttgcgtgttagcttgtcgtttccgttgttgcgaaggttcgtgagtgcgccggaagtattcaagaagattaattgaagaccgattattgcaaggcaagtcacacagatcctaaacacaatcctttgagcatgttgatcctatatttaaattctctatttatttcaactgtgcatttattttcgaatgtcactgggtggggtgaatctattcctttgttatagcctgtttgcattgattactttattccttgataccttgggttatcataacttgactagttgagctttatatattggttcagctagatattagatatgattgcttagccatgcttagaaacattagcacactattgggataacttatgattcaatattgtttaatgatggcttaatgatagttcacgatggtcaatcgtgattggttaattaattaaattgccaactaaaacttgacaatggtgggttgtgagcacatggttttgagagtcgtgctcatgacaattaaggaccggttcacgattttcggttgtgaaacattaaccgtgccaaccacaagccagcgtgggcaacagctttaccttttgtatagcatggttcattgcggagcaccggactgagaagtggcggagataagcccacgggggtcgctggggagtccatgccttatttataagggggtgactatgatcaaggaacggtgcactgtggtggattgtgttgtgcgaggggtaatgtcacagctcctttccgaggtaccgtggtggtattgaggcgcatggtgacatgttgtggggctgtgtcttgtgggtacagtggtacacctctggccagagtaaaactattcgaatagccgtgcccgcggtcatgggcgggtctaacaatgtctttcgtgattagtctcacacttctcaccataataaatgatgatataattggtaataatttgtttagctcctggtttggagatagatctgtgcagccgggtatggttgttcaggatggttgggcctgtgcagcatgggtgtactgttcagtgttgattaatattgatgattaattactctattgttttataattctcaaatgtttgctaaatgctgcttttgcaaatgagccctatattatgccatcctttggtatccatgtgcacttgcatatttgctgtgtggcttgctgagtatgtcatatgctcaccttgcaataatcaatcaaacctcagttgaagacaagttgcgaaggagaagacgtttggcttataccccagttgagctgcctgtgggagtggagccgaagcttcgctagaccgtaattccactgctgttttcttttcttttgtaagtatgtaacgttattattatgatggatttgaatattaaattgtcagtttgtgtacctcggctgattcctggacgaggattttatgcacaaataagttcgaaaattactagtgaatttccgggcgtgacaaccgccgatgtattgccgcaattattgtgtacacgatgtaaactattttggatgtattgattatccatataaatcaattgatgtatggcatatgttaattacgcacgattattagaggttttaacaactttaaatcatgtatatgctagttatatgcgatacttacaatttttaaaagttttaaatcacgtaggtggcaatttcatatgttaattagagtttttaacatttaatttactatcattcatatgctaattataattgactagagaatttttaaaagtttcaaatcatgcatgtggcatttacatatgttaattagagtttttcacaatttaatttactatcattcatatgctaattatatatgactattcgaatttttaaaatttttaaatcatgcatgtggcatttacatatgttaattagagtttttaacaattaatttaatataattccaatgctaagtatatatgatgattacaatttttattaattttaaatcatgccgtatgtatatacatatgttaattagagtttttaccaatttaataatatcattcatatgctaagtatatatgattattagaatttttattaattttaaatcatatatttgcttattacgttttatccacttaatttattacagacaacaataatttttcgaagtaattgtcattaatctttgtactttaaataattgtaatgcattatcttctattttagaaacacatatgcaatggaaaataatattcagtgcgcttatcagtagtcccggttcttaaccctaaccgggtttaaaaagaatttgaaaatagcgggaaaagatctttagtcccggttgttctcatcaaccgggactaaagatctacgggtatatatattcccgatgcgtgccctcgtcttctccaccaacacttagaagtttttgcccgatcgatctctctcggtttctccttcgccgccactgcctagggcatccccgcgccgacgccgccgccgtatctcgccgtcgtctcgcgctcgtcgtcgtcgccggcggctccaccacctccgtcgccgccgcatctctggggtgagagccgccgccgcctccctctcgatctctctct

SEQ ID NO: 23535 - DNA, 2525 bp, Oryza sativa
ttgtaattagacttagcatgtaagattatgtagggttctaatatacgacagttacacttagcatacatggctattttagtcttagcatataatattatttgagttttaatataagattattatatttgtaattagacagtatataattattgactagctagggtcctataatatacgtcacctagatttagcatatatcatcactatttgagttttagtataagattattagatttgtaattagacttagcatgtaagattgtgtagagttctaatatatgacagttacacttagcatacatgactattttagtcttagcatataagattatttgagttttaatataagattattatatttgtaattagacttagtatataattattgactagctagggtcctataatatacgtcacctagtcttagcatatatcatcactatttgagttttagtataagattattagatttgtaattagacttagcttctaagattgtgtagggttctaatatacgacagttacacttagcatacatgactgttcgtttagtcttagcatataagattatttgagttttaatataagattgttaaaacataaatgtctcatgacttagcaaatgtttcctgtatgaacagatggctgatcgtgatgaggaaaagatattgtacgatacaatcgcggagggaagcagccagtactggaacgaagaagaggggaacgaggatccaaaccagtatttgaacgaggaagggaacgtggagagggatgcggaggagaaccaggaggggcacgtggaaagggatgtggaggggaaccaggaggaggaggctagtggaagtcaaccctccgttggacagaagagggcacgcgggcaacgaggtgccaagaagaagcttgagggtcggcacatcataacggaattgagaaaatggacgacctagtgccccggcagaagccgccaagaactatgtacgtcacagcggttgggttgtgcgggataacgtgcctgtcagtacggtgtactggcgaagaacaagggcacgcggagatcatgaaagctttgtcccagattcgaagaaagagatgctgtggaccacaatgctcgagacattcacccttcccgcgggtacagaggacaaagtgaaaaggtggactctgaagacaatggcagaaatatatcctgaagggcaagacacagaacttcgacacattcccaaagctaagggatctctgggacgagttcgttgcatataagacaggtgtacaagggcaggcgatgatggaaagaatcaaagaacatgccgccaagaagaagtaccatcaccacttggggtcaggcggctatagcgtcgcgatgccgaagtgggaggagatggaggctagcttgcttgagaggggtatcgaaccggccaccgctaattggctggaacgatcgaagttcttgtactatgctcatggtggaacgctcaacccagctgatggctcactggtcttcggtgatcagatcgagaggctgcgcgtcgactaacagacgcagtggaagcctcttctcagggcacgttccgaccggacagagagagggacgagctgtcactcgccctgcagactctagagcatccaggacgaacacaagggaaaggggtgattccttggaagattgggttcaaggaggacatccacacgtacaggagtcggatgaggcgcaagagagataccaaggcgaaaattgcagatctagagttcagggtatcgagctacgagcgcagcatgcaaaaggaggtgacaaggaaggttgatgaacgcatggccgcacatcggtcccatgatccccagccgaccattcctcctgcaatggtgagcccatcaggaaaccgtagcagctgcgcctcaacggggcaagtaggatcatagagcatggacgccatgcaaacccaggacgaatccacctgccccgttgatgacatcactcaacggacaccatgtgagctgcatattcctttcaagaacttatcaataaaggtaagctcgtagtttatatattttagatttgcctattccgctagttgctgcttatatatgttgattactaataaataatctctcaccacatgaaggtggcgtcgggcatggccatcccaatggacccttcaggtacttaccactgcaggccgattccagcaggatactccaaggtcgaagttgagttggtcgaaggcgcgtacgaggacctcgagctggattaccctggaggagacggtgagacgcatctacgagacacaagccatgccattattctatggcgcaggcagtacatcatcctccctgggcgacaagcggcgtctcgtgcaccatctcctccggctccgccatctcctcctcaggatcctgcactgtctcctcctcatgctctagcaccgtctctacctcaggctcctgcaccgactcctcctcagactcctgcactgactcctcctcgggctcctacaccgactcctccacaagctcctcttccggcacct

SEQ ID NO: 23536 - DNA, 24702 bp, Oryza sativa
tacatatacactcctccgcgtcgcaccaccacatccacaaccagttgcgccacaggcgcgcgagccaccaccgcaggcgagagattgtcgtcgtcgtcgtccgttgctccggccgtgacgacgacggcgtcatggcgtccacggatccgctgctcggcggcaaggaggaggaggagggtggaggtgaggtgaggagggcgcggcggtggtgggtggggcgggtggtgaacacggaggaggcgtgggcgcagacgcggttcgcggtgccgatggtgctcaccaacatgtcctactacgccatcccgctggtgtccgtcatgttctccggccacctcggcgacgtccacctcgccggcgccacgctcggcaactcgtgggccaccgtcaccggctacgccttcgtcgtacgtacccctctctctctctctctctctctctctctcaaccacacactacgctgccctgcactagtagtatatgcgcgcgcgtccaccggcggatccgccgcccacgccgccggcgatccacacgcccacatgcgcgcgcgaccatgcatcatcgtcctcacctccacacgcgcatcgataactccattaactatacgcataataaattattaatgctactttcatccgataagaattttgaagcaagcatgggtattaaaaataggtagaaataataaaaggaaggttgtgattgctaaagaggagaaaataggtgaagagaatggttttgattgattcacaggagatggccggtggaaaaatagctttattttaaaataaattattgtgcaaaaaaataactatattttaaaacggaggtagtatatatatatatatatatgtatgtatatatatatatatatatatatatacatacatacatatatatatatatagtactatcggatcaccgtgcacaatttacataaagaacgtcctgaacatttcgccaacgcgtcgcgctgcctacgtgtttctttcccagcgaatgccgtgccgttccattgccgtttttatctgtggcgatgatcatcatatgcactactagtatattgcagttgtagcattggcatatgaattataacaaagtaagatctacgtataagtgactcaactactcacttacaagcgactcaactacagctgtgtttagttcagcgcaaagttttgattttggttgaaattaaagatgatgtgactaaaaaattatgtgtgtatgacaggttaatgtgatggaaaaggattaaagtttggatcaaactttagatctaaacacataaacacacagcctacaaaactatacaaagtcaaagttcaatttccacagtactagtagattgcaaccacgtacctagctagctactagcagtactagtggtaacaacgatatgcgaatggcaaacaggggtcacatggatgtattcaaagctcgtgcaagatacatcgtttgaccttaatttgaatgggattgcacacttccactagagagaatccattatatgccactgactttgtcacacatctacaatttaccatcgactttgtcacattctacaatataccatcgatttttgcttaacttctacgatttaccatcgccgtccgattagcctccgttagtactgtacaattttgtccaaatgaccgaaatacccctaaaacaaaaacttccaaaatttggataaaaaattcaaaatatcatattataaacataagattgtaaacatccaaaatttggccaacaacttaaaatcttatatttcagaatttttatccaaattttgaatgtttttgtcccaggggtattttggtcattttggcaaatttgtacagtactaacggagactaaccagacggcgatggtaaattatagaagttaagcaaaagtcgatggcatattgtagaacatgataaagtcagtggcaaatcatagacatgtgacaaagtcagtggcatataatggattctctcttaatccagacgacaactagcttgccatcattttatatcatttgttccattcttttgctatgtcaaaaggaaattttggatctttgttagccctacaccaatcaaacagaactatatagtacatcggatgtgaaatgccatcattaaccaagagctatatatagaaacatttaagtgggctaccctagtactgaaatgcacgctttgagcgaagttaggtgaagtgttattacaaaataaactagagatgtgaagcgtagtttagactgctttataacttgtgaagctaaatttttgtgaagctaaatttaatggttgaaactgtataaacatgctctgaagttgaggaggagaaatagtatacggctacgcgaaacggctctctctctccgccccacatatcaatcgatcggtttgcctgatggtgccaaaaccgttgctttctacgactcccagattgtccaagctcgcgattagctagatgagccatgcaatcgatagctagcgctctatcgtgtcttctggaggattaactgataaatcacccggtaggcgccgcccgtggattggaaccacccgtttctcagaaaaaattcaccgcacgtcgttaattgatcgctgcgacttgcacgacacaacgcttgattggttgtctcgttgtgtagaagaaactgcacggagaatgcgatcatttcaacgtgcgtcatggcgcgaaattaaaaaaaaaacaacagatgttgccacgggttccatgtatatatactgacgaaccggtcgtcggtcgatctccactagccagctagctagctacacacagaaatccacagaaaaaaccgttctccatagtagtagtgctgttttttgtttaaagaaagcaaaaatttgggtggttgaaaattgaaatggccttgaattctcgctccggtttggtggtgtcacgcgctggaactggtagtattactggaaccggtcagggcactccgtctcacgtcatcgaccagaaatcgatcgatcgatcgagtcgcctgtggaatggtcaaagttactcctacaagtcaggcgaatcaccgtcttcacagatttccggagtctagaacaacccgtttccggagtcagagctcgctagtgataattttttgctcaactccgtacaggtttttttcctgttgttctctgaattctatagctagtccctgctatactattcaccgagcgatgatttcgtcagccaccggagacagtaccaattcagtactgctatttaattactcgctcacatgcctatagtacagataacaaaagctgcgtacgtgatgaatggttagcacgatgccatcaatggcagtaggtaggatgatgaatggtccgatggacgatcgagtgaagacgatgagcagtggtggacacgtccgatggatggatggatggatggatggatggatggatgtaaagagacgggccaggccccaatccagcgtgagacagaaaggccatttttttcagcaacctttgctgtctccttgatgatctctatagcgattgcccctctgaacgaattgaagagcgattgcctttttgaacgaatcaaagagctttgcacgattgcatgtgcgcaagcattgctatcgttattatattcagcgaacgactcatcacgtttggtggactacgagcagctacggctctgtttatgaagcttatgataatctttaacttgttctagaatctccagcagctatcagaagccgttctaaataatattcaaattttgggaatttagagttgtatatattattgtagatcatacaggaaatggttttttcgatttttgcaatttagcttctaaccatccgcttctcgaaatattaagatcccaggtaggcctacatcacgtatccgggggccatttatgattgatttgtttaccgcaagggatggcgtttgttgttctttcatttggtatgggacaaatcatggtcgctacaccgaattaaataggaccactagtatcatatatccatggagtatttcaattttcatcaacttctcccgctgcattaattgtgcccctttattttgtgattgctgtcgatctcacgacagttcgcccaggtttgttgcttatatatgattatatctcttgcaatctcactttcatatacataaaatcaatttataggtcgcggtacaaagaagtccacatcatttaatcataggattcatttgaaatgcaggatcaaagagaaaacaaatgaataagaaaagcatacaattctgattgaaattcaacttcaaaaagaattgtaaaaaaataaagtgaaaaaaaaacaagaataattgtttgattagaaaaaaaatatgaatcgaataaaagagatagactcatagaaaacttatatgaattgatgtatttcttagaaattttataggatttaatagtttttaatttaatacttctcaaagggcataccgaaaaaaaatcatataaaatttgaatcttaccaaattcatacgtttttccggagtatcaatgttgcattgcatctgcgagaatatttgaagttcttacaaaatgatgggtaaattgaaatttgaaaatgtgggtgtgtttgattcagacgggcatgagcggggccctggagacgctgtgcgggcaggcgtacggcgcgcggatgtaccgcatgctgggcctctacctgcagtcgtcgctgctcatgtcggcggcggtgtccgtcctcgtctccgcactctggtgcttcaccgagcccctcctcctcctcctccggcaggacccggcggtgtccgccgccgcgtcggcgttcgtgcgcgcgcaggtcccggggctcttcgccttctccttcctccagtgcctcctccggtacctgcagacgcagtccgtcgtcgcgccgctcgtcgcctgctccctggcgccgttcctgctccacgtcgcgctggcgcacctcctcgtcaacgcgctcggcctcggcctcgccggcgccggcgccgccgtgtccatcaccttctgggcctcctgcctcatgctcctcgcctacgtgctccggtccgagaggttcgccgagacgtggaacggcttctccgccgaggcgttcaggttcgtcgtccccaccatcaagctcgccacgccctccgccgtcatggtctggtaagcaagcactgacacacaagctcaacgccgggttgatcaaactaaagcttaattagctagatgtaatgagattcttttttttttcactatatgaagcttggagtactgggcgtttgagctactggtactgatcgccggattgctcccgaatccgacagtgagcacctcgctgatcgccatgtggtaagttcgtcgttgcgctgtcccttccatgaatcgatcgcaaaggaagaaactgatctgattaatgcatgattgtgttcagctcgagcacggaggccatcgcctacatgatcacgtacgggttcagcgccgctgtgaggtacgttacttacatacgcacgctacctgttcgatcgccggccattgttcgtcgccgtcgtttctgaccgaacgttgcacgcgccacgcgcgacgcgacacgcgcagcacgcgggtgtcgaacgagatcggggccgggaacgtggagggggcgaagaacgcggtggcggtgacgctgaagctgtcggtgttcctggcggcggcgttcgtgctgctcctcggcttcggccacggcctctgggcggggctcttcagcggcagcgccatcatcgcggcggagttcgccgccgtggcgccgctgatgatggcctccatcctgctcgactccgcgcagggggtcctctccggcgtcgccaggggctgcggctggcagcacctcgccgccgtgaccaacctcgtcgccttctacgtcatcggcatgccgctctccatcttcttcgccttcaagctcaagtggtacaccaaggtagtacattacttatacttacaatctcacattaatccttttcatttctgcttcacaaagattacatgcatgtgacatttgatttgtgttgcattgcttgtagggattatggatgggtttgatctgcgggctgacatgccagacctgcacgctgatggtgatcaccgcacgaaccaaatggtccaagatcgtggacgcgatgcaggagaagaaggccagctacgtcgcgtagtttaactagtctttggctatactgtagattatcgatcggattggatatgtgtatgtatacacgatgagcatttgaagcaacatctgcggttagcatgtctgcaacacgcgcgacgccggctgttgcgttcgtgcagtgcgtgcgcctgcgacgtttcgcggggttttggacgcgacgacaatgcgcgcgaactgcttgttcaaatacagtttcttcagccatctggaagctggaagcctggaatagacaaacaccttagagcaagtataatagtaggctataagccaactataagcttaaggagaatttgaaaaatggagagagttggctctcatgcaagagctagctattcacatattttaagatagatacataggtgagagatagagagaggaggagaaaaaaaagaggtaaccttatagcccatttactatatatgttaactctaagataagctataaactcattgttggctctattattaaacttgctcttacagtactattttcaaatggtgagcaccatatattaattgtgaaaacacacacacacaccgatgtacacgatgatggaaatttactcctctcaagtttgattgaatcttgtctgaagttttatataaaccaaactaactttagataaaagccctcccactaccataaaacctacttccttcgttctacaatgtaaaactttctaggatgaggacatatcatgtgaaaacaatgtaagtgttgaaaaattatgaaaatcatatataaaagttccgtaaattcatgaaaaatattaaagataggtgtagtgaaatacattctcaccaaatctcaactccaaactcaattttgtttaagaggaaaaaaaagagacaaattttgggtgaatagtgtcatattactattctcctaaaatttgtcttttgtcctaaataaaattaagtttggacttaagatttggtaataatgtatttcatgtttacacttatctctagtattttttttatgaatttataaaacttttaggtatgatttttacgagtttctaacacttagcttgttttcaccagatatgtccccttctaggattacccaaattaatatagatgttaatgaatctagacacatatagaaaacatatacattgatcaatggatgaatctaggtaagtctaaaaagtattacgatatgaaacgaagggagtatcaaatataccatcttactagtgctggttagggaaaaaactagcactggtagcggtttttggtccctcaaacccacacgacactcggaggataagaaaaaccacacatgagaccatatcgataccagttcattaaataaaccaataaaatgtgtgggacgttgatgttggaacatgtataaaaaagagctgatattgatgggtgattaagctgagctgatcgagcaagctctagattggtttcgatatatttaagtctagacactctctcttgtgtgcgctcagaatcgatcccttcgtctcccttcccctttctctcatggccacctcccttttcctctctcacttcctctccctctttgtcccgccaccgcgagattgattacagtggctgatcggtaggcagcggcaacttccgtcatctttcccaacgcggctgtcctatagagctcggaagccgctggatctgcccatcatgagctcgggtatggctggatccgatcagtgtggctcaatggaaacttccctccccctctcccagccaccttgagctttcgaatgcgacgacaaaatagaacaacagctatggtctattctcaaatataagcatttatatgatttattttttccatgatataaatatttctgagcactaattctaatatgtaggaatttaggcatttttcagccaattagatacttagaaaatgaatctagctatctaagaaactcaagattttttaatatgaccattgatgaggttatcgaaagggaattattaccttaacataatatttactaaataacctaaaaatgcttatatttaaaaataggtggagtggtacattttgcggttaagcttttctttttactagtaatcgtgcacgtgcatcaatgcacgtttttcataaaatatattataggagtacattggaagtttggaaactatatctaccaaaaataatttattcaaccaaaatttataaaatatatctcatgtgtaactgtaaaaaaaatataaccaacattatcggtacttgtaaacatgggcatgactgtttgttttgtacaaattttgataggagggaacaaaatagaaccgaagccaaaggctatacagtagccgcctttttctctacagctagctgctccactgcttgatctcgtaaaaaaaagaatttgtcgacaattcgctaaattgaccatccctctttcttgaagtttctattgtttcgttccgtccaaattccccaacagacaagcaagaagagggtcctgagccctttgctttgcatcttttctgataaagtcttgtgacaccaccattccaatactgaacaggctgaaggagggctagctgaagaaacttcagtcaagcacaggctaataaatatagatgtgtaagacatgcttcagacaaacttcagtcaaggaggtaatgcatcactgcaagttgaattaaattaaaaatcaaatatgatagtttcactcactagatgttacaactcacgagaatacaagatttcggaaaacaaaacaactaataaatatagatgtgtaagacatactcccttcgttccaaaaagaatcaacctagaaggggccacatacatcaacctaggaggagtcttaagttgaattttaggaagtaggaagtaaaatctagatatttttcccgagcgtgcaacaaaataacttaaatatggaggctctctattaccctcgatagaaaggcgaagttataaaactcgttggagatgctctcttggctggattttttttcttagaaagacagatttgtcaattttcccagtcagacaaatgtagcagcgtcaactaattaaggagctgatgaaccttcttccagagaatggagtgtcacgggctgttatgtttctcttgtcactgtaatctgagtaccagctactatgcgtctgtgcgttgttctcgaacgaactagtggtcttatcggtaaagttaaaatttatattttcaagttgattttaaaatatttttaacatagtagttttattttcagaattggcttttaagtcccttaaaacatgcatatacaagttttatctataaattaatttttattttctaataaactgttttggtttataagggaatatgagtaaccgacgaggacataaacagcttatcccgatctcaaaattttagcagaataatgatcaacaagcagaaataattcagatagatagcgacgtgtaaagatgcaccaaccacatagaaatctctgtttcgttgcgtttgcctcggcgtaggttagggagcagaattggctgtcagctggtgccttatcgttgattggaaaagatatggaagttggaacaagccaacaaactgtatatgtcatcattttagggcaagcccaaaagcattttctagccgcaccatcgagaaagcattctagccgctcgatttcgagctggcattttctcttctggtcgtacaaattttcttccctaaattttacttgttttcagtcttttttaacaaaaagaaaatattttaagcctactgtttgagagcgtactatgcagcaacaaatattacaaaaaaattataactagagatagtattctatgatgtaattttcagaaattcacaccgactttcaagtaagttcaacaaaacatacttgaaatatatgttgctccgtgatttggatccccgtggactacgggagagaaccagggaattggaatctaatttcttaaacaggttgtttgggtgccattggagttggaatcatctaaacaatatcggcttccaagacgaaaatagtacatatccacattttatattagagtaaatttcacaaaactatacgtctatacgttttgtggtctatgttacagaaaactacacacactttgatacttggcacttaagtacatatatttcgatatttcggtagtgtagttttacaaaaccacactatcaataaataaattcaccgtgagatgatgtggctgttccacctaaacgaggacgtggcatcctatgctattaattttgcatgacctcctatgcttgtcagcgccggcgcggacggccgttccatatttccgcccatcgacgaccaccgagcaatatcgtgtagttctcaccgccttcggcttgcatctcgtcgtcatgtcagccacaagccagcgcctttcctctcactgctatcccctcgccgccgcgccacgaggctcctcgctaggcctcatcatctctcccggcggcccctcaccatcctctggtcatctctctccaatacatgctatgctcgagatgtggagttagcaggcaactcgctggctacatgcctctttgagtactgcggctgtgcggccccttgtgtctcattccagtactatggtggctctgccattctgctactaacaggtatggtttggttctttttttttttgtccaaggaatcaatcaggtgcccattttatagtgagttttaatgagcaagttccaactgaaatttcacataggtatgtagttttttgcctcactgttgattgattttgttaaaaaaaacagttaattcatcaaatatggaggtttctaatgcctctgaaatgaaagtagtacaaaacatgggagctataaggggaggacagggaattagtattctcagtcagtccactattgtacttaatttcaagtagataaattacgcttcagtggaaaggatcactcagtctgaagtttgtggctataaccccttgagttaattgattgttccattcagcttgtagtactggaacttgacaagagaagcacaatagtttggcgtagtactggaacttgacaagagaagcacaatagtttggctgtagacagtagtaggtggcttctttcatgtctgtaggaaagtgctcctaaaccaagcacaaccttcagttgtggtaagcacaatacagaccttaactcatggaactttgaaatgaaataaaaatggtataatgctccattagacatgttcacacatctagtttgatcaacaagtattcttaataaccagctcaacaaatagtgcaagaacaatagactcaaaacaaccatatagaaaggtgatcactgaccagaaaacaagtcacataataaaatccttggtaacatatcgcgctgggattggaaggcacatatgtgcgtatatttagttgcagcagttttagtgggccatgcgcatagaagtccagcttgtcccacgatgccacgtcctcgttataggtggaacaaccacatcatctcacgtgtgaattcattcattgatagtgtagttttgtgaagctacactatcaaaatatatatatttaagtgccaaatgtcaaagtgtgtgtagttttctacaacttggaccacaaaacgtgtagttttgtgaaatttactctttatattaaaaaaggatgtctttttttttcacgtactcttgtgacttaggccctgtttagttaccacgcaaaaactttccaccccgtcacatcgaatgtttggacacatgcatggagtattaaatatagacaaacataactaattacacagattgcgtgtaaattgcgagacaaatctgttacgaccaaatttggtaagatatgaaccaggttcggcattagaatcaaagcggattcggcaaagagttaggctcgaaaaacatagtttgcatcggctgcgaagacatcggctgagatggatcggacagagtacagccgatacggtcgattctgatgaagacagttgtaaaactgcttctagaatcaatcaacatgctacacaaagattgccacgacggagataagctcttagataggcaattgtatctattagttagttaggatatttcgaatagtttccttagagatatgtttggacaaaagtctgtcgtaaagacctatgtgtatcttagagtttgttagagataagagtcgtgtccggcgaggacatattatgtatctcgggtataaatatgacccgaacccaatgtaaacaacaacacacaattcaataacactttcgcgcatcgccaccctttttacttttgttctatttcgacgagttattgttttcgggttgagctgcatcgtttcgattttcaactagaggtaaacttgtcatgacggtttgcgttctcgagattagtacttccatctttatggtattctaatcttgtttatgtaattcgtcgagttatcgtatatactttataatctctgttaattgtgcttgttggtgacatgggaccgggggtatcttgactagaggtttggggcagctgcagtcacccacgtggcctgaccccctcgggggggggggggggtcgggcccgagggtgatgtggccgcccctccctctgtcttcccgaggggtcgggccgctcccgtttcggccccgagggctggggcgccccgaccccctgtgggtttggcgccacgtgtgtgggttaggtgagcacagcggcgctcacctaaccgcgtttattgcgggttggacgagcgccccacgccacatttaatgcagcgcagcacactcgttcggtccgtgacaggtcacagtgtgtgaccggtcacagaccggtcagatcgcgggttaggtggcaacaggcggcctgacacacgcctcgccccgtcccgtcggaatgatgagagcctccaggcactcgtccctagccggagccggcgtgggaactcctggagttggcacgtcagccccggccagatacattccaggcttcatcgcaaccattgcaaggaagtcattgtatgaagaagggcagacgtgtagcatgctgaactgacacgtggtggacaagaatgaccggtctgtgactggtctgacgccggtcgcgtcatcggcagacaaccgtgctcccacgatgcatctgcctccggtggagtggaggtaggtatgacccatctcgtcggatggtcatttggaaagcagccatggtaaatctccgcccattaatgagggagtaacagggagatccccggtgtcaggcgagagacggcgctgagcctcactcaaggacaagttgtgatttagcttccaggcgaaggtgcaagccaagttttggtcaagagagggtaggtccccacccagaagaaaagtaggtagaagtggtgcatgtagtatccccttgagatataaaaggaggaccttgcccaccaaagagaaagaaaaaaaaagaaaaaaaaggaggcgagaggggttctggagcctgaactctctggctctccggctctctgtaaatccttcacacacagatccaccagaacacaggagtagggtattacgcttctcagcggcccgaacctgtctacatcgcccgtgtctcgtgcacttgctctctcgcgaacattctccagatcgatcgagggcgaagaacctcacttagcgcccccggccgaaccggcaaaggggggcctgcgcggtctcccggtgaggagccccacgctccgtcatctggcgcgccaggtagggggcgcgtatgtttttctaagccctcgtcctctttcgtgtgcgccaagcttctcccgctcagcccattggccgaacgggcagtggcgcacaatctctctccgagcactagcggtgaagacggggagcagaacccgcgccgtcgagctcgtactccactgtccccctctcgccgaagtcttgggcgggaggaggcgctcgaggaggtcgaaagatccgcgacttcgccgcacgcgggcgatggagaaggacggcgagacggggagcgtcgtctcctcgtctacggagatggcagcacgccccagggcgcgctccaggctgcgggcgcactcctgcgtcacccgcccgtcatccctgatccagagactccaacccgacgttggctagatgacgtggccaatttggtcatgacggcgcagcagcgcttaggcgccggctggcggtcctccgccaccaaggccactggcgttgctactgctggctccgtgtcgtcgaggcggagggcgcggcgagcggcggccgctacccgccgttcgtccgccattccctcgtcaacgcctccaacccaagaagatgtgcgtagggggccagatgcccgcttcaatatcgagcgccggcgcaatgatcgccgtgctgcccatgcatcggagggcgcttcctcgtccggagcgccacttcggtccgggcacgggggccagccccccgtgtccccggttggcggtgccggctgtcgagcctttgtggcgagccttcggaacgtccgttggcccccaaggttccggcccaccatcaccgaaaaatacgacggaagcgtcaaccccgccgagtttctccagatctacacgactaggatcgaggccgccgggggtgacgacagggtcatggcgaatttcttccccatggccctgaaaggacaggcgcggggttggctaatgaacttgccacccgcgtcggtccactcttgggaggatttgtgccagcagttcaccatgaacttccaaggcacatatccgcgcccaggtgaagaagcggacttgcacgcggtacagcgaggggacgatgagtctcttcgctcgtacattcagcggttttgtcaagtccgcaacaccataccgtgcatcccagcacacgcggtgatctacgcgttcaggggggcgtgcgccacaaccgcatgctcgagaagatcgcctccaaggagccccagaccaccgcggagctttttcagctcgcggaccgtgtggctcgcaaggaggaggcctggacctggaactcctcctgttccggtgtggcagcttcggccgcccccggatccgccgctcggtcagggcgacgggacaggaggaggaagaagaggtcggcccattccgacgacgagggtcacgtcctcgccgtcgagggcgctttgcgggccacccgaaaggggaggcctgcgagcgacaaaaagaaggaggccggcgctcctagcagggagcgcccgaccggcaagtggtgcaccgtgcacaacacctccctccacgacctcgcggactgccgcgcggtcaaaagtttggctgagcggacgaggaagtgggaggaggagaggaggcaggagcgccgtgagggcaataccccggcggctcccgccggcaaccggcgaggtgaggccaagcagaaggcccccgccgaggacatcaacgatggcgacgatgacctagggttccaggagcctgaggccactgtcgccaccgttgatgggggagcgtgtgctcacgcttctcgccggagcctcaaggccatgaagcgagagcttctggccgtggcccctacccatgaggtgacgcggcgggcgcggtggtcggaggttgccctcaccttcgaccagaccgaccacccaccgtgcgttgcccggggaggacagatcgcgatggtggtttcccccaccgtttgcaatgtgaagttggggcgtgtcctcgttgacgggggtgcagccctcaacatcctttcccccgctgcctttgacgccatcaaggccccggggatggtgctccggccgtcccagccgatcatcggtgtgacgccggggcacacttggccgctaggccatatcaacctcccggtcaccttcggtggttccgccaacttccgcacggagcgggtgaacttcgatgtggcggacctcagtctgccctacaacgcggtcctggggaggcccgcgttggtgaagttcatggtggcggtccactacgcctatctccagatgaagatgccgggccccggtggccccatcaccgtccatggcgacctcaaagtcgcgcttgcttgcatggagcagcgcgcggaccacctcgccgcggcatccaagcccgcgggtggtgacgagaggctcagcacctccgtcccagccgccccgaggcagcggatgatcacgtgcgacgaggtcccgatcaagcaggttgccctgggcgatggcccgtccaagaccacacgaatcggtggtcttctggacgacaaataggaagacgcgctcgtctccttcctacgggcaaacgccgacgtcttcgcctggagaccggcggacatgcccggggtccccagggaggtgattgagcaccgtctcgccgtacggccgggcgcaaggccggtccggcagaaagtgcggcggcaggccccggaacgtcaagccttcatccgcgaggaggtggcgcgacttctggaggccggattcatccgagaagtcatccatccggagtggctggcgaacccggtcgtcgttcccaaggcgaacggcaagcttcggatgtgcatcgactacaccgaccttaacaaggcatgtcctaaggacccttaccccctgccacgcatagatcagattgtcgactccaccgcggggtgcgaccttttgtgttttctagatgcatactctagttatcatcagattcgcatggctagggaggatgaggaaaaaactgcattcattacccgcataggaacttattgttatacgacaatgcctttcgggttaaagaatgcaggtcctacttttcaacgtactactcgaatttctttgggtagccaaataggacgtaatgttgaggcctatgttgatgacttggttgtgaaaacacgcaaccaggagaccttactctcggatctagcggaaactttcgaaagtctccgcaccgcccgcataaagctgaaccccgacaagtgcgtgttcggcgtgcctgcgggcaagcttctcgggttcttgatctctgcccgaggcattgaggccaaccccgagaagatacgagctatagagcggatgcgcccccccagcaagcttagggatgtgcaatgcgtcactggctgtatggccgccctaagtcggttcatatcgaggctgggagagaaggcgctacccctatttaagctcctcaaacgctccgggccgtttatctagacggaggaggctgaacgggccctcactcagttgaaggcgtacctcagttctcccccagtcctggtcgccccggagccagatgagccgttgctactctacctggcggcaactccgcaggtggtcagcgcggcgttggtcgtggagcgcgacgaggacgaccctcgctccgcgcatccccaccctgtgtcgactcgacccgggagagagcagggaggagaggcccccgagccgaatggtggcccgaggcccccaacgaccggaactggccctctgcccgcttgtccgacggtgccaggcgcccctgatccccaggatggccccggggccactgcgggaaggccgcgcctgtcgccctctgaccccgaggtcgtcggcacagaagccgagtgcgccccgtgcggcctctcggacgaagagcaccctgtatcgactcgacccgggagagagcagggaggagaggcccccgagccgaacggcggcccgaggcccccgacgaccggagctggccctctgcccgcttgtccgacggtgccaggagcccccgacccccaggatggccccggggccactgcgggaaggccgcgcctgtcgccttccgaccccgaggtcgtcgacacagaagccgagtgcgccccgcgcggcctctcggacgaaaagcgccctggagatgcggcccctggcgaagaggatcggccccgacaaaaggtgcaacggcccgtctactttgttagtgaggccctccgggacgccaagacccgataccctcaggcccagaagatgctttacgctattctgatggcttcgaggaagttgcgccattatttccaggcgcatcgggtcacggtggttacgtcctaccccctcggccaaatcttgcataaccgagagggtactggacgggtggtgaaatgggcaatcgaactctctgagttcgatttgcactttgaaccacgccacgcgatcaagagccaggccctcgccgactttgtggcagagtggacaccggctcccgagcccgtctccatccccgaggccagctcgggcccttcgcagctgcctcacaccgcctattgggtgatgcagttcgacggctccctgtctcttcagggcgccggtgcgggggtcacgttgacctcgccgagcggagatgtccttaaatacctggtccgcctcgactttcgggcaaccaacaatatggcagagtacgagggactccttgcgggactcagagtggcggctggactggggatccgccgcctcctggtgttaggcgactctcagttggtcgttaaccaggtctccaaggagtaccagtgctctgacccgcagatggatgcttacgtgcgccaggtgcggcgtatggagcgccattttgacgggatagagcttcggcacgtgcccagacgggataacgcggtcgccgacgaactctcaaggctcgcttcctcgcgagcccagaccccaccgggcgcctttgaagaaaggcttgcccagccgtcggcgcgacccgaccccctaggggagacggacgcgcctgaacggcccccgaggcccgtcggagtccaggcctcgggacccgaggggggcgctcccagctcccttagattgattgcttagatcgctgagatccaggcgtacctcgcagataagactctacctgaggaccacgaagggagtgaacgcgtacagtgcatctccaagcgctacgtgctggtggaagggaccctctatcggcacgcggctaacggagtcctcctgaagtgcattcttcgggaacaaggcgtcgagcttcttgccgatatccatgaaggcgagtgcggagcccactctgcctcacgcaccttggttggcaaggcctttcgccagggtttctattggccgacgactctcaacgatgcggtcgacctggtccggcggtgcagggcgtgccagttccacgccaagcaaacccatcagccggcccaggccctgcagaccatacctctttcatggccgtttgctgtctgggggctcgatatcctgggtccgtttagacgggccccgggcgggttcgagtatctgtatgtcgctatcgacaagttcactaagtggcccgaggcttatccggtcatcaagatcgataagcactccgcacttaaattcatcaggggtatcactgctcggtttggggtgcctaaccgtatcattacggataacggcacccagttcactagtgagctcttcggtgactactgcgaagacatgggcattaagctctgcttcgcctctcccgcccaccccagaagcaatggccaagtggagcgcgccaacgcagaaatcctcaagggcctcaaaaccaagaccttcaacatcctcaagaagcacggcgactcgtggattgaggagctgccagcggtgctctgggcgaaccgaaccacgccaagccgagcaaccggggaaacgcctttcttcctcgtctacggcgcggaggcggttctcccatccgagctcaccctgaggtcccctcgggccaccatgtactgcgaggctgatcaagatcagcttcgcagagatgacctcgactacttggaagaacgaaggcggcgcgcggcccttcgagccgcgcactaccagcagagcctgcggcgctaccatcagcgtcacgtccgggcccgatcactctgcgtcgacgacctcgtcctacgccgtgtccaaacgcgtgctggactgagcaagctctcaccaatgtgggagggtccgtatcgagtgatcggcgtcccccggccgggctccgttcggctggccacgggcgacggcacagagctgtctaacccgtggaacatcgaacaccttcgtcacttctacccctagtgggggtcaggtgttaggtctcgggctcgggccaaccccgcaccccccctcgggcgtgcagggttggccgggggctaccacatatgcatatacttatcttttttctcttccgtatttcaataaaagctttttcgatttcctaaggactgtgtctgtgccattgtttccttttgaagagttttggcttgaattagcacgctcgtgctcgaccctgccctcggtggctcgggccagcggaaatcgccaaacggggcccagaaccgagccgtgccccggggcgtggtgaactccgggggggaatcggcaaaggcccacaatcgggtccccataaccctcggtcaccacgctcccagcctggccagtctcgacacgtgcatctccccaggcactagccccgacccgcgccgtttgaggctgggacctgggcacgagcccttgttcaagccaagacacagaaggaccgcggcacagaccatcctcgtctcatacacacaacaaataaaattgacacagaaatttcttctttatttgattgcagattaaattagtttatacaagaagggggcccgaaggcctcggaagaagaaaggaaaaactatttaagattggcgggggcctgggggctcatttcgaggctcccgggtcgccggcctcgtggtcgctgtcgtccacaccaccgtcgccgccctcctcgtcggagtcgagggcgaacgcgagccgaggggccgtaccctcgaagctgtggacgatgtggtcggcggcgtcccggacctgcgcgcgcgcgtcgtcctcggttccgggagggaactcgtccaacgctgcccacggggagaagtccgggtccctggcctggtagcttgccagtacaagctccactgcccccccgggcgaggtctctcgaggatgacttgatcgtctcctcgagctcctcggggagccgctggagagtcccggccatctctgagaggcgctgggcgaggcccccctggttggcggcgtacttcgcggtccgctcgccccagaggcccgcttgccgcccgacgcggtctagacgggagacggcgtcccgaagcatgccgggccctacctcgcccgccaagcggagggcctcgacctccccggcggacgagtccagtgcgccctgcagatcagcgatggtgtgttcggcagctgcgaggcgggcggctagatcgccgtcgcccgcggccgcctcgccgctgcgcgccctcgcgtccagctccttcgcccgcgcctcgagctcagcggcccgctgatccagtgcggccctcttggcgcgggcgccttccagattacggcgcgcctgctcctcccgcgctgcctcgcggagggacaggctgtccgccagccgctgcgccgcggcctcggcctcctcgagagatcgctcccgctcggtgagcgcatcctcgcggaggcggagtgcggactcctcttcggcgcaggcggcctcgtgcgccgccagcgttgcctcctggatagcgacggcggtctcgcggtccgccaggtccttctccctcgcgcgggcacgctcttccagcgccgtggcgcgagcctcaagggtcacttcgcgccgccgggacgccgcctcgttctccgtcgcccgccgttcccgagcagtggtggcgtcaaggactccccgggcggcgtcgagtttcttctctagctccgccacccggctccgtattgaaggcggagatcgtcccgcgcctcgttgagcacggcggtggcgatgagggcaatctcccgctcctcctccacctccctggcgatctccgccagctccctccgacgggcctcgagctctgaggcgtgccggcggtatgccttgcggcccgcctccaccatggcctccaccgagcgccgcccctcttcgacgcgcgcccacgccgcgtcgagctccgcccgctctgcttgcaggacctccatctgggcacctaacccgtccagcaccatcgtgttcgcggcggccagggcctgcaggaggggctctgtgttcagtggagcggcgtaaggcagaggggagagccgcctcggtgtgggcgctatgcggctcggcccgccaatcgacgtgccggactcaggggcgtcccccgaggctggctcgtcctgaacgtcgcccgaagggtcgggtccgagcggtgcgcccgcggcctcgtcgtgggtggactcggaagtcgtcgtcgcctcgggcggagtcgggtcgggggcttggcaggccgcctggcgtgcgcgcgtcgcctctgcctcccgggctgacttcccggcccggtggagtctggcctcctcccgagtggcctcctcagcctggcgaacccggacggcttcctgggcagcctcctcagcttcccggaggcggtccgcggcttctcgccggacagcttcccgcctccgggcctccgcggtcgctgtctcctcggcctcagaccggccggacttggaatggcgaggggggcgcgacggaatctcgctgaaagcggaagaaaaaccagaagacaaaaagaaacgggtaagtgaaaactcgccttgggagaatgaatacggccgcagtgggcgcggggacgaacctgcgaggaggtcggctaaacgaccaccttgggggggagatgaggtttccccggcatggttcggtcacccccatcttgcggagccgcttcttttttcgctccccctcgggctgcgacgtcggcacagcaccctccgggcgcctgctgctggcacgcaccgccccgccccctcggggaggagatggggagggggtatcctcctgtttcctcttcccccgggcgtcggcagggcggctgccccccgggcccccgtcacggggcccagacgcacgaccccctcccggggtagattgttcccccctgcggctcccgcccgcgccatcgtggcctcgaggagcccgctcccctgacgccccgaccggctgcatgatggtcaggatgttggcgcgctctggatcgctgcagagggggaggacaccttgggggatgagggatgcctccacggagctgagattcagcacccgttggaccaccatctcgaaatcctcaggggcccagtcccatctgcccccctggtgggtcctcatgtagtcctcggacccggtgtactcccaggcgccccgggcgcgccgctggagtggcgcgatccggcgacgaaggtagtcgccgaacaccatggcccccgtgagcccctgggatcgcagacccgccaggcggtcaagaacggcgtcgtagccatctcccagatctaccggcgcccgccagctggaggcctgcgccgggggctggctcggaagtcggaggcgcgctttgtcggcgagaggggtgtagaaccagtcgctcttccagtcgtcccacttcttgcgaaggacgcaggaaatgtagcggttcagcaccggcccccgcggctggaagtagcaaccactgactaccgacggtggcgacaccggctgtacggtgaagaaccaccggaacagccggagagatgggcgcaccccgatgaacatctcgcataggtgcgcgaagatggccaacgtcattaccgcgttgggggtgaggtgcgccatctggagatcataaagctccagaacatccatgaagaaagaagagaatggcgggaccagccctgccattgcgaaagagaggaagaagacggaccgccccgggtaatgcggcgccgggcgtccctcgcccagcgcgaccacctcccggccggtggcagattccggcatgaatcggcgcggcagcccggcctgcctctcgctcacgatgcgggaaggcggcagcacgctaccctcgagcggtgcggagccccgtgccatgacgccggcggaggaggagcttgagagcgagcgagtatggcaagggtagggcgccggaaacggagagtcagagcacaagtggcaaaggcaaagggaagagtgacgagaggaaggaaacaagtcccttccttgatgtcttagtacccttgccaacgctatgcccggctcctcgatccccgcgcccactacctcgccccctcgtctctcgcgcccacgcctccactaatcccgctcgcccgtttgcggcgcacgaggcggatgtgcggccgtggcagtcgagatgggacatatcgtgcgcgcgttaactacgctcgccgaccgatgcaccgtcatcacatctccagacgaaacgaaccggctcgtcccggttcgcgcgctacttaagtaatgtagtggtcttgaaggaagccgctcattattgtcggtcggttttttccttgacgatgtgcgcgatttgcgaccgctgggtttctgccacctgtggagaccggccccacctgtcaccaggtctaaggagtggcgtcatgcccgagcgcttccctcgggggggggggcgatcgccctggcgtaacgccgggggctactgtcggtgacatgggaccgggggtatcttgactagaggtttggggcagctgcagtcacccacgtggcctgaccccctcgggaggggtcgggcccgagggtgatgtggccgcccctccctctgtcttcccgaggggtcg

SEQ ID NO: 23537 - DNA, 4134 bp, Oryza sativa
atcccccctcccccattctctccactccatctcccccttggtctcccctctcccctctccattgcgccgccgttcccgtgccgctgcgccgccgttcccgtgccgccgcgccgccgttcccgtgccgccgcgccgccgttcccgtgccgccgcgccgccgttcccgtgccgccgcgccgccgttcccgcgccgccgtgccgtcgctcctgtgccaccgtgccgccgcttctgtgccgccgtacgccaccgtcgccaccgccgtcgtcgccgctgctgccgtcgctgagccgccctccttccccctcgcgtccaccgccgccaccgctcgggtaggagggagagccgagagaaagagaggaagaagaaaagaaaccgagggagggagaagccaaggaagagagaaaggagccgggagggagagaagaaagggaaaaagaaagagaggagagaaagaaaagaaaaggaaaagagagaaaaagagaaaaagaaaagggaaaagagaagagaaaagaaaaaggaaagggagaaaaaggaaaaggaaataaataggaaattagagggagtttggggaagtttagaaaatttaaaataattagaatttaattatagattaattatagtcgtagaattgcaaaatttaatataaattatggattattcttggtaatttctataggaaatcaattcgcggtagtaatttagatgtaattaataactaaacaaatagttgaattcttatagattattatagattatttttgggtaatccctataagtaatcgattcacggtagaaattcggatttaatcgctaggaattttagacgtatattatatttaatcgtttagtcatagactaaattaaattgtataatatttctaggatttcgtccaatatttagctcgtaatagaaatttctaacctattatatacaatgctcggggagagtaaattattgacaacgaaataattatacccgcaaagtagtttaaatcgaaattgggtttgccgtagtttgcacatagtaaagttaataaaaaggaatcgactttcgcattcgactttcatttggatttatttggatttttatttgaattctaaccgaattcaaatcaatttttgcacgtaacaatagagcccgagggagttgcggatccaagcgaaggccaagacccgcaagactttgagcaaggcaagtcatcactattccttgaacatgttgatcctaattgcaaaattgttttgtttacaaataaaattgcatgcaatgatgaacatcctacttgtgattatgccatgccttgattattgctaacccttaaatctttgtaaccatgtttacgtatgagtccctagtcaactatgacaattgcttagaaatgctactctagaatcatgcatactcatatttatcaaatgctatatgcttggggcaattacctttgggaaggtaattgagatgcggcatgtggagacataagcgccacattgccattatgttgatgacatgatttgtgaaaggagaaataaaatttaacaattgttttcgactggggcggacggaggatttgggtggtatctggaaaaggctagtaccgtccccggtcaattaaggaccgagccatgaagttaagcatgaaacgacccccgtacaaccgtacttctcgaatgggtatagacctagcggattagatagccgagcggaggcagtatccctgcatagatggttcacctctgagtgaggcaggtgcgctacattgggacagccgttgaggtagggccgagaggcgtgccctccatcggtgtcgccattggtaggactgccatgagtgtgtaagagagagaacttaacttgaaccataatttaatatgtgtgtgagacttctctttcccgggagcgccagaactcctctcactgctagaaacatggacgcctagagtgcatgaggatttaagttcatggagcgggtactgccaatgcgaggttatcaaaaagctttgccgtgacgcgtctcatgtgttgggacgaggctcatgtgttgggcagtcgcggagtgcgggtaaagtgtacatccactgcagtgtgagtaaaccaaatctattcgaatagccgtgctcgcggttattgagcaccgggacatgtattatacttagctagactctaaattctttaacttgtgtgggatgggatattgcatgatgatttttatgctgatggagccacttcctgagaggcgggaatgtggacgtcctcagaaaaccataacgattcaatggcgggaagctatccttgggatcacaatggatggtggacagaaccgtcattgtttaatatgaacactggtattaaaacgtgatcaatctatgctaggtcttaggcttgtgaaaagaattacaaaatttgctttgcgcaaaagaaccatagccatcctttgaattcctctgtcatgtgcatcattgctgtggtggcttgctgagtacggttggtactcatccttgcaaatataaaatttatcagaagcggaagatgaagcctcggaggatccctatgcctactatcaggagggagatgaagacgaaggcgtccagtaggtcttagtacggtcgttgcctgtggcaatggcatgccgctgcctgaattccgctgccttatctatttctgcttttggatgtattccggaccgctcggtccgatgatttaagactatgcctgcgggcctataatgtaataattcgtattagacactcgtgtatgtgcacttggtattccagctatgaatccgtgtgtaccaaactacttgatccagggaaatggtactgtttacacgattgattcctgttataaaaacgggggtctacacgccggtcgcgtcatcggcagacaaccgtgctcccacgatgcatctgcctccggtggagtggaggtaggtatgacccatctcgtcggatggtcatttggaaagcagccatggcaaatctccgcccattaatgagggagtaacagggagatccccggtgtcaggcgagagacggcgctgagcctcactcaaggacaagttgtgatttagcttccaggcgaaggtgcaagccaagttttggtcaagagagggtaggtccccacccagaagaaaagtaggtagaagtggtgcatgtagtatccccttgagatataaaaggaggaccttgcccaccaaagagaaagaaaaaaaaaaagaaaaaaaaggaggcgagaggggttctggagcctgaactctctggctctccggctctctgtaaatccttcacacacagatccaccagaacacaggagtagggtattacgcttctcagcggcccgaacctgtctacatcgcccgtgtctcgtgcacttgctctctcgcgaacattctccagatcgatcgagggcgaagaacctcacttagcgcccccggccgaaccggcaaaggggggcctgcgcggtctcccggtgaggagccccacgctccgtcagtgctatataacttgcaattggctgatttttactgttggaaagtagccgatagagttaaatctcgttattaatttagattatattgtatatctactatctcttagagattttcatcatcttgcctagatcttatacttatctttatgcttaatgctgcatcggttgggttcgatctattaagtaatatccataattataaatatctagtttgttttatgattgtcaatagagatagtgtcggagttccagccgatcttacctgatttagctatttatatctcatatgcttgattgttatgctaaatctgccttttatattaaaatcttattgcattaaagtatattaggcttcttgtttgatatttttttgcttgttttgatatcttagtataaagtggtatcagagtattagccgatacacgctagatctatttggtcagctatgctataaacatctatataatctttgcttcaatgtatgtttcgacttaagtgatttatactgtctctgcatgacgaccgatctatcccaatcacttagtttaaacatatatcgaaggaaagattacatgtcattaatatctacagacgatcgagtagatttagttttatcttattcatttattactgccgatcgattcca

SEQ ID NO: 23538 - DNA, 2324 bp, Oryza sativa
aaatgtagtctgacaacctgcgaatgatcaggctctgtggagcaagcccaaaagaggcttagcccagccagcccaaattgcatcagcctatcacttttataactattaagcagcttatttttgtgaaaacatgttcccatcctatgcaaagacaattgggctggtctaacccaattaagaaacactggtcaggctagtcaagagagcttaaataactttttcttttcttctgtttatatgtgatcatttactgcaggaatgagctatttcctgattagtaggctatcttcttgtttactttactatttctatctactcacagcaattaataacagcacataaagtatgctaaaaaccttaaagtttcagcttcatcataagttgatattagtaaatgctaacaataactaattaatacggttatccactcgcagcaaactgcaacaaaagaaaccccccaatttctcttattcagaaaaaaaaaaacaattttgttgcctggtggtcatcattgtatatatctaaacttcactacctaaaaaagactatggaaagtaaatgaattaccaatgaataaaaggtaattgacaacgatcatatcaccaacaaggattatatgaatggttaatagaatccaggagtgctgagatttttctcaaactgtataatggaaatataaatcagtacacttcaaatggtaagatgaactggtcaacgaccagtaagcacgcctaaaaataaacatgtacacaaattagcacttcacacaaatataacacgtcagtttttgtcataataaatgacacagatatgatagtaatttctattcatagtagtacaatgaatatgagagtaagaacacttgaacattaatgatgtagacagaaggaaacatggcaagatctcaagtagcaaataaatgctaactcatgtgcttaaaagagtaaactttatccacatctgtgagcttaactacttaagtcatacagtttgggatattgatccaactctaacagcaatgtctttcaactgggaagaaagagctattctacaaaattgggaaagggaagactgctatttatatcgaaccgtgtgtaagaatgaatgataccgaacaataatacaacaaggcggcagctatgccaaaatccgtgtgcctataccctgcatcaaggagatgatgggtctttaaaatggtgcatgtatgcaaaactgagacagagctcctgatcacgcttatcaccccagccaccccatcctttgaagccagcctgatacccctcctgcctcttgatgatatgtactggccagttagctttgatgttagggaccttatcgatggcatctaattgtactgtcgcgtcgccattatccacacagacattgctcaagccttggccttggtgcaggccacacttgccgaaatgtgcagcgctcctcctaggtcccctcaggctgtaaacaggagatccgaacgacggatacacggttgcccacatcgttatatcccaattgtactcgtcgaatgtgcagaactgcttagctttggcatgaatcttcctccaaactgtcctgttgaaggcatagccaatgttacccatcttctcggcaaccaagctctcccaaccttcccctttcgccttgacatccgatggcgccaagtttatagcatagcactggggacacttgctaggcttcaagtcgacaagcagctgcgcattgcggtacgcattggggaagatgtaatgatcctcctcgatgaagaggatgtggccatcgaagtccctggtctcatccagcccatcccacacggtgttcatcatccaccaccagtggtgcttgagcgagacgattctcggggagcgatggttgccgtactggtccgggtcgccctggcagtgcttctcggccgccttgtccttgccctggcagtcaccggaggagacgccggggaaggcctccgggaagaggtgcggcgagtagggcgcgaagatctgcttgacctggcagaaggtgatggtctgcacgatcttgtccatctccgggaagtagccgtcgtggctgacgatgagcagcgcctccccgatgccgtgggcgcgggagaggctgtcgacgacgaggcggaggtagcgggggcggttgtggacgtagaggacgatgttgaggtggccgtcggggaggcgggggaagcggtcggcgttgcggggcgggagcgcgttccgctgggagagggagagggagagcgcgctctggcgcgggagccgcggggtgaagtccgggtcgagcaggatcttgcgctgcgcgatggtgtggttgttgccgcc

SEQ ID NO: 23539 - DNA, 6021 bp, Oryza sativa
cggtcagcgcaaggaccgcgagcacgacgacggcgaggatcggcgcggcgcggaaccgaaggcgcgcgcggtggtgcgaggacgcggtggccatggcggcagcggcggcggcggcggcggcggcggcggatctcgagccgtgcggttgttggcttggctgctgcttggctactacttttcgcttcttcttttccttggttttgccttcttgcctttgccgtgtttttaccgtctcctcgttggggtccaaattcaaaccttcttttcttacctcaacttcaaattcagactgctctaagttcaaacttattttgaaattgaggtgtactactaatcagttgctttctttcatgccgtgcaggccggggggggggggggggggtgtaattgggaaaaccggaggggctgaaagtgacgcgatgacaatttccacccactaaactatttaccaaattggcctgtttagcagccgggtatagcagcagcagcagtctttcgttgactaggttgccgttccaatccagatcagtcttgactaatcctcattgacatgattggttagtgaacttctctctactggtaatccacccgtgctaacgctacggctatatttgtcaacaatcaatcagtcaaaagaggcatatgctggcaacataggtatttaaatatataaattttgaatcgccaaccaaagattcatgtttttttatgtacatttggcttgaataatgatttcatattattcatattctcgtcagaatttcacttaacaaatttgcttatctctgtcaacgcctataccttaatatactatcataagatccaaggcatcctacataaccatcaacccattttccttacaggagctggactcttcacaagtccgcaatccatcaccacatttttcttggaggagctggactcctcacaagtccgcaattcatcacccgtgcagtgcaaatgtgccacatgctagtactggtgagccaatggaaatgaaatgctgagagaagccatatgaaacatagctcttaccaataggaagaaaattcttcagttgtatatgtagtaataacttactcctcactccgtctcaaaatataggtacctctaagattcaaatttgtctcaaaatacaactacttgtacctattttctcatatcaacgaataacaaccatctcacgccccaaccttaatctcttttttagaaaatagcataggtacttgtaatttgaggcagatggagtacatatgttctatttagttgaaacatacggaggatctgagaaagggtgacaaattacgtaggaatgttgaattaagatgtgctagcagcaagcttaagttaacaatagaaacatgtatccttttcaatccaaaagtttgtaagactgtagcactaaaagtccactaacctttaaatcagtggaacatttaaattttggacataacctttaaaatcactggaaaatttaaattatgaacatatgaagttaaaaacaaacatattggttacaggttcactggactcatggtacaagtcaaataagatatgtttaccataattcacaactgtagaattctcagctgctcaagatataagcaagctcaaccacaacccatattgattctgtgtaaaaaaaaggtacatgtgccaaccacatacttcagatttgttgaactgcacagcttatacttttcttattccattttgaatgccttgcttcaattgtgtggcactgaggtgaaacaaattctcctatggtttttttttccacagttgattataagctgtaacacttattggtgaccatataattatttgtgggcaaaacatccttactggaaaataaactatgatgacagaacccaaaatcaactaaaaaaacccaacaaagcatgctcacatatttatctattaaccaaaagaaaaatcaatttacctggtaaatgctccaaagggtgcagaagagaaagaaaatctggaatcaaaataaaaaaattatctactgctgctactaacacgtgaaattaattcagtcaaacgcgaaaggttagctagatattaagtggtaatggaattttatactataaagttaaacaatgattgtttgacagcacattgcttgtaagcacctttggtatcatcattttttctatctctgcggcttgtgctacggtattctagcaaagtttctctaaatcaagagcttcagtctggtaaaaccatatacatgaatcgattcagaaaataaaaatttagtactaaaattatgaaatgctgacaataggatttcattttttttttgacctgatagcttgataaaacaatctctgttgcttcaatatccgactgaggtgaaaccaatatcatagtgtattaatatatcatacagtatgatatagtgcttcccgattagattttgctcacatcaccctggtgttttccctcgctcttctccttctccttgggagtgtttctcctttcaatccctctctgtcaaaacacacacatactgacattacatccaagctaatacatcaggtatgactgtatgaccaagtttaaatttcagtgcacacgcattagcataatttggatatactaccaaactaatttacatgatttcgagtaggaatttaaaaaaaatcagttataggcaagaaatcaaccgaaaggataaactgcaaaaccgtgaatgcaaaagagggaccctaccccattgtcattgcccatgtagtgtgctttttcctccagaagcagccctctcaatcttatagaaaagcaaggataaattttcagaactattcaaacactttcatacatttaaattccagaggttgtgagttcgaacaccttacaggcagcagccttttcaatcttcccgttgttgcatctattaaaaaatagaaagcaaacacaattagctggagtgactgatagtgggaaaccaagaacaagagacatggtgctagtagtatgaaggcaaaaggtataagaggcacagcatcaaaactcttactgtaatttagactgaagagcttgacctactttgtcagagatatcattgcaatagttaatggagaatattgccagtaatcaacagcttatcgtaaaatttaagtcttgtacggaaacagccatctacattctctcgagcattattataatttttaacatcttttgagcagaagattcatcaaaaattagaattcagaacaattgttgagcattgcatttgttactggttttacaataccttgataaaaccccacaatactttcattgtacaaacatgcagtcctcatgtgcaggagaggaactgaagtgatttctgctgtaagataaataatgcaagtatcacaaaaacagctaattaggcagtgtgcatccaaaactgcaatgacatagatgaatgagtgatgctagagctcacggtgccaaaaaagtgtggagtcggcaaactgataaaagtccccaatatcttgaaaacttccttgcaactttgttaaacttaaaactgagtggcgatggattcatgtcggtcagccggtcaccaacaatggtgcaacatctaatttggaggactgaatactgttgttctctagcctccgcagcactgtagcattcaaaaattggatttagttcaaatatgccaacaacctgattacctgaataatgttgctttctagcctcttgtagcattaaaagaaattggatttagtagaaatataccccttcactctagggtagtgcagaatattccattgattattgatctgtactggagaccaggcgtttagtacatttagtaaattcggacaaaagttagatgaacaacttatgtttcaggggaaaataacacgctaacatctcataattcaggtttagaaaataaaatacacccatattaaagtacagttacaatatatttgcttaggctaggaatttagtcacaacacctttcagaatcatcgtcccaaggccgatcgcgatcatcagaatattcagaatcacgatgctatcttcttttgcttctatcacggtgatccctgtggcgatcatggtccctatcattatcaccattttttaaaaaaccatgagaacatcattctgcaacacagaaggtaatgggccgtaattttgtaaacgtgcgaggaaagggaccaataaatataatgagaataagtgaatagacattttggccccaaggtttgcacataaggaagttgcagcatttttccaaaaaaaatatttcaagcaatgtaaatctagaggatatttttgccagcctaacgatgaggccctcagctaacatatccccagtgcagggttgtcattttaaacatatcagaatatgctactgctcaatgagcaagttgattgtaaagtgtgacctattggaaaacaaaacaactttacaatgagcaagtagattgtaaagtgtgacctattgagaaattattggctgaggaggatgaaaacaattactttaactcgtctgaattgctagaattgacaattaaacccattcttaatccctttgggcatttcatcaaacatatgtcatgcacgtccaaatttgcaaaatcgacagaagcaagatcagaaaccacctttccacccatatgtggcagcaatgatcttcacgttacccatctcgtatagggaggatctgcacaaataaagcagtaaaatcaggagccaaacccaccattaaaacccaaagacatataatcagtagatttacctcttttgtggaggaatgattctcagtatctcacctgttgttgactggttggtagcccgatccgacagccaaggactgaagaagtagaagctggtggatgcggtggaatgaagaggcagaaagaggtagcagccaggcagcaccgcggtagtaatcactgaaccctccctcgagctcttcactgctcgccgttctgcttctccgtagcacggttcggggtggacacggaaataagcaccagtcaatcgtgacaccactcgaaccggaaccctagccacccaatccccgcaccgcgacactcgaatcggagcccaaacgacgccgtacagaacttcaccttagaggggagaaacttcgagggaccctcaccttcgatgatcatcgccatctccacgagcaagtggcggcggcaggcggcatgacgatccgacgacgacggaggggcagcacgtgagggatgcgacgacagcggaggggcggcgcgggagaggagagaaatcgagcagcggtggacgggggatcaaccgcgcgcgggtggggcgtcggcgtcgccgggtgagtgcgagagagagaggagggaagagccgagcgagacgcgggagggtgaatgcggcgtgatttccggcgtgaggaggatgggtgcgaggaggggaggggatgagagggagacgtggggtaatctgaggtgttggattggatgattttgggccgttggatgtgtgatatgatgagtgatgaatgagtgaaaccatttgttaaactataggatagaataataataacttaactaatcacggtcacggcatataccgttggaataactgcaatcggagaagttggttgggtcggttttgtgatgggccgagcacgagttgccaatgggctttgtgccactactacttccgtgccgtgaccgcccgggcccagcacccacacaccgtgtcgccgtcgcacgcgcagccaaagccaaagcccagcgcgatcgcacgctgcgtgtgcgtgtggcgagcgagtgcgatgtgatgttctcccgaatttttttcatttttgaatttttttcttttaatatttacagaaataatccatcggcgcaaaaaaattacaaaaagaaaccctgccgccctctactagagcggcaagctgacgtggcaaacaggggagggacggacggtgacggcagacaggaaaggagggtttttttttttgcacgaaaacccttgccgccagggcctccatgcaaaaaaaccagcccgagccgggtacttttt

SEQ ID NO: 23540 - DNA, 5637 bp, Oryza sativa
ccagccaaatgctttttagggctgcaaagggcggcaagaggctaaatgcaattttcgcagacggcggcagatggtgccgtcgagccgccgtctgccatgttagcttgtcgccatccactagggcggcagggtctatttttataattttttgcgccgatagattatttctgtaaatattaaaagaaaaaaattaaaaatgaaaaaaattcatgttctccccctcgcgactgcgatgccggacctgcatatggccggtgtcatcggctcatcgctcccatcagagtttgttgccgccttgaaatctgcagtaaaagctccccaccccccaccccccatccatccaattgatagatgcacctatatagtccgtatttcattcgtcccatataaaacgaacatataacttaatgtgatatattctaacacaataaatctaaacggatatatatctaaattgataacaatataatgtgtcatatctattattatattagatttttatgaaacggatgaattatttgtgagtagtggtactaagggcaagtactataaacattttattactaattgcaagataccatgtagactcgtataatgatgtggaggagagaaaagaagataagagagaggagcagccacccatcatgtaagggacaacctctacacaaaaatcaagaaatatgagagaaagagagaagtgtattgggtgtagtgtaagtagatgcaatctattcagagtatgtattacctctaaattaatatgtaaatgatttaaacaaaattagatgtgatcaaacttgtctaaggaacttcagatcacgcgcaattcagatcacgcgcaaatcaggttacaacaatcctatgacgcacgaactaacgcatacaatgattggtgaagggcagctggaccgtctacaggatagtttcagacttgtttcctccctaacagtgtgaccacacttgtgacttattttattattatcgttatgagattatcgtggggacttttcctaagtcgtaaacagcgccatgtttatgaaaactttcttcaccgatatttttcaaactcttttagatttacttatcaactttctaatattaatgcattcgtgtatgtcctcgaataattattactgtcgacgtttgatgtcgtcattctggtatttgcatagtatggggatcatcaatgctaggatatacgcgagactgaggtaaaagagatggagacatggatttttatacaggttcgggcccctgagttatcagataataaccctacatcctgttggccgaagccggtattgctcttattcaccataatcacaccagtacaatatgtggatagcctatctaactgttgtcgacatgtcggtctgaaggtctgactcgtagtcgacaacagggtagccttcctcctcgaatccgtgcccggcgagatcagagatagcgctttcgtatctcctgacggtatccggagacaccgtaggggaatagccatgcctatccctgaagtcgatatccggcggtgtgtcttggcgtatgtaggcttgtatgttgtggcttctggtggacgtgtgttgattgtcatgagtgtcttccatggtcctttcatggtggttgtcgatgaggtggtcgtcccgatcgtggtgatcgtgttgatcgtctcatggtgagtctgtgtgtccctgtcctcctaggggggcttgtatttatacccataggtgtccccttgtccaagtagaactagggaaaccaatatggatacaatccgagtagtccttgtcgtttccatgtagaactctggctgtcttttcttatccggaactccctcctatatccgtaggttgtttccgtataggacatggtatgtggtgggtcctgccgagatttagtcaactactattaggtatgtggtatccataaccatgacaattacaaactcaatttcaactatgtttcatccattaaaactttagaatgcaggctttacgtttagattgtgggttatactccatccgtttcaaaatgtttgacaccgctgactttttagcacatgtttgattgttcgtcttattaaaaaaattgtgaaatatgtaaaactatatgtatagatgaaagtatatttaacaatatatcaaatgatatgaaaagaataaataattacttaaattttttgaataaaacgaatggtcaaacacgtacttaaaaagtcaacgatatcaaacattttaaaacggagggagtacttcactaccgtcagaagtgatggatgctgtagaacttgacagagcgttgaaggggattatggtttttcaagtccatcggtcatagaacttgtgacaggagagtaaaaatgacttgagtttattttactccctattgttacagaaaaacgttgttttaaatatgtgtagctatcgttagctaactttgatcgtagtttatggtgtaggatataactaggttcgatataaaactacatagccaattgtcttgttataaaagtttatatgccactccctccattttatattataagtcatttaccttttttcctgatcaaaattatttaggtttaaccaaattgatagaaaaattagcaaatatttataacatcaaattagtttcatttaatttaacattgagtatattttaataatatgtttgttttgtattgtaaatgtttctatacttttctgcaaacttagtttgactacgtacaaaatcgaacgacttataacatgaaatgggggaatattacatttatgtaactgttctttattcatgcaaaagaattgaattgctaaagtcatgtcttattgcctttggaaatgtttaaacgatgttaatttttctaactgaaaggagtccaatgaaataccagtgtcctcctcgtttaccagctataaaagacagtaaccatgtgcgtgtcctcgtgcgtcgattcaaaatacgggcatacgggcaaaccattgaccttgaccgtgcaccatatactaacatccaatgacgacagtgacatttaagatgtgagaagtaaaaacattttaaatttcaaacgaactcccggttgcaggagaagtataggatgcctaactcccatggaaaaaaatcaacacaaactaaaaaatcttgatagtacctgcataatgtaaatccaagagtttctagccatgtttaatttttgcctcatcttatctacttaattatagatataattaaacaatttaaaatatatataataataaataacttggtctaacaaatgtagtcgaagaaagtttattaaggagatatagaatcttaagcatcgaacaaataacatatttcaataacccgatgaatattaacctttatcttttagaagtaccacagtacgtgtcggagatatgggcccgagggtatgcgaagtgtggagaatctaccttcctatcctgccgtgtgtccctacagcttggtcctgcccccgcagtccgcgaactgctggagcggccggggagggggggtcgcggcctcggggtgccacgtcatgcccctcgggcccttgcatcgctttgccccgaggccctcgcccagccgccatttggcgggggcagcgagcgaggagggggcccaggctgagcctcctttaatacgcgcaacgccccaactgccccctgtctcatttaatacagtgaggcagacatgcggagtgctaaactgacacgccataatcaagaatgaccggtctgtaaccggcctgacgctggtcacatctgactggaccgacaaccgtgctcccacgtcgcgtctgcttccggtggagtggaggtaggtatgacacgtcccatcagagggtcattcggacggcggcaccacaagtcttcacccattaatgagggaatgacagggctgtcccccgtgtcaggcgagggacggcgctaggccccactcaaggacaagctgtggcttagcttccaggcgaaggcacgggtcgagttccggtcaagatagggtgggtccccacccgaaagaagaataggtaaaggcggtgcatgtggtatccccttgagatataaaaggaggaccttgcccaccgagaagagggagggggactttggaggcttgaactctaggaaaagaagagtgagagtgctgtccagagttgaggaacccttgtaatactcaactataatctcaaacacagtagtagggtattacgcttctcagcggcccgaatctgtataatttaattacgtgcaagctagctagtaaccccagggacggattcgtgatttctagaggcgagcttcttctcccggccgaactcacgaaaggggggggggggtctcacgacctcccgctattgagggtcttccctcgacagtacgaatttccaacaagtttgaaaaaaaaagagcatagttcaactggattcaaatgaggaaattactgtacaaacgacctaaccatctgactcacccacggatgaatctaatcaacggttgcaaatgaacatgctttattttgattggtctatgatcacatatctttagttatatatgagttatacaagtaaatcgtatctgtagcaacaatattcaaacaaaataactagttttagaaaaaagaaatggtttcaaacatgttccgagtacacaacaatacttctccaatctcataatatagtaatctaatactaaatgagtggcacctggtactacgtaatggtattaggttttaagggcctcttcggttcacatgatttccaaatcacagaaaagaaaaaatacataaataatataggaacatacgcacaatataaaagattggaacacatgaatttttcctccaacgagctgaataaaagagaatgaagcagatttttcattcatatggaatcagtgcatttcgaaggagttttggaggattggcttagtatttctatgaaaaactttcctctgaattctatgaatcaagtacataaatagtgtttgtttcaaaagaatcgagaaatccttcgaacctagtaataatgcctactctttccgtctaaaaaaacgaatctaaaactgcatgtgacatattctaatacaataaatctaaacataggtatgtccagatttatagtattaggatgtgttctgataattttttatgggataaagggagtaaggttttagagtaagaaattggccgagttcagttccaaacattttttttcaaacttccaacttttctatcacatcaaaacttttctgcacacataaactttcaattttttcgtcacatcgttccaattttaaccaaacatccaattttagcgtgaacaacacacccatgatttcaaacatgggccgagtttagttctaaaatttttcatcaaactttcaacttttacatcacatcaaaactttcctacacacacaaacttctaactttttcgtcgcatcgttccaatttcaatcaaactttcaattttggcgtgaaaacacacccatgttccactgggcgcacgttttcgccgaaacgccgagtcgccgccgacacggcaaattagccacgcatccattcgttcgttcatcgcaaaaccaaggggggatgatcatctccagccacgtataaacccaaccaaacaccctcccccctctcgcccac

SEQ ID NO: 23541 - DNA, 3459 bp, Oryza sativa
agaaccagcctcccctcccccaaccctaaagcctccccgtttcattcgcccccccaccggatccagatcaaaaccacacgccgatccagatcccgccgggcgcccagccatggcgcgcctcctccccttcctcgtcgcggcggcggcggcgttggtggcggtgtccctctccgcgccaggcgccgacgggttctacctcccggggagctacccgcacaagtacaaccccggcgagccgctgagcgtgaaggtgaactccctcacctccatcgacaccgagatcccctacagctactacagcctcccgttctgcacccctcccgacggcgtcaaggacagcgccgagaacctcggcgagctcctcatgggcgaccgcatcgagaactccccctaccgcttccggatgcacgccaacgactccgacctcttcctctgccgctccccgccgctcgccgccgacgccttcaacctccttaagaagcggatcgacgagatgtaccaggttaacctcatcctcgacaacctccccgccatccgctacaccaagaaggacgactacttcctccgatggaccggctaccccgtcggcatccgcgtcggcgtcgactactacgtcttcaaccacctccagttcaccgtcctcgtgcacaagtacgaggaggccaatgtcgcccgtgtcatgggcaccggcgacgccaccgacggcttcccttccaccggcaaggacggcagcggcggcgccgccgggtcatccggctggatggttgtcggcttcgaggtcgtgccttgtagcatcaagcacaaccccgacgacgtcaagtcgctcaagatgtatggcaagtacccgaggagcatcaagtgcgacccgaccaccgtgtccatgagcatcaaggagaacgagcccatcgtgtacacctacgaggtgtcgttcgtcgagagcgatatcaagtggccctcgaggtgggacgcatacctcaagatggagggtgccaaggtgcactggttctcgatcctcaactcgctcatggtgattgctttccttgctggtatcgtgtttgtcatattactgaggaccgtgaggcgtgatctgacgaggtatgaggagcttgacagtgaagcgcaggcgcagatgaacgaggagctgtctgggtggaagcttgttgtcagtgatgttttccgcgcgccaagcaacccaatgttgctctgcgttatggtcggggatggtgttcagatccttgggatggcagtggtgaccattctgtttgcggcgcttgggttcatgtcaccagcttcccgcggtactctgatcacgggcatgctgttcttctatctggttcttggaattttggcaggatatgtgggtgttcgtgtgtggaagacaatcaagtgcggtgatcatacagggtggatggctgtttcatggagggtagcttgcttcttccccggcattgcattcctgatccttaccactctgaacttcctgttgtggggaagccaaagcacaggagccatccccttctcgttgtttgtcatattgattctgctctggttctgtatctctgtgccgcttacacttgtaggtggactcctcggtgccaaggcaccgcacattgagtaccccgtgcgcactaaccagatccctcgtgaaatcccacctcagaagtacccatcctggttgctggttctcggcgctggcacactgccctttggtaccctgttcatcgagctcttcttcatcatgtctagcatatggatggggcgtgtgtactatgtctttggattcctcttcatcgtcctgttgctccttgttattgtctgcgctgaggtttcccttgttctgacctacatgcatctctgtgtcgaggattggaaatggtggtggaaatcattcttctcatctggatctgtggcgatctacattttcttgtactcgatcaactatcttgtttttgacctaaagagcttgagtggacctgtgtcggcgaccctctatctcggctactcactcttcatggttattgctattatgctggctactggaacagtgggattcatttcatcattctgcttcgtccactatcttttctcatccgtgaaagcagattaagctcatcccgatgcagagtgtattactcaaatgagaggtgagaatagtggacatcaaaaagtttgtagtcacaaaatcttagctcatgtcatcttttggtatacaaagactgaataactattgtaagctttactaggatttatcaatgggttttatggagagatgtgctagcagcttgcacgatgtaatagaatgaattggtttattcacattttgagtcattttagttgctctttctgctgccatttagctgttaagatgtaagcttagtactgctgtctgttgcaatcgtgtttggtatcattttcctaaaatgttagatcaattttttgacttatcagaattgtgatggtttgatgcagttgctacacaatatagtgattatacttatttttctttgcaccagaactccaactcctaccttggttcatataagaaactctccttattttgtatggagtaataattaatagtcttcatgttttgcatctgacagctatactttggatgtcttttaacattgctaagtagcttaaatacgacccttatgctataaattactagatgattgatctatgatatatgacatctcaacataatatttcattgattgtgtggctttctttttccagttgttttttacaatcattgctgggtggttgcatctgactcattccagcgtgctattccatatgtataatgtgtagttgaacaactaatctcaaagccttggtgattcacttactaaaaagaactataaaaggtagcctcggcttcaaacagctgagtgagcttactgtttcttcaacttgaaagaatgtgtctgataatcacggtaatctattgctgttaatcctggtaaccttgggttatctcttgccgttgccggttcatggttgcagagatctagtttgtactacttgtttgctggctgttgctgtttattgtatttgtaaattgtaatggtttgttctttgcttgctttcagttttctcgtcatatttctactgggacagtttgtttcctctatatggttattgttaaatcacaggtggtccaaatttgatgatttgcattcgagattatgtaacggcatactccaagactgacgcatttctggcgtccttggtgtcctgccctgtcatttggttgttggcttatccatgcgatccaaaactccaggactgcaattgctgatactgcgacgaggtgccctcgtctcatgatttttactgagtatcgcttgcttataacaaagcttggaatgatctgctccgtgcttgacctgttgaaattcaaaaactgcactacttgcaatgatcgcagtatttttactacagtactagtgatca

SEQ ID NO: 23542 - DNA, 667 bp, Oryza sativa
tgcacagcgtaccaaagctaataagcaaggccctgccaacagattgcagctcatcatcgactatctcattgaccctatgcaatcaagttttatcaaaaacaggtcaatctcagaaaatttcattctagcatcaaagatggttcaatctgcgctcaagagaaaggagccaatgatagtgctgaagctcaatttccacaaggcgttcgacacagtaagctgggatgccctgttcaaaacattggaagcaagaggatttcctgaattatggataagatggatgaaatgtctcctttgcacagggaaggcccaggtaatcatcaacggtgaaaaaggataatcaatccaatatataagagaggggtccgacaaggtgacccttttatcaccatatctattcattctaatagcagatgtactacaaaagttgatccagcaagcatacaataccggggtgctatcacatcctctagacatagaaggagcaccaccaacactgcagtacgccgatgatacactaatcctgatcagagaagctagccaagcctcggcactcaaggaaattttagattcattcgctgaattctcggagctcaaaatcaacttccacaagagcaccctagtaccaatacacctgaatgcagcagcagaagaattggtaacccagatc

SEQ ID NO: 23543 - DNA, 2600 bp, Oryza sativa
atctacttgtgtggtggaagttgaatgctcatagatacccggtggtatctatgatggctaagaactttttgactataccagccagctcagtgtcttcagaatctacttttagtgctgggggaagagttctaagtgattatcgtagttctctacgcccaacaatggtgtgaggcgttgatatgtgcttctagctggattagaggcgctccaatgattacggtactcactattatgccatgcataatttatgcattttctcttcttaacacattagtagttgaattaacttctgatttttctgaatttcaggcgacagaagaagaagaggatgttgagagtattacatttcctcaaagtgtagtgcaaagcaactagtaagtaaatggagtacttcactattatttttaggttatactttaattactcattttttcctatttctgtactatctcgcttgtgattacatgatgatttatcatttatgtaggcaaatggatggctcatggctggaagtggaacatgttgctgtggtgtgtgcagaaagtctaggagttgaagatgtggagatttccgtttactattttgcgaaataataattagatgttctgtaattatcttgtgaatttgagaatggagacttttgacttttggaatgtggtctaagttatgtactctctataactctattactctatacttctattttggtgtggtcatgactattaagattatgtgtgtcatgttgggacatgtcctgaatgaatgaagtatggagattgtgaattgtggtcttgtgatcttgtgaaatgtataatatgtcgttgctgtcttgctgatcgtgcatgttgatgttggcttgctagttgctacttggtaccgaactactgattatttcatgcctacatgacctgtataagtttgatcataatgcgtacttgctgtaaacttgctgaaaattgattgctctattgttaaagtatttacttgttgctgtacatcacaagctggctcgagccggcttgagctttgaaacgaaccaagccgagctgcactttttgctcgttctattaatcaagccaagccgagcccgtagttgagcaagctttcacgaagctcggctcggctcgtttccacccctattataatcgtagtacggtttttattttttttaagcagcagatgcaggagacgtcgcgctgcggtgcgtggcggcgtgggggcaactggccggtgggcgggcaggacaggacagctagcgagcgcacagaacggtgctctgcgtgggcgtgtgtgtgtgttttttttttgggtatctgcgtcttctgcgatggcatcgtgtcgtctagacttgggacacggctcgtgcgcatcgttggcctggcttctgaagtggctgcgccaccatttctccgttacttgatttgtttttattttagtatttagataatgaacccgttcactaattatagtggtgatcaactactaataaaccgcctttgctggagatatatatatactatatacggacgggtgtatctccaatcatatgacattttgtcattatatctgtcgtagttctgcttgatacttcatgtacagtatcaactacctgtagtagtatataacaacgagctggatcgagattcttatagcttgattgaatcaattatgaattttgtgccgatcggctcatgttttgttatttatcaactgaatctcacaaatcattacacctataagaaataaccgtgcaagctataagaatcgtattaagtattttggaaaattaacactaacaggccggctctatcgtttttatgtgcacggaaatgaattattattattattattattattattattattattattattattattattattattattattattattattatcatcatcatcatcttctgactttaatagcagtaaatatattatcatgtaagtaaaaagccgattgagatgataaaggggttaatgagaaaagaaaaaaaaagatgaagaagccatttcttctctatacacgaaacaattaataatgaaaataagtgaacaggtggataaacagagagaagtaagatgattgaatgagaattgatttaaaaaaacatgtcaattatgtatatactctctccgtctcattttaaacacagctataagtttccgtgtccaaatttaattgttcgtcttatttaacttttttataaaaaaatgttcatgttttatcatctaataacaataaaaaaatactaattataaaaaataaataaaatagataataaaaattagacacaaaaacttatggctgcgagttaaaatgggacggatgtactagtttttaaacataacttctacatgatatgctaaggattgaaactgtttatactagttttttcagtaggttaaaaattaatgatcttactagtatgtcctatatatgtttttagaaggcaatgccggtctgggcttataatacattctaatacaataaatataaatataagaatatgatatatagagattcgttgtatttaggtcgaaggaaatacttactcactccgttccattattgtacaacaatctttcaa

SEQ ID NO: 23544 - DNA, 5827 bp, Oryza sativa
gatcccggagttgtcctggtgcacttcgatccccaggtagaaggagagaggccccagatcactcatctggaaggtggccttcatctcctccttgaacgccgcgacctctgcatccttggtgccggtgatcactaagtcgtcgacgtagacacccaccagcaaggcatttcctccattgccccgccggtagatggccgcctcgtgcgggctttgctcgaagcccatccccttgagcgtggaatccaacttggcattccacgccctcggtgcctgccgcaagccgtagagggccttgtgcaggcgtagcaccttgccctccttgccggggatcacaaatcccggcggctggtgcacgtagacctcctccttcaagtcgccgtttagaaacgccgacttgacgtccatgtgatggacgccccagccttcctgagcagccagcgcaagaaggagtcgcacggactccatccgtgccacgggagcgaaggcatcgtcgtagtcgatcccctcctgctgcacgaaaccgcgtgccaccaagcgagccttgtgcttgacgatggctccggcttcatccctcttcagcttgaacacccacttaagggtgatcgcgcggtgaccacgagggaggtcagcaagctcccaggtgcggttctcctgaaccgcgtccatctccgactgcatcgcggcacgccatgccgcgtgtttctcggcctctgcaaaagaccgaggctcaccgtcgtcgcacgcaaggtgcaactgcgcctccaggttgcgaggcaccagtcccggcaccggctggtcgccgagaagatcctccatcgtacggtaccgtagctgctcgccgtcatggtacgcgtcgatgcgctccccgtcgtgggagagcggagtaacgaactccaccgggctgcgctcaacacgagctggcgtcggagtagacgtgcccggaggagtggctgttggtgctggagcgtgtggggacaccggctggggtggtgtcgacgaagagctcgtcgtagtcgaagtcgtggcccgagggtgtgttggtgttggagtcggtggaggctcggggactggggtagacacgctcggtgaagaagagctgcctactcccccagctccctcgaagtggacgtactcgatggtgaagtcgtcgtacgtcggagtcgaaccatcatccaccgccttgtcccatacccaccctcgcccttcgtcgaacacaacatcgcgcgtaatgcgcacacgctgtgtctccgggtcgaggatgcggtaggccttcgagccctccgcgtagccgatgaacacccctggggtgctcctgtcgtcgagcttgccgatgtggccaagctccttggcgaacgcgaggcagccgaagacccgcaggtgggagaccgccggcttgcgcccatgccaagcctcgtacggtgtcctgccatcgagggccttggtaggcgagcggttgaggatgtaggcggccgtcaccaccgcctccccccagaagatggccggcatccccctctgcttgaggagggcccgagccatccccacaaccgtctggttgcgccgctcgacgacgccgttctgctgtgggctgtacggcgcggtgtagtggcgctgaatgccctcatcagcgcagtacgacgcgaattcagccgccgtgaattcgccgccgttgtcggtgcgcagcacgcgcagcttgcggccgcactccgcctctgcagcagcctgcgcatgcctgatggcgtccgcagcctctcccttgctgccgaggaccatcacccacatgtagcgggagaggtcgtcgacgagcagcaggaaataacgtcgtcctcctggtgtggccggtgtcactgggccacacaagtccccgtgcacgagcccgagccgctccttggctcggaagctcgtctgctggggaaaggggagccgccgctgctttgtcaccacgcagacgtcgcagagctgctccacgtggtcaaggcacggcatgcctcgcaccatctccttggcactgagctgcttcagggcctcgaagtggaggtgctcgaagcgctcgtgccactgccacgcctcgtcgtcccgacgagcggcgaggcaaactggatgtgcgacctgcgcgctgaggatgtagagtcgattagtgcctctggttaccttggcaagaaggcgacgacggcgatcccaaatcctcatgagtccgtcctcgaccaacacgcgtgagccgttctcatccagctgtcccacgctgatgatagaattcctcaacgcggggatgtagtagactccggtgagcagcctgtgctcaccggacttggcggtgaaggtgacggagccaacacccttgatctccacgccggaggcgtccccgaacttgacggtgcctcggacgctggagtcgaactcggtgaagaactcccgtcggccggtcatgtgatgggtggcgccggtgtcgaggtaccacccatcagccttgtcgttgctggagccgtcgcagagggagacgagtaccttcggctcatcaaggtggaggaaagccgctgcggccggtgccgctggaggtagctcgatgcttgcgtgagctaggagcagagccggctcttcctcctccacccgtgcgacgtgggcctggccgcgtcgtggctgtcgacagtctttggcccaatggccaagcttgccacagttgcggcaggtgtcgtctcgtgccggcttgtggttgccggtggcaacgccctgggcgcctctgcgggcgccaccctcggcacgtcttcgcgcccaccgtagctggacacctccccgcgccttgcgcggcttatggccgcctgtcggggaagatgactcccccttcctcccgtcaccctgagaggcctcccactgctcccgagtgagatggagcttcccgccgatggtgatgggccccgagagaggccgtggctcatcaccatcgacgaccttgaggcgacctaacgcctcctcgatcgacatcgtggagaggtccagcagagattcaatcgagcgagcgatctgcctgtacttctcagggacgcagcggaagagcttctcgacagctctctcctcgtcgtaggtgtcgtcgccgtactgcaccattttctgcaagagagtgttgagacggagagcaaagtcatcaacatcctcacctggcttgaaggccaggttctcccactccttgcggagtgcctgcagtgtggacttgcgggcgcggtcgctgccgatgcgtgccgcagcgatggcgtcccaggcctccttggcagtccgcttctgggaaagcgagaactgcatctcgggcggaactgcagcgatgagggcatccagtgcccgccgatcctcgtcgtagtcgacgtcaccgtaccggactgcctcccacatgtgccgcacctggagcctcaccctcatcaccgcggcccactcgatgtagttggttttggtgagggtaggccacccaccgccgggaccaaaatccctgaccaccgtctggacgccgtggtgaccatggcgccggtcaggggagagggagccgtgccgcctgcgagggccgcgtgcgggctccgggctgccgccggcacgcccgcgcccgtctgggttcccgtcggcgggcgcacggtcccttgggccgccgccgccgccgtggaggtgggctgctgcccaccgctctgctcgctcccgtgcccttcctcttgccagctcctcaagctccctgtcagcggtgatgtcgccggcgatggagccgttgatgctgctgcgcaaggtctcaacctctacctccgccgcacgtgccgcatcttccgccgcctccgcctccgcctccgccctggctgctgccaactccgctgccgccagtctggccgccctcgctgctgctgcagcggtctgagccgttgctcgcctgcgctcttctgctgcggcgagctcggcgtcctgctgacgccgagtgctcgaggcgaccgaacgccgagaccgagcgtcggacatggcgcacctccggggggctgctgtgtggagagggggaagggaaaggggaaggaggagcaaccggtgctgctgctgctgctgctggctgagagctcaaccgagcttgggaaggggtggaacaagagatgtttagcctacaggaaagtgtggctctgataccagatgttagaatttcaatggttactctcattgagaagaggatggcactcgagatggggcaattttctggttttcttcattcactaaacacaaaagccatgtcctcccaaagaggattggatacatatttatagctgcttgtagcagccatgcagccatgctagtctaagagggtgctgtcagcatcccaacaaactgtcctagagcagagcatcccaacaaactgtcctagagcatctcaacaaactgctgtcctaactgtcctagagcatccaaactgaaagtagagatgctgtcctagaaagctgaaaagcaggaaaaaggcaccacaagaccaagaccaaccagccaagacttattcctacacttacaatcctttaccacaagttcttccaatgatccggccctgccaaggtactccagccactccacacttcctactttcatgcaatcaacaaggtggaaagtacaaagactcttgcaaccaactgccaccgagagaagccctcttgaacttattgctggtgcaaagttcagcctgaaagaccttagtttcttgcaataagccagatagccaataccagaatcatcgatataggagcagaagtttaatgtgagatcggtcagtgaagagcagtgagacgaaagcacaaggagcccttggttgtccaactgcttcccgtggatagatatccaaccagagtaatcaatcactactttccacaaattagggaaccgggagcatagtgatgccaaagcttcagttgccgggtgaagaccacagccaacatggatagcatccctttgctccgcgtcgatagtgtagagctgcttcgacacaagggaaagagagttacgatcacttgtcttggcaatcctcttgatgatctctgcgagcagtggctctgacaggttgtccattgggcaatacggttgccttacttaagcaatatcaatgttcagctggcactacggactggcctaaaagtaataagaatgaaacatatgagatgtgatagtcagatggaattaatgatattaatttagaggtaatactttcgataagatggcaggagtgtttccaattcaactaagaggtagatttagattagcaaataactttaaatgagggaacctccctatgcatttataaatgactaagcaaataaagaatatgcaattagtctaacaacctgatcaactgaattactgaagcagataataaaaagggaagtttctaacaagcaaatgagcagtgcaagtccagaaatactagcattcatctgctgaaactgaactaacatatttggaagcactttactagtaacatgaatgaaaatcacgcgtataacaaggtgcagacgtgcagtgactcattattattttctacaattcactaccttcacaataaacagtacctaggacagacagcgccaactttatctctagtagtctagttggctaagaaacataagaattgcaaactattccgaacccaattaagaaaaacctcaaactattctcgcccttattatctcaataaaaaaaatctcaatcagaacaggggaagggactgaaaacacaactaaaattagagaccggatcatagataccttagagaaatcaaggacctcaagattgggggtttcagagaaggaaaatccaagaaaaagaaagaggcgtcgtt

SEQ ID NO: 23545 - DNA, 14518 bp, Oryza sativa
taataagaattaagacttcttcatggataaatgtgaggattatttacataagaactgtcctgcccacctccagatacacttccttttgtgtgtgcatacttcgttttttctagtacatacaatcaggatccagattttactaaaaaataaattaatatatgtaagactagcaaaaatttgatgcgaaccactctgctcaattaccttgagttctggagcctctactacttgcgctattgcatcacatggaagttctttttgcaatgacttcatcttgccaccacaaatctagcacaaaatcataaccacattgtgaaattttttttgaaacagaaaaacagaaagaaatagtaaaaccctaccatatcttttccagcatttggttcctgcagctttggaacattagaactaggagccgaaggaacagtagcatcctcatgcaatttatcacagatctctgcgacctcaaaagatccagggttcaatctggcagaccttctccgtcgagtttttctgaccacatgtgcccaagagttttgaacaagcttaaatcagataatgatgcaacaatgaacgcattctgttataagcattaagcattgattaccttggatcatcatcatgcgatgacccattatattccacatgaggtctgcagctatgttgcactgtgttggtatccattgtaacttcacatgattctgacttccgcctatttgtgcacctgtttgcaaacatgctgaataagtagtgatgcatgaaataggctactataacccggtcaaccagtcacccactcaaacatcagtaaagagatgaaaatacctcttgtttgttttatcctgtggaggctcatgacagctagtataagatggcacagctgctgagaagaaattggcaacaaatgaagattagaattttactagtgtcctaacttatggcagaggaaaaaacataaaacttcaattgcttcatataaagggggtaaattataaccataaagtaggatagatgaaacgattgccaggtatagtatctagttcaagaaagaaatagtgagaagagtgagcattacattgaatttcaaccaaatgttctctaatagaacctgcagccatttgatgagccttagttggtgcgcatttggaagacctggtttttttctcctgattatgttgcacgaacagaacgatttcagaattcagaactagaaataatgcagctaaacatggtgaatcatttgcttaagaatttgactgcataccaatatctttgctctattttgttgattgttagaagtcttactcatcttctgcaatagtagacgatgagaaaagcatgttatatgtaacaaacagaggttcatacagtcaagctttagaattacctcgagttcagaaccctttactttgagcacggctattgtgcatgcaagttcatgttgcaataacttgatctgcatgtcatatccacagattaatccccaaatcagaaatcatactgcatttgaaaattcaaacaacaaagaaccagaggcagcttactctatcttttccttgatttatttcctgcaaggaagaagaaaacatagacatatcaaacagtctgtaactaccacaaaacaatcagcaatgaagtaagacaaacacttctcatttgccattatgcatagctataactcaaactatgtgctcaacctacaggcctggtgaaccagcattgcacaagtataaacaaacattgacacaagaatggtgaggtagggagctaatggataagtagacaaaccgcaaacatctgcgaattagcctgcacgagttgcaagttcttctgctgcatggcttgcagtgcgaggcggattttctgcaactctactctgctgacttcaatgactttgctgcaaataagaaagcaaaaaataatttaaaaaaaactgtgctacttgagaaaccgcaggttttatcctccgacaacaaaatggatggtagaggcaatgcatactttcgctcagcaagcagatgacgcaacttggcgttctcctgaaagcaagggaggaattaaatggtttaatcggatggaaatcggaattactagcattcaacttggcgctgctagggttgtctgcttgtttgagttagaaccgaaatcccccgaagaaaaaaaaaatagagctagaactgaaatcaccttgaggacgtcagcgatggcgtggacggatccagtagggttgggcctcccggtgttggtgatgtcggcgagcacgacgggtttccccggcgaccgaaggctgccacccttaccggccgggatcacaccgccaccgcgcgccgctgcccctggtttaggaggaggtgcggaagctgagcccgagagaaccccaccatggaatgccacgggtagctcgaaatctaggggatacgatttttacctgcagcggccgccatggctggcccagcggccgcggggcctgtggttgcgcacgccaccgccggaggtgaagccggcgaggaccctcggagccgcagcgcgcgcgcggggagagagaggcggcgctccggtagccgcgcggagaggaatccgatgaggtttcggagaggagaggagaggggaagcgacgcgccggagttggaggcggaggggaattcgaaattttgggggaggagtggagatgaaatctgaaatggttggaattgatggcgacttgacttttttttttttttgaacttgatggcgacttgacttgtcaacgcgagttccttctctcttttttttttcttttctccaccatttgttgggccgtgggctatgagcccgttatgggatccgttctagcccatgggctttttagagtagagccttcgcttatgagttgagagttgagacacgagttcgtttgccgggatggggcttcaactactcttctcttttcagttttcttctttgcatttgcaaaaattgcatcaggttcagaaatgattctatttaacacccaaatttgtcacatagtatgaaatatagcgaagtttgtcagattataaaaaaacatgggcctattgtatagggtcggtccaatcggtggtatgaggccaatctgaccgtcggtataggggtggtcggatgtgccattcagaccgggtggagaaagccttgtggaggctatggccagttcagtttaaatcaatcaacaaccaacaacgcaattatccaatcgaatcgttctttcaatttcacatgtaccttcgtcctaggtttaatcctaatttatccattttgtcggtttgctctataagccatccttcatcgtgggagtgcaaattcttgtatttttttccccaaaccttttgttcctcccataagatgggtgtttatcctaatctatctaaatcggccctgttaaccatatttgatctctaaactcatcttgatcacgagcttcttaaggtcaaggtggttggcgacttaagtcaacaccacgaggctttagatgatttgtcgtggtgactgaaaaaagcgtcaacagattccactttacactaatataaaacaaaataagttttcttacgaacaatgtcgtgcatctatatgcaacagccggtttatccattattaaagagaaaatctacgctaagtgattaactatacgaatttccctcaacgagcattagttgtatgaattgccgccatgcacaagcgtttttcctctttgctatcgccatcagttgaccattagttaacctcgtgtcctttatttccatgaaaatgtacattttaccaaatacatatgagatactcttatgtactccttgtattggtatcgcacttctaagggtaatggacattttgacacattaacataggccaactaacgattaactgacggtgatggcaaaaaatgaagtaaacacttattggcatttcgattaatatgataatccttagaatccctaacttgtcaacagccaaaaagaaacaacatcagttgccgttgaaacacgaatggcccaggaggccatgaaaggacaacgccaagttgtgttgtcatccatcgatctgcaactgcaagtctgcaacaaccaacaagcagcattccgtaatccgtactcccgtattcataatttttcttcccccctgatattaagtatccatgtatgctcagattcagaagcttccaattgccatgtccagatcagccaacccaactgacaaggcatgtacatgctttctgaagaaacgctcgaacaaatacgcagttttctgtgcgtctgtcgtgagacagcctcgctactttccagggggcaccacctgatgccaaacacaagacctgacagcattgttactcgtgattagtagcagttgtaagtacaggattagtacctaatccggtggcttgatcaaacaggaggccgacttttgtgcaggcatccttccccaaagggtgacaagaaccctgtaaactatgtcttgggtttgcatggtgcatgagctaacgacaatgattttttctgttaaaaaatgggttaacgacaatgatccagacattagaggtagtttttttatttgacgaagataacccactcctgaatcctgatagacatgagcacagcaaacactgggggttgttctaaaagcaagatggcaagatgcatatatatgacctgtcataggtcaaatgcttcattcagagttcagacacactcaacctgcatagctcatcctactctcttaactctcaatctctcccagcttcttcaaaatttcctgcgagacaagatgaggatgtccaagttgtcaatggctactgctgtgatcttgctcctggtagtgatggccatggaggttgagggcattcgattggatgcagaaactcgcgcagcaaccagcaaccaaatggtcaatgtaagtgattctgattcactgaatttgttcatcatggaattgtcttctgttcctttttcttttctttttgtatgtgtgtgctgacatatttgttttgttctgaaaaacagaaatcgacagagaatgtgccaaaggattccggtgactcactaggcgaggcgaagagaagcattgctgggaatgaagttagggctgtagcacacaagttacctgagttccatgaagactactatggtcccagtgaccatacacctagacaccactgaagagaaaacaatctttttttttcttcttctcaatctttttgttcagaatagattagatattagctagtcagcggctgcaggttgtagtagatactgaatttcatctgagcttagttagtaagcacatgatggtagcaacatgtgaatctttaacctatctcttttttcccctccttttcacctcattagtgaaaaggagcggttttcatgtactgacttgttgacaatacttgaaagcaacaatctcaagacgttgtccatatctttttgtgattgtgtttgttcccatgatcagcgcagagcttaatgtgacgattacaaatccacaaggatgtcaataccatgatgtcgctgatataactggaattgacttcgtcagtatgattttcggcaaccgttgtgcaatgacaagaatcactgaatcaagcatactgacaagatgagagaagaacacacaattaagagtgcaagtgcttttatttctacatgacagcataagcgctttattattggcaatgtaaaagcagcaaaaggaaccatcaagtgagtagcctcacttaaaggctttgtttcacttaattatggtgaaaaatgcctgcaccgtaagggagtcatcgttaaagggcatatttgcaaacgaaaagtaatttgtgaataaaatttttatatacgtgctcttagcgatctaaaagtaaaggttaaaaaataaacttcgataaaaaaacctcaaaatcagtttcaaatttaaggttgaaaatttaaattttaactgataagtataatcataaacgaaaaagatgaggaactaagttgattagtttgcttaagaagtgtcgtttggtcggcattaagtaaaacaaattactccagatagctgcactacggcatttgataggcattaggcagtagtatgacagtacagtggtactaactccaacattccaagcgtacattgaggaaaggaaagcaaaacacgagtggtcggcattgccggatatgctgcagtgttcttcgccattgctgtagtctactttacatgtccacgcaggatggcacgccgattagagtattccatcaactgttccgttctccacatgcttaataatgatggcttgatgattgagaagctgattagccagccgcctccaaaaaaacacaaaagccacagataatgatgcagagaaagttgtccgtgacgttagcgagacaagaaacgggagaaaagaaagtgcaaaagtacgagattgtggcccaagagggaggtggccgaagcccacgtagccaatgtggcctagtaacacatggtgggccggcccacgagaaaaatcgcggttgcggatggggatttttctcgtggcctccgcgcgcccaacggaggctttgcgtggccaacgtagaagtagaggatgtgaactggaggccacgggcactagcagagatggcaatggtgaattcatcgtcgggggtcacattcacatccacattcccattcctgtagtgataaaattttaccgttttcgtccctgtcaactacgacggggctacattttctcttgccctgtttcccacgtggtgaatttatccccgcggttaccccatccggtggtagttagcactcagtagccgtcaggggaatcggtggcgtcgaacggcgcgagggagggcgctaacggtggacggtggacggacggcgcgacgatggcggcaggcaccaggcggcgcgacgacggctacaggctccgcacccgcgttgacggctggggcgggacagcgtctgcatgagaggaggcggcagcacgcgtgcctgatggctggtgcgatgtaggcgtgcagcggtgagactaagtttagatatgaaagatgtggaggttgattggttgactagggttaggtgttatatatacatgttaattgggtttcaatattatgagccaaaacatctaacaaagtctagaattagtcctctctacagtgaaggcgagtcaccgcggggggcgaggacggtgaatggtttcacccagggttcacaaagctgacgaaagctggtcggtttttgcggcttttcgacgtttcgacatagctccgaattaattttcgattggaatttcgaagttcaaaagtaaatcttgtcgagattcagtcggaatttaacgaaaattggtcgatttattgaaaaccgtgatatcgatggagctcgaaatttagtggtcaaccggtaatgaaaaccccggttccaccgtcccgcccccgtcatccccgatggtgataagtttgggaccatttgattcccgtggagaatagttattaaccatctccatcccctaatatgtgaattcaccgtggataatcggtgattgggtccctattaccatctctagtcaccagccactattcgctttctgctactgctgctgctagcctttccaacgtgcacattttcttaccacctcgattcatttgtctttgtgaagtaaatgcagcggctagtactgcactgcagtaccacacacctggcctagcttggctacttggatctgagatctgactggagccaagtagccaacacaacacgagcgtgcagtgagaggcgacatttgctgggacatccatggtccatattattggactaattagctagctgacccagcaaaaggggaacaatcgagcttatacaagcgttaagtgacaaaatttgggcgagagaacgccaaatcatatatggtcccgttttctgattttctccatgcgatgcatgctgtcacaggctcagattcagagtttcagacagcaaaacctgggtttgaatcaatagaagtacacaacaattcagagcatgaactttacaatcactttctcttttttcccctctcattaattacttttatgtaaaatacatcacagtcacatactccaggggttcagggctttaagaaagttcaggttggacagcagaatgcggcaacagcaagcaatgtacctgctgcacgtggattagttttcagcaaagacggtatcaagttgaacacaaagcaatgacggtcttagctggaaagaaatcctactaatgaaagtataaactacaaagctggagttggagttggaggagatagaccaccaccatgtgggcaacatacattcatgcgaatacagctgcagaggaatgttcggatgctaatccatgtggcgccaatgcacgcatgtgatgcttaattctcgcttaatcaatctactgcttctaaactaaagtttcgatgtttcttaattatctccagatcaacataggagtaatcaaactatgtgttactggtagtaccacactagatcacctggtaatggcgagtcaagctagctcccaaaatgacctggaggagaatattatctactatctctctctctatatatattatcttttgaaagatccactatatatatagtcttcttgtattttcgactatgcaatttacgagacaccaattggatttgttctgtgatctttacgccgccgtctctggatcacatttcatcaaagagtagttataagaagaaacttggattataaaatgggggacaaattaattaaggtcatctttagctcagcaaaaatctcaaataaatacgagccagtgatccgtgacagcaatgcttggcttgttcttgaggaaaaaaaatcatgagatgttcgtggcgaactagtcgttgtctcgttgatagcatgatccatcgagagggacacgcgtctcgcaatcgccgggccagcgaggcccccagctcgatccgatgccctggaattataatcttttcttgggtttgattccacatgctcgtcctaattattcttcttaagtacattctttccttgtcattaaggccaggagtggtagtgcatcgacatcaaatcccactccaaattgcttttgctaaaaacaaattaaagcccaaagagcattttattactgttcctcttcctgaattgtccttgtaggctcggcttatcatacgcacggctttcattttttcccattgatcgttggattttagatcctgcgatacaatggttttcttcaaaatctggtcgaatgtttttactgttttaattttgaattcctgaaaaccatttaaaatttcaatcaaaatctgttttcgctatacctagaaattccacagttttcgccatacctgttaccatgttaacatatcttaccttcaaaggccctggggtgtatgcagtagtagaaagtagaaaccgctaattatatcgacaagttaaaacgaattgaaagattaaatttttggcgaaaaaaatgtttggttttaatcggttttgctcggtaaccgtggtcaggggtacggtggtaactgcagagaagcagtgagcagtgccacgtgggcagcccaacacataagcgggtctctagatctctttcacaaacccaaatcccctcctttaattaatcccgtcccctcagagacgaaagcagaatcgcgttaacccccgacccgagtgtatttagcgcaatcgcaaaaggcaaaagcgaggaagaacagacaggggaacgcggaaaaagggaaaaaagaatccgtctttgcatcccacatccctgtctttctcctctcctacccttcttcttcttccacttgaagctttttctctcttggtcttatcctcctccttgttgttgcgggaagaggcaggaaggaggaggttttgtggtgcgatcttgttggggtttcaggtcagaagggagaaggggagaggtcagccatggcattgcctgtttccctcctccgcatcgcggcggttctgctcgccatcttgccattctgcgccacgcatccaagccccgggttccatgctcctcgcgagtttcacaaggcactcgtcccaggttctttcatttcccccctctgttacatgcaggaaaaatggttggtttttttatttgtttgattcagtaggattttgtggtgccctttaacctctctgaaagtctgaatcacataatggagtcgagttcttgatgtggaaatgctccccaatcccaaaatttttagtgggctgtgtggtcctcaggttattggtcatctgttccttgtctctttcttcacaatttttctttgagaaaacattgatgtgttaatgttctattttttgggggtctgggttttatgtttgctgagaaacctgtgcctgtctcagtttcttatcagcaaaaaaggggaattcctacatttggtgaaagttactgtcttgcgtttctctacgaatattgtttgttttaagtagatggtttagcatcttgtctaagcaattcatgacggaattatgtttttcaatccgctcgtatgacagtgcatcgatttttttttcactggttttctttagcaagacatatcaagcattcccctttttcagttgctgggtgccaacagtgctattcccaatatatttcaagtatcacaagtgggatttgttttaaatgcctttccctgtcaagtatgtggtgcctctcgttatcccttgctccatccacaaatgatattttcagtaggttgctccttttgattcggtaggtacccgaatggtagttttgtccataattttgatttggttgccgacagttttctagttttgattagtgagtgtcaaatatcttctgtaattatctttatcttaaattgcaaatataactctactttctgttcgatgatcgtttttatcaatgtcaaataactgtaactgtaactgaaaaaagcagatagatatggatttgtggcaagaagatcaattgctgaagctcctgttgacgtaaatgtcactacaaacagttcctttgtcttggcgcaagagcgaacatatagaaaagaccccttgaatggattcaggaaatatactggcggttggaatattagcgaagtgcactatatggctgtaagaatgtttacaacctgaaattgcacctcattcatctacttgcataacaacatgtacttttttctgtttgcagtcagttggatacacagcttttccactgttcatcattgccttggtgtggtttgtgctgttttttctggttatgcttggaatttgctgcaagcattgctgttgtccacatcgcagttacacatactctcgggtagcatatgccctatctctgatacttctaatattgttcacttgtgctgcaatgtaagtactcttatatttcaaagctaatccattttcatgattccttacatttaatatatttttagctgcgtttactaacctagttccattcaatgcttacagtgttggatgtgtcatgctgtatgatggtcaaggaaagttccataaaagcacaacgactaccttgaattttgtcgttagccaggccaattttactgtcgaaaaccttaataacttatccgatagtttatctgctgcaaaaaaggttgacatagggcgatcctttttgcctaacgatgtgcaaaatcagatcaatgaaattcaaggaaagttgaactcatcagctactgagcttgctactagaactactgacaattccgagaagatacaaaaattgctaatcaagtgtaagtatcatttattctctcaccactgcaattcctctcaatgatttggttgtgcatatgatcgtgattgcaaaacattatgtcaagcggattgctttgattatcattgcggcagtaatgcttcttctggcatttattggcttctgtaagtctttataatatttttacattgtttagagaacgattttgtccatgcacctttttttttttttttttttttttgctaaaacacaagttgtttttatgctgacatgatgccacttgtctttaccagtactatctatttttggcctggaattcattgtctctatgtaagttaacacctctgtatgtgctaatattttttacttctcctttctttgcgctcatattataacatactatgaatcatttctgtacattttatgcagtttggtgattatcgggtggatactagtcaccgggacgtttatcctgtgtggcgtcttccttcttctgcataagtatgtattccacttgttcatcgtacttttgtatgtgccaaacatatagctagagttagtatgtgtgcagaccttttattcatggtgctcctcttaagtgtttaatgctggctgccgagttgcaaccaaatccaaccaaccacttagccattatttttataatcaaatggtaaaaatcagattatattggtaaatctagtaacttagtttagcacagttgttgaaagttatggatgtacacacccccatcacccaaagttcgactcatcttcaactcaaattagttgtctttcttgaaaaaagataacctaaatccgagagactggtagcggccacttggctttcgaccatggttggagcatgttgcaatattcataatgtagtgcctgcatcaaggcttcgacaatttattgtgccatcatatagtatattcttgcttcattgcaatttcctattcagtgttgtcctgcttcctgttcatggctacattggtttcttactgttctgtactcaaattctacttcctacttatctatgctatcatcactgctaaatgtagatagtagatgccagtcatatgtcaattttgctgcattcctgaggtctcaaaggatcgtagtttgaaaacagaattgcaccatctagcagtagctgctatatcaactcctagttttgatgtcatatcgtgttccgcttcatgtcaatttatgcacagcacggtttttctacaatatttatattctgaaactctgtcaatattgtatgattctgttttgttagcgaaagttgcacatggttagccctctactactttcaaaaaactaggggtataattatgttttaacatgaaactcttagtaataaagctggaaagaaggaccagatcttttggaatagctccgctccctgtagattatatgagtgattgatagtagataggtagcacatgtaaatggcagtcgtggtccagtcactgatactcctattatgtacctatgattatctgaatccatatccaattttaatattattttatctcttttgtcttgtgacagtgtcgtcgcagatacttgtgtctcgatggaggagtgggttgctcatccaacagagcacacagctctggatgacattattccctgtgttgaacctgccaccgcgaatgaatccctgtatagaagtaggcaagtcacttaccaactggtgaatctggtaaaccaagtaatcaccaacgtgtccaatggaaacttccctccgcaaactcctttcttctacttcaatcagtcggggccactgatgcctacactctgcaacccgttcacagccgatctgaataaccgtacttgcaccagaggagaggttaccttggacaatgcaacccgggtaagtttctacaaccaggtgtttcgtagcctcaaattcggtgaactgttgacagcattccatctgtctatattaattatcaaatgcaggtttggaagaattttgagtgccagactaccactgtctcaggaactgagatatgcactaccgtgggccgtgttaccccaacgattctcggtcagatggcagcgggcgtgaatgtgagccaggggctgtatcagtatgggcccttcctgatccagctggaggactgcactttcgtccgcgacaccttcaccaacatcaaccagaaccactgccctggcctggagaggtacagcaaatgggtttacgtcggcctggtgatggtttcgtcggccgttatgctctccctcgtcttctgggtgatctacgccagggagcggcgccaccgtgcgtacagcaaacagcacaactacgctgacaagccgcatccgactggcccggacgcttgatgcatatggccgatgctgtgctgcagaagaatctccatgtccatactcttcgtgcctgtcatcatcatgtagatcaccgtgccttctgattgttcgttggttacaccgatcctgtcctcttctttttttttcttttttttttgttgtagcattgatgtgaattattattgtagcttgatctttttcatcttgtttgctcttcttggtgaactgaaactttgttaagaggtgctgtttgtgaacttgagatagatttctgactttgtgccattagagtttcagtttgtgtacctgctgctgttgatgtacagtcatcatggtccagaagaattgttgcattgtcattactcatcactgtatcagtttgccttacctggatagtttgcatatgtaagattttaagtgttgttgctgtgttgagccagtgtcaatcacttggtacgtagat

SEQ ID NO: 23546 - DNA, 10953 bp, Oryza sativa
atggtgcatcacatactcataaatataatagtctcatccaataaatttttacattccaacaatatacttcattaatttattatgtttcttcatagcaaagggcaaaatggactttttcaaaagaatttaacggtcaactaacggtcaactagcggaaagggcatagaagggatccaaactaaaattcagggatatgtaagggattgagcaaaattcagaggtatagaagggattaagtaaactttcatgggtacataggggattttctccaaattaaaaggaaattcacaaaaccagtctagaaaaacgaaaaaacaaaaacaaaacaaaagaagatcatatcaaaatgaacgcaaggatgggtgaaagcgatgaggaggaggggggcgcaattagaaagagacgggcacgttggagtgatcccaacagccagaacgcggtgcatcagcgatggagccatcgcccatgtacggcaacgctttctttccacggactccacacacactgacacacactcaccccatgaaagaggataaaaaagcaacgtctcacctcacccttcctctctactactgacaacaaaacccacacagcttgccttggacaccaaattggatctcgacgtataatgaacacagatagtactaccccggtctttaaaagatcacagttttataatgtttatgttcaattttgaccatttatcttatttaaaaaattttcatcattaatatttttattattattagataataaaatataaataatactttatatataattattttttaaaatttttttataaatttaatacgaacggtttaacgttgaatacgaaactcacacctacatttaaaatgggacggatgtagcacccagcatcagtcacactacacagtggggccctatatcctactggcaaatgccagggaccgctaccatgccggattccacgcgcggcaacacaaaactggatcaattctatgggctcgatccatcgatagatcgatcgtttggttggttggttggcgtgtcacgtcaggtaggccatttgcccacttcccgcctttaacgcgagtagctagctcattctggccgacccgacccatgcatctatccacatgtacccaacatgcaaatggatgaaagaaaaagaagaagaagaagaagaagattcaatcggtgggctctgcacactggaatgaatcgagccgttgggtacagcaaactccggccgaatcttacacgtggtctcccacacatacactcatcgcaactgaatatgcaaacgtgttactactgtttctgtttctgtttctgtgcaaatcaaattcaaatctctacaaattcgacccaacaaaagtatgctgccaaactattgttctcttgaaatgcagcctgagaaatactaccttcgtcccaatataaatacaattgtggtttccgtgtccaatatttgaccgtccatcttatttaaaaaattattaatattttccttattattagatgataaaaatgaatagtatttcatatgtgattttttaatttttatacggagttgctagaaatatggcgcaatatgctatagtcgattttttttccgccacttacacagtagttacacctcatttacaccccacttacatatgtaattagtatgtaattttcaaatttacatatgtaattttagtacttacatatgtaattttgagatttacattgtaaatacactaaaattacatatgtaatttaggaacttacaatgtaaatacatgccgactattttttgatgaaaaatatggcgccataaatatagctacaccctttttataaactttttaaacgggacggacgcttaaacattagatacggaaatacacgattatgggacgaatgcaatgaaacaagaagtttggaatcctaccttgaatgtgggaccggttggagaaagcctttcggtgtgctgcatgtggggcccaacgcacacagctttattaactacagttagttaacctgacctaaccaccattccttgacacctgcccggaccagttctccgggcccacccccaaccggcagtaaattacggaactgccccaaccagtccctataaataaccgccaaaaccatttccgctcagtttgccaaaaccaccaacccggaagcacaaaaaccgccctctcctcctctcgtcgccactgctccccaatccacccgactccggcgatctcccatggcggcagcggcgacggccacgaggcggccgagcgggcacgtcctctccgccgcgcactaccgctccgcctccccgacgcgcgtcaagctcgccggcggcggagcacgcgcgtccgtcagcgtctcgtccgtgagccgccgctcctgcatgtgctcgccgaccaaccacccggggtcgttccggtgcagcctccacaaggagcagaagcggagcgttcaccacaaggcggcggcggcgccatcctccccgccgtcgccgaccagcccgccggcctcgggcggcgccgtcaggcttggcggcgcgaggcggatgggcggcagcgcgctggtgcggatcggcgccgtggagagcggccagtgggcgcggagggctctcgccgccaccatccgcccctcccccgccgcgcagcaggcgcagcaccggagacgcgtcgccgggctccgcccccgccccagccgcctctccgccgtctccatggccggcgaccgcgccggcgacaaccaccaccaccaccgataaaccccaattcgccgacatctcaaccaattgagacacatactagtagcatagtagtagtacataggaattattacatatagaaatttttttttctgtagtgtatagtgatgtgagaagtgagattaagctgaacatggagttttggatccgtgtgctgcttgtacattcattctgaaatctgcccatggttttggattaaatccattaatccttatgcctttcatgataagaagagaagaaaaaattggagatagtacgtgtctccggattacgcacacatatgatccacttttctgtttgtttgtttgtgtgtatcctcatctattttggataagctcagcagggatgacgtctcgccgtctcctgctccatcacgcggcccccgtgtgtgacaccttcggtcactcagaccaaacccgtcgaggttttttgttgtttagctgggtttgtgccctttgaattcagagcttttcccatgggagtttaatctttaggtgtttaatcttaggttatgtttagttcacgtcaattaaaattgaaacgatgtgacagagttaaaaatttatgtgtgtagagaaaaaattgaaagtttggagaaatagtttgaaactaaactcggccttaatcaccgtagaaactgacggaagcttgcacacaaagatgttgagacgcaacggtgggcgccgcacacaggcacacagttagcggccgccggctttttttaaaaaaaaagtgttttctttctttcgttttgttagttgagggagaacaatacttaaatcaattctgtttgatttctgctgtaataaaatacccccagcgttgcttgtcaatagttttgctgctcctagtttatagagcaggggggagcaccactccctgacacaagttgcaaatcatttcaacaagagaagtatataaaaataaaataaaatttctcgtgaagataccatgcatgtattcaatggaaaaccgaactttagtccaccattttttcaattgattctaataaaaaaggattaaaagagtaccaaaaaaattgcagaaaggctagtgccgtggtgtacattagacagtggagtagtagtgtagtactactgtattactactacgcaacaaacccgttgaatatccagctagcggttgaaaaaaaaaatgtcaagacgtctgcatcaaggagggggccatggcaagtcaacagttgactagccggaataacttgattacaacctccacgaccaagtaaaatcacccattatcctggttagttagttaatttggacctgatcatcatcttgcagacgcataaatggacctagcattagaaggacacacacagcttacccagataccagggcagatctaccacagcgtagtatacagtaattaatccgggcttgaattattttgagttaactcgatcgagatcttgacacggtcttgacagtacgaaaccggagcaagtttttgctgcgattggttctccgagttttacgggaggaaacggacttgattagtccaggtaggacgagattatcgtcgcgaatgcgattgatcgatcgaggcaggcagcaacagaaactgggaaagatcgcccaaaaaagtgtagttaaattgcctgggccggaggcaaccagacagtgatccgagtcagtgtaaattctgttgtaattattatttttttttaatgcaaatccacagtacaactccatgtgtgcttgattagttaagcagcatgatgagaacgactttgattaattaatcgtgtctgattggtgtcatcagacagttttttctttagataattgctctgcataaagttggatgaagagattcgatgcgtttttagttttacggttttaaaatattgggctcggattagatcttgttggaagatcattattgggatggaatcatggaataatggagttttagtgtgtgtccatgttcatggatctgcacgttgtgtgttgtttgtttctgcctgctgcacaagggcaaccggggggcaacaaattaattcctaatcgtgtgctgcattgacggctagctgattaattcttcaaaccatgtttgaaaaaacggggattccgtttgaattagcgtgtttcatgacaaaatttcttgggcaacgtgacagtttctccgttggtacacctgggaggggtacgtggattggactccgtacttagttttaagtgtttgcaacacaaagtccatttccctcaggctcaggtcactgacttgcaaacagtatacttagattaattagaacaagtaaggcttagctagcccagaaagcagggcaatcaatgaacctaatttgctactacagtattatttaaggtctggtctgaattctaatctctctagacgatatatggaacatgtaaaacattgccctagtcccctagcatagaacatgaaataaaatgtatatatgtgaacgattccggagaagaagtgaacagtgctgcaaattaatggcgatcggtaagtactggtcagagttgttgctgtcaggacagcaattaacagtagcatattctgaagcacaaaacgaatgcaactaccatctcttcaagtttaactagctgaaaaggattgagcaaacgacataccaaaccaaaccggccagcatctttgccagcttaacaaccacggcccaacaattagctagctggcttaatccatcactatctgatatgtcgtcgaatccgaaccgtccattctgaatccaacgggccacgatgtggttctcggttctctagttcagctcactcatacaccatgtttgaagggttttgttttggccgctgcggcttttgtcaaaatcttcgactcacgaacagtcaacatttctactcaaattttgataatctacagctacagaaattcaataaaactcttatacatccctttaaatgggaaattattataaactctcgagaggatctctactcgttgtttacatgttactcaaattgttacgatttttttaaaaaaaaatcagcaagatagattaatctacaaacatttaaggtaaaatttaacttctacgtattgcaatgaaaaaacaaaattttctagttatagttttttttacaacttgtaaaagttagtgtagtggtatattacatgttaatatacatctttttaattttttcataatcatttgaatatcatttaaacaacaaatgaatattccctcgagagtttaaaatctacgctccttaaaattctcactagctagctgtttatcttttaatctcgacctcctcgagacaaggccactagcagagagagccgctgcactctagcgtgcattagagtgaaacctttggcgcaagtgctagagggatgacgtatgaaaatgtttggaatccgcaaaccgcgttcagatctcgacgacgacgacgaacaaactgcgttgtcgtgtagttgctcacactttccagcaggcgttgcggatgatgagagagagagagatgctgaaatgcgtatcgatcatatcatctcgtgcatcatctagtgaggcttgagctgtgttccatgccgtgcttgcacgtaagcataaacgggcagatcgatcgatccccgtatcgatcatatctcgcgtccgtttctttctcatgatcgatcatctcgacgcttcgaatcttggatgatcgccaagcgtcttcagatcctctcaaactcagaactttttagttcccaactttttttaaaaaaaactttcaactttaaactttcctacacacaaacttcaacgtttcggtcaatttctttaaacttttaattttaacgtggaactaaacacaccctcaaacgttaattcagagatgagataatctcatctcatgaatcattaagagccatcgttttgttattcatgcggcttatctgaataaaacttttatatatgtgttcttaacgatctaaaagtaaagattgaaaaataaaatttgatgaaaaaactcaaaatcaactttaaatttaagattgaaaattcaaattttggctgataagtataagcatgagcgaaaagatgatgcattttgtcttctttgatttattcatgatttcttttcattttctaatgaggatgaaaaacttgtctggttcatttctttattgcggagaagtggcccgagtagtaattgcaaagtaactcaaaacattttcaagctgaaactaacccaatttcattctctaaaactgagtaatggggattccttataataaaaaaaaagtagcagcagcagcgaaaaggcaggggaaacttagccgcgtaggtgaagtcaagagacgataatcaattaaagatgggggcaaaatcatctcgaaacttcacggaaaagaacagtaaattactcacagccacagacgctgacacgcacacataaagagcatttgctttcaggccaagcttcacggccgacctgtgaacatgcgcctctccacggagctaaacccatcatttttttcccacttttttaaacaaagattttcttttttgaaaagaagaggaagagatcattaaccaaccaactgaaaaaaaaaatcaagcatgcatgcttgatctgcatcagtaaaattcgcataactgaacaaaggattttgattgaatttaattgaactgatccattcattcctctgaggaaaaaaacacacaaaggagtacagatactagtagagtagtagaaaagcaaagagcacatcacacatggcttcctagccaagccctggatgattctgattctgattaccctagctctagtgtcactcgatgcgtacgcgcgaaatagtggcgtactatcactcgatccgaagaggtcgtcggtgatcgtcaggaggcgcactggcgaagcctggaagggcgaggctggaagtcgccgcggcggcggcggcggccgccgttgctgcagctgatcatccgaagcaggtgcgcgcggaccgaccgcccccccttcgccctggcgccggccgacgcgacgccgcctgacgacggcgacgacgacggcggcggtggtggcggggaagaagaagaggagaggtggcgggcgcgtgggatcgggcggtggcggatgcagcggaaggagcccgggtggttggtcggcgagcagaggcacgcgagcttgggcctcgagctcatggacgcctcgctgttgatagcagcagccatgtctgtggcggggagcgcggcggcggcggcgatggctgggctggcttcccggcgtcgcctcgggtccggtggttttatacgcgcgaaaggggttgggttctctctcgaggcttcccttcgcatgggggagcacgtggtgcgagggaaggcgtgagaggtgtaaattaatcactagtggcacgttgacggaccatcgtttcgtttattcgcgaaccgtaaatgaaaagtaagagtgaataaaaacttttatatgtgtttctagtgatctagaagcaaagactaaaaaataaattttaataaaaaaaatcaaaatcagctctaaatttaaggttgaaaattttaaatttttacggataagtattagcataagcggaaagatgaggccttctcctgcgcctaaattctcctccaaagttaaccaaactctacggtagagtttgagtttggttgctgggatgggatggaatggaacaggatgaacccatttttagaggtgtttggttgaggggtgagtgggatggattggtcctggagaggaatattcttcttagatccgggaccaactgatccgggaaaatatgacggaccaacttgggatgagcaaacggcgtcacaacggcttctcgcgtgctcgccgccctgctcgccgcttattgtccgcgtgctcggcgtgatggtggaagacagctcgtgtgacagcaacggcgacgggctcagcttgggcgacggcgacgatggcgggctccagtggtggggagggcgagggaagcggcggcgggatcggcgacggcagcgggtggcggggtgctcggcgacggcggatccagcaatggatcaggtgcacggcatgagcgtcgtcacttcttctccgcgtgctcgtcctcccgctgctctctcgcaagcagccagcctgctcgctggccgtgctagctctcccggccaccggtcactgccgattggtccgattagagcaggcgatggtggcgctcgacgaggactcgcgctacctcaccaaactctcttgacggtaactgcaaacggcggccattccatcccttcctcgccccttctactaaacaaaaaaaactgggttcattccatcctttaaatcaaacatacgaatggaatcatctcatcccaaaatctggaatggtatcatcccatcccacctagtcccagaatcaaacacacgctacaagattaggctttggtttcaggtttagggtgtgtttgttcacgctaaaattaaaagtttaattgaaattgaaatgatgagacggaaaagttggaagtttgtgtgtgtaggaaagttttgatgtgatagaaaagttgaaagtttgaaaaaaaagctggtaactaaaccaggccttagttagggtcgtgtaagctacggtttagccgttcactttgtttgatacagttacggatggagtaatattttctttaagctggatgtttttagttttacaaatctaatatggatctgaatatatgatcatataataatattttgataaactattctgtttcacttataaataatttagcatacaaatttcaaatccagtataaataagaaatgtgaagttgtactaaacaggacctgtcttcaataaacgtatgataaaaaagattacggataaaacatttatatttataatcttttaacggtttgaaactttaaaagcaaatgttgaaaagatagacttttatgaacccctaaaatcaactttaaaattaggcttcaaaaattaaattctgtcaacgactgattaaaccaacgcaggcttgacttcttttctgaagacgcaggaatgtcgattggttttcagagtttcttcatctttctcttaaagttcaagaagcttgccagagctaacagctcactttcagcttgtaaaattcagcctctgtttcggtattcctccctccgtttcagaatataagcaattgtagcatttctcacatttatattgatgttaatgaatctagacatatatatctatctagattcattagcataaatatgaatgtaggaaatactagaatgacttacattgtgaaacggaggaaataattccttatgcgtatatcacaaaatgtaacagtgtgtttaatctgaatctgaatctgatcttattgcacatttgttttgtctgttaacgatcagttgcatcggccgtgagtcagaaaggctaccttttgtgtaggagttggaggctctgtgcctaacgttttgtcattatttttcagagagcaagtgctccatctcttggaatcttttcctgaataatacaaggatatgcatcccgtcattttttttcctgaaaaatacaaagatatgcatctcgtccttgtcatcacacactcacagaattagggaagaaagtccattatagtgttcgaattttgcagtaacttctaacatcttgttcaattgttccagcttaacagtgggatgctaaggtcctgttactcgtactttataagtacgcttctggactactaaacgatgtgttttgtaaaagctttctatgcaaaagtttcttacaaaatcaaataagtctattctttcagatttaaaataattaatacttgactaatgtacactaatgatttatctcgtttcgtttcgtatgccgccaaaaacccagtcaaacaactagttcgcacttagctgactcagcgatttgactaaatctgaacaatattctgctccactagctaactgaaacttcgcaatcttaacgtcacaagacactcccatcagttccatgattatggcatgtggttcaattacctgttggtgtagtttaatattggtacaaagacttggaacagttccttgtcaaatttctcttaagccaggtaggataggattagcgatcactactctgctagctttctatgacttagtttaacgtagcagtaattattggcctacaagtgaacacagtgttcttgaagcatacaaattgtctgtagttgtgtcatactactacatatttttctt

SEQ ID NO: 23547 - DNA, 681 bp, Oryza sativa
cctcggccaaacttaaggaggtcatactggctgattcccttactgttagaatttcaatggttactctcattgagaagaggatggcactcgagatggggcaattttctggttttcttcattcactaaacacaaaagccatgtcctcccaaagaggattggatacatatttatagctgcttgtagcagccatgcagccatgctagtctaagagggtgctgtcagcatcccaacaaactgtcctagagcatctcaacaaactgctgtcctaactgtcctagagcatccaaactgaaagtagagatgctgtcctagaaagctgaaaagcaggaaaaaggcaccacaagaccaagaccaaccagccaagacttattcctacattctccccctaagtcttgtgcgccgtcttgtgggagagttgagccatcccgatccgggagcaaagctcaaggaacttgatcctcccaaggggtttggtgagcaaatccgcaagctggtccttggtgttgatgtagctcgccttgatgctcccttcctccaagtagcttcggatgaaatggtacctcactcggatgtgcttgctccgttcgtgaaaaacggggttttttgccagggccagagcggacttgctatccaccctgagctccaccgctccagtatctctgccgaggagatcactaagca

SEQ ID NO: 23548 - DNA, 7700 bp, Oryza sativa
atatagccaggtttctctctttctgactgatggcatcatctctctgggaattttttgaagattcatacttcaaataagcaagctcatttagaaggacagaaacttcgattcttgcagattctaggacaagcaatacaaatctgcacaaatcacaaattgttatgcgtataagaatgtatatcaaacaggatacaggtgataatgtcaaactcacttatcaacaggcatcatattctggtcatcagggactttgtattcttctgacagccaattctcaccaagtatagacatcatgcactccgccaaaagaagagcttgcaacttttcagaagatactgatcagtgcaaataaatcagtgtcatgaaccatatcaaaagggaaagtaaatactaacactggtaaagtgccgttcttatatcctctgaaaggaatcctttcagagtatgatcaataactccatcgaattaccatatactacagtactgttgctcaaagaaatctacataaactttcttgcaagtttagaaaaatatcgagctaaatacaagaaacgaaatgatactctcctataataaaggtagcaactgaaactaaagaaacaattttaagaaaagagaaaggcctaaaattatctgaagttatagactagtactgcaaatagggacagaatagctagtgtaaagtggcacattaagcactttcagccttgctgaatgcagcagattcttaaattgatagtgtagaccaacgaattacaacttcacagtacacaggaaacaaatattgttaaaaacatgaagcagacataccaacacggttttggagaacggccgttatcccaactcgaatttgacatttccaaatcatggaaggtactgatctcaaagcgtcatgaagcggcttgttggacaacaaaaataaaggaaggagttaaacaaaagccactagaaaggaatcattaaacatcattcagaagggaacacaatcccacactttagatgaaacagaaagggaggaggtaattcttacagattccttttgggatagaagggcggtaagcatatgcagcgcttcaaatttaactgtagtatgaagaacagcaaaaagcctagcaagtgaggtcacctgaattgaaatgaaattgcaggccaagccatcacgttaggactgctaaacatgtgaagcataggaagattcacgcaaaagattccagtatgtaattcataccatgcttgtcatgccttgcagtttctccacggtcatgttgtctattctgattttatgaacaagtagctgcattagatgaatggcaagctctaagcaccttgaacctatgaacagatacaatcaaataactgtataaaattcaattcaactcagtaaaatacaatatcattcaaaactactactacctaaaagcacacaccaattaacttcaggactaaaagatagttttttgcctgtccatggactaactcatgtaaccacggtgtgagtaccaaatgtgaactaggttacatattcaataataattcttaaaaggtaaaagtacccagcagccatccaagtgcgcatttgaaatgtgagtgctggaacttgaatctattcccatttctcaaaggaaactggcaagttaaaactaataccatctgggaagtttgagatttggaggaagagcatatccatcactccaggttcacaaaacgtatgcgccccaccatctgaagctattgcaataagagacaggagctcaaaacattcttcagtaattgccagatcagacctgcacacgagttgggtagagtcataagcaaatgagttatgcagagcaagcatcccaactgaaatacagaatcggaggactactcaagcaagcatactcagttaggtagcattgttcacttgcacaattgcaaaatgttgcaacgtctgctgcttcaactacactggttttacctagcctgagtatcaatcagaacgtggtagatagcgaatttacttacgatttggagacgatctcggcgatgaggggcacagtggagacgaccccctcgtcggcggcaacctctgggaatcgagcaagcccggaaagcaccgtcaccgagagacgcaggtacgcctccctgtcctcctccttgccgccctccactttccccagccctgcatccaacaacgcgaacaaaaacccagtgacgaagaggaaccatgcctacactggagacaagcgctcccacgaggcgcggcaattctaccggtgttgaggaggcggcggaggaaccggggcccgacggcgcggtacacctcgacgacggaggcggcgtcgccggcgcggcagaggttggcggcgacgaggaggcccgccagcttctgctcgtcgcgctccccgcggaggaggcggaggcattcctcgaacgccggggcggtggtcggcgtctccgcggcggcggcggcaggagccggggtggaatcctgcagggattgaatgcagaggcgaggtgagaaggcgaggaaacgggagggttagggtttggaggaggaggcgcaggtgagcaccatggatgtgaggcggcgaacggagcagcgattgcgagcgggtgaggagagcggctccgccgccgccgccgcgtcgggactcgcagcgagcactggtcttgaatggaaacctcccaagagttcgaatgaaaggcggcgtggaggtggaggaggaggtggtggtttggcgagggtattcttgtcattgtgcagtatttgactcgttgacttccggcccagctactaaaatgggcctcacgtacacactctttcggcctaaatactttcggaaaaagtacaccgaaggtccctcaacttgtcatcaagttacaaaatcatcccccaaccgcaaaaccagatatccggcatcccttaactagtcaaaaccggtcacaatagatcattcggtggttttgaccccggttttatcatacatggtggcttagccatctctctctacctcttctcttcctcgattcctcctctctctctttgtgtctgtaggctagtcagtagggtgaggcgggagaggaggaggcggcgccacggcggcggcggcggcggctgcagtggggaagcacgacggtagcccggcggagttccgcggcagccaaagatgggcccagggaggtgtcgatgctaccaattttggtcgttaacaggaggtgacaggtggcagcgaggcgggaacagcgcgagcgttgatggggaggtgtgggcgtgcgtgggcgtcaatggggtgaggcgggagaggaggagggcggtgacggcggccgtagtggggaagcacggcgatagcccggcggagttccgcggcggcaaagatgggcccggggagacggcaggcggcagcgaggcaggaacggcgcggacccgtttgacatccaagttccaaccacttcatccccgttccggcccaactaatataagccgcatgtacttaggtactaacatgggccgcacgtacttggattcccgttcgggcccaaccaacgggcgctgtacgcgcgtcctctgtgagagaacagcagctgccgccgtcatgctgccgctgcggcgctgtcctcgccgacgcgccagcgaattcatcctcttgctcgccgtcgccggtaacaaaaggatctgattaatttgtgccatatataatcgaagattacaagaccatatataacactacagtagtactattatatagcagtactaacaaatcaacaatgctgactttcaggactgattttgtctgcttagtattaattaatcatcactaatcttccactttaataatgtgtaaactatcagttactagtatactcttctcttatttgctttattacaagctgcagcgatcgctttaatttccagtgatccgtcagcatcaggaaggaaggagctggcacgagtcgccacatgccattctgaagtgaatttgctgaaccggtaagccaagcccaagccaagctaagaaaagattaggcagccgttgcttgctagttaccccgcacgcaacgttgcataacgtagaaaaattaacattatacaaagtatagtatgtacctaccctgcattaggtactaagaaaaaaaaccatgaaaaattcaggggcagaacgaatcattattttgctccttgattcacgggacgcaagatgtgcttcattcttcttctctatcactggaattcccgtgctaatttatgtacaaatcaagttaatcaacgctaatttaacatgaaaaagaaatcctttttggcaggagatacaaagaaatcttgtggtactggacaattatttgttccagcagtttgttcccacttcaacataaaactttgccggaattttcgcctgcatagaacattacgcactgttcgaaagccggactgatgagttcatgtctggctgtctgaatttgatgaacgctaccggacattcggcatgaaaatagttccaacacgttgatggatcaagcgtaccggttcatgtatacccaaaaaccttgaaacatttttaatataattttcgttattaagtaaccaatgagaccaggttggttatccgtcaattttaatttcttcagagctgttccgccgttgtcgctgtcttttcactaagaaaattctggcaaactggacgttttggacatattaaaagtgttccataggtatgttttggtacttggtacatactttctagacaaaaaataaagggagggaatagttttcagttagttgcgatgtatcttttatggttgataccttatttatgtgtttttggatgccctgtttctgctcatctctgaaaacgacctgaaagcctcatttttctgagtttttgagggttaattgcataaagcaagaactgtggctttattaagaacccatttgcatgaaactggcacactgaatgttccattgtcaggagggcataatcattgtcatcactgaatattccattaacctttttttttgtcatcactgaatatgcagagcagaacataaatactgttctcatgcaagcaactgatcaccaattacctaattaacaactacaaaactacaataggctcaatgtttcagtgctataatatccaatgccaggttgtatgtgtcttgaggtataccttttctgttattctgttgtttgtctgaaactctgaatcatcctagttcagtagtacttcctgcctgaactaaagaaatcaaatggagtaattcattatagaactttatatcatgagaagcagccaagccgtgccaaaagagaaggtgtgcatgctctggcgttgttgcaccaaatgatgagtgattaagtactgttgttagtgttgtgtgtgtaggggcaaaaccagctgggccatgggatgtcgccaagattcgtgcgtgagatgcagaaaggagtcatgaacaaaatgatgccgggctttttcacagtactgacagagcccgccgaccaatggaatccttggcaaagggcagagctgaaaactctttgcacttttgcaggcatgtgttcaaagtctgaagttttacagaaattttcagattaaacagatgcatcttgataggaatatgtggaagtttcttcaaaatcagatgtcatcctgctaacttgtttccaatgctttggagtttggataggggaagaggcaggtagcaatctccattgtactgaaaaattcggataaattttgatgccagcctatatgtgctacaaaaataatcaaagctacgttttgatgctccatgatacatacatgttgcttgcacgcataaaaatgatgtgctatgcacctgttattgggtggaggctgcatgggcgtacatgctacggttgcaaaggcccatattttcagacaaattccagtaaaaaaaaatcctttctcatggcctaacttttacgatttctcttggacacatgaattttgtaggaaaacctgttccattcccacaaatatcagtaacatttttatggtgccaaaaagggaccaaactcttcatgcctctgttagaaaaaaaaacattacagttagcattcctaacctgggtcaaaagagagaaaaaaaagaaaaaaaaaacaggttgagtacacgatatctaactacggttgtgtcacatttttgccataactcgatcatttgttattgactcaactaacctaagtactacaaaaagtcaatgatttgagatgataattaaaaccatcaaaatcttctcatccaaaaaatgcaattaatcatctaatccacaactagtagtagtagcaggctggaatttacagcaattaaaagcgaatttatgaaggcgtgcaaaaatataaagcgacacaaaccccacatccacggcactttccgagctagttcctcgctacttcttcttctctctctcgttctccgacaagaggagaaaggaaaaaaaaagggagagagagaaaaaaaaacccagaaaagcgcgagccagatgggcgccgggagcagccgcgccgatgcgccgccgcggcggcgggcggcggcgcgcggcctcgggctcgggctcgcggggtgcttcggcggcggatcctctggggcggccaccggaggcggcggcggcggcggcgcgaccgccgcgtcctcctcgcgagctcacgaggtatcggctgagttgggataccggagggtgtcgccgttcgggcacgcgtggattagcctctgcggaggggggggggggggggagtggatggatttgtggttccggaacctatagggtgtgggattcgggggtggtggtgatttcatggcatatattttggtttggaaaaatcacggtgactgtgaatcggaaagtagataagcttttagaggttttagttcccattttttttgaactgctttgcttgttcaatgatgataggtatgggtttgactgaaaataattgtggtccttgctttgcatatatggggcatgcaaacatgaatatttgagtctgaacttgatagtctacttgcctagtgaatgctttgcaattttgcagcaaatgcaaatgaatggaggttcaacgggtcactcactgaatttatcgttctgcacttaaaagggctgcttctgagtggcaagttgaaaaaaaaaactttactaattttacaaacgttgaacactctctatgcttaattgccagtggattcataatttcagtcaattagatagttgcattcttgtccttcttttgtttgctggttgttttctgattccaaaaaggtactacctacaggtggaatcttggcaagcagctcgagcggttgctgagatggactttcgggcttctgtcgctgctaaggatatccgcatatcaagtgagtcagatccaagagtgcatccatcttcaagcacaataagtcatcatctcaggttcaatcacttaaacagtcacgaaaacaaggaagatgccctgggaacagaaatcgctgaaacaagtgttcgtcagagttcatcaggaaaggaagtcatgcctaggggaaatttcagtaatgaagttgcttatgctgagataacgtctagagaaggaatcagtcatattggacgagatattttagaacctgcagcaaacaatgctgagactgacacagtttgcattccagaagttggtggccccgtttctgaatctggtttctcctcctcacagagggcatctgaaaggatc

SEQ ID NO: 23549 - DNA, 1662 bp, Oryza sativa
  unsure (1)..(1662): unsure at all n locations
aatgctatttctttcttctgtcattaagcccatcaccccaattatttctagcctttggatgatatagatctatggtgcaaattgtctcttctttcttctctcataacaccaggcaatctcaattatttttaggctcaaaattcataagtatcaatttgttttagtttaataatcatattgcatcttatttgtacatattatgcaacttaatttcccgcagcaatgcggtgtggtattcatctagtaattataacaaatattttaaataaaacaaattggcactgcatgcaggtgctgtatgtcagaccatccgtgagagcaccatcatgaaagcaattacaggattaaatgagacagttggcttagttttagactttctgcaggacgcaaaggtacatatatgatcagccagttatgaacttatgatagtatcgtaagatctcttacatgatgaagcattgcaggatcatgggcaaaggaaaggcgatgatcttttggcggctgtgagaatagtaggaaggtgcgcttctttgcttattagtaattgttagactgaccatgtggatccatctctgcattctattttcttaaatcttaagaattgctccttagtgttagagatatatggtacttcctccgtttcacaatgtaagtcattntagcatttcccacattcatattagtgttaatgaatctagatagatatatatgtctagattcattaacattaatatgaatgtggggaatgctagaatgacttacattgtgaaacggagggagtagttcatatattgttctgacttctgaggatgaggaagattttggttcagacagtgtagtttttaagaatgtgattgcttagaaaagatgaaatatgataacaatgagaaaaacaccgatggcttgagagaacttaggattcacgaaacacaacaagtttagttttccaatttgttttgtttccaaaggaaaagttgtgcaattcgaatttaaaacaggcacaaccaagataactgatagttttctagctgccgttgatgttgtcaatattattaactcgataaattttgcagctgtatactgtatagagagtagtattactattacctcgacaacgacataaagaaaaataatgttcaatgtaacatatgatggatgtttcaaacttccaagtcactgtaagttctgttgaggtctttattatcaagacctgactttttctgttaattcaacagctcctaagtacctagcactatcaaacgggcatgccaccaagaaaacaaaacaaaatatcatcgaaagtacggaccgagcaacaaaatctgaataaaacatcctaccaaagcaacaaatgtgctaaacaaacacaactaagtactattaccaaatactatatcaaatcagatagcgactactattaccaacaaaaatgaaatgatgattctatcgtggtacgctgaattaacaatgcaatgtcaaaagcagtaaactgaactaagtactcaccatccaacagtgcatccgagacctcctcacgcgtgacattcaacgcgcgcagcaggatggcgatgttctgcgccttcttggggtcgagcaccctctcctcctgccggaacgacggcactccggcggctttcctcccgacctctctcggcggcgcgg

SEQ ID NO: 23550 - DNA, 9817 bp, Oryza sativa
  unsure (1)..(9817): unsure at all n locations
aaaatcagttttacgtatacatattttttccagcataccgtccctgatgggggtttgccaattttatctgctttgttagtactcaaaccttttcagatctgtagaactgcttgctctgttcatgaacaagatgaagtgacacgaatccaaagtaagtttattattaactttgctctgctattcttctactcctgtgctgctttggtttatgttaggtctcaggatgctgttatgcttagcaccagaaagaaaattccagacaaagtaagggtgcagataagtaaataatggtgctgtattttcaatctttggttttaatgctggattgcttcagttgcataattttaggttgtaggttgtggatagaccaagacagagtatgcaaaagacaggtcactggctcacaatttgcctttacattttttatggccctcattgtttggcttatgcttatgcttataatccaaaatttgaattttagaacttgattttttggttttttcatcatagtttattttacatcatttgcttttgagtcgctaaggacacatatataaaagttttactcacaaatgattttttatttgttaataagtgattcgaataagcttatgaataagcaaaacaatgctagtttttcgtaccatgaggcttattttggtttttgcttgtttgtttttttcatggaacatataattttattagtgctggcgtcctttatttgcattaggctccatcaagtaggaggcacacaagcttggacaacagttgaacaacacattctgcaagcatcttgagtcttgcctgacaagatccctgcatcctatcaagatgaatagtgctcctgattttgcagctgaaacagcttcagttatgtcaccatcacggtagatcaattatgcaagtctgtcaggcccccaacatcaggccaaccgtgtatgcattcattggcagtatgctgaaaggtactgaatatatttctgtgaaatggtagatttcttgtttaaattcttagctgttattagacgtactagatctggagtgatcagtgatgcaacatctcattgccactgggaagcatgaagacaaggaaatgagtcaccaaaagataattcgctgctacagaaaaagcgaattaaaaggtagttgatctgctgcagtacgtgaatccaactgtgtgaatgttcctatccaagatggctttgattatagcgcatttgctttaacatcctagtggtgtactaaagggggaataaacatttccaaggatatatcatcttgccttgtgtaaagatacttggggcaggcttatatgcatgggtgattggattccatgtctagccatacaggcgccctttaggtatctggaacacctaacattaaccatatcctatttagcgtcaatccagttgctccaatattaaatcatcacctaaagaagtctccatctgagttgagacccttgatctcttatttatttatttactccttgcagggccagtttacaatacgtacattttcagaaagcagctccaaacaggatcttgcattggatttagcttcagcaggatgatatactgcaaaaaaaaaaaggaaaaaagaaaaaagggttaaatacctactcttgtttgagaaggattttaatgacagaaggattgcaatgacaagatcaggatcacactgtaaatggtgaaagaagagcaacagcaacagggcttcacatcatattcttattcaccaaatctctctttggattccagtcacatttgcccacccactaagggtgaccggtaaaaaatgaggtgtcctttctccatcttaaattcggtccgtggtatgaacccaagattttcctccccctctatcctggtttctgcgacaactcagaattggattgttcgtcgtgtaagatttttgatcacgtatttttgttttcgcagtgttgttatcatctgtctagtcaatgaatggtgctgggattacgcagctaatacagcaaggcagccagttggtgtgggtgggtgccacaaataatgcagaatggcagccacaaccaggatgctccaaagtggctggtccctgtcttgttcgccatgaacatgaaatgcattggaggaaagctctgttgatagaaacagcacacaaacacataatggaggatcaaaagcgattgagaggtattattttccttctttgcactaagtcaaaccttgttactttcatgcacatttgccagattttgatttgctgcaggcactcagtgtggtcttgtttgtggaaaaagatatgcgagtacgattaatggattcattttttttaatctcttgttctattccaatatgcatggaaagtacatcgagacagctctgttatcgccttaaaaattaatgcacaaataaacattatctttttttaaaaaaatagtaggaataataatgagaaatgtggtgatatttgtcacgtcaggttggtcataacaaaagttaaaattcggtagaaattcctctcacgtggggccacaggaatcacataaaaacatactgatatatcctatatccatcagcctacaggcagctatgtatagaggtagctgagcaattggcatggccatgcgttagagagagagagagagagagagtgcatgagcatgatgagctctccttctccctctccttaatttagacataaacttaattagctatgccgctcctctctctaatctcccctccaaagattatggttggtaggagatggatgagttcctgatcatcttcttgctctaaaatggaaggtttccaatggattccagcttctgaatcttgcagctagctaggtaggtaggtagctggtagcttagctaggcagtcaggcagatggtgtgttgttgcttctgctgtgatcgctcgcatacgtagataaggttagaggttgatcgctcggtagatggtactgatggccgggatgcttcccggagtggagtgcgcgcggcggcgacgtctccggcagggcggcggggaggcgccgtgcgggacgcggcggccgtcattgtgcctgtacgccggcggccacgaccacgccctccttggctcctccgcttgtaaggtagagatttcgagatcatgaactaatgttacatcttttttaaacacaaatacaggacaatcatagatcagatattgaatttgaaatcgcggtatttggaattggaattatgttgcagcagcagaggagcgcgtgcgaggagcagcagcccgggtggtggacgctggacagcaacgtgcgggaggcgaaggagaggctggaccagaagctgcggagccagagggaatccgccgtcgtcgtcgtcaagaggtgctcctctaatactccctccgtttttaaatgtttgacaccgttaactttttagcacatatttaaccgttcgtcttatttaaaaaattttatgaaatatgtaaaactatatacatacataaaaaagaattaataattacttaatttttttaataaaacaaatggtcaaacatgtttaaaaaaatcaatggcgtcaattatttagaaatagagggagtataatctaatctccttgagtttgactgtttactaataattaattttgcatgcatgcaggcataacaaagcgcaggtggcaggaacgagcagtgacggcggcgagcagtcaacggcaactacggcggcgccgcagtgggaggtgtacacgaggaaagaagggcggcggcggatgtggttcaggaggttggggcggaggccgacgccggaggaggaggaggagtgcgcggtgtgtctagaggagctgcgtgccggggaggcggtggcgcacctcccctgcacgcaccgcttccactggggctgcgccgtgccatgggtccagaccgcctcccgctgccccgtctgtcgcgccgccgtctacctcacctcaccggcgccggcggccagcaacaactacaactagctagacggaagcggatcctccaacgtaaactttctcctgacgcggttactgatatgtggacccgtgaacgatgggatctatatgtcagtcacatgttcctttgacttcctaatcccaactagacagcttattaaacggatcgccagttcgccgctgctaactgtcactggtcactactacccgcatcctttaattttgattgattccatcaacttaattatatatcgtcgtttcctctcgcatctcctggtctctctctaccatgcacatgtcgcctgcctatgctacagtattatgtctcgatcaaactctctgtaatagtgtacttcctccgtttaacaatgtaagttgttatagtatttctcacatttatatatttagattcattaatattaatataaatgtgaaaaatgttagaatgacttacgttatgaaacgaaatgagtacgtcgtacgccgtggtgttacgaaaattagacacgcggaattacgaaagttactatggaacgacgactaattttcttcttaatcgtggtaggcatggatgattaatcaactcatatatactagatgacgatacggaaacgtatacgatattagtatatttgttaacgaagttaaatccaagcttatatgtctccgattataaacacttctccacagtccacgtagcgtcttagccgctacaagcctatggtctcgtaaccattctcttgctacgtgtttaccctatattatcgtcgcgatggttacgtcggatgttgcaaaaatctctaaatttgtccatgttcagatgtgtgtctctctcccttatatgcctaaaaaattaaagataagagaaaaaaaagagtaaattgtattggtgatacacaacttattacatgggtgcaatttagtacataaacttgtaaaatgtttatttcagtacacgaacttgtctagttcatgcgaacgaggaccaaaataacttgacaatgttaattttatgaagtgatgttgattaggatgtggcgtgcatatgtgtagtgagtatgcataggacattcaatatttataaatttggtctctactttattcttcaccatggaaatgatgaatttcatatatttctaacctttataccattgctcgtttttttaatctttttctactatcactatattctattctatttttattgaagagatgtatgtctaatagcaaccttctctatgccctaaatcaataagattagcgatgtagtgtcattttcaccttcctctgcacgcatcagacaagtttatgcacttaaacgagcattttacaagttcgtgcactagatcgcacccacctgacaagttcgtgtgccggtgatataaattactaaaaaaaaaagtactccccctgtctcattataagtgcagccatgattttccacactcaactttgaccgtctgtcttagttaaaaaaattttgaaaaaaattaaaaacataagtcacgagtaaagtactattcatgttttatcatcacattaaaaaatatcaattataattttttttaaataagatgaacgattaaagttagatgcgaaaaattatgattacacttgaaatgggacgaagggagtagtatgcagtaggctcgagtaaaagcagaacaatcgcccagtgttcctctgaatcatcaaggaatctgagagctatggtatcatcgcccagaatgttcctcaaagcttcattgtagatctcaatcgccgaaaatttgtaaaggaatttcttcaccattatcggtactgactgacactaatctgaaaatcaaaatgggaaatagttattcatatccccatcaggggcatacattgtcactataagtgtaagagctatcttggacttgtaccaaagcatgagaaaaacaatttatcccttctttctatatattatactcaagacccaaagctggttgagccacgtcacctgttaaatcacagccattcgatgtaatctggacgctcgcaaacgccgccgaaagaagcaatcgcctcccccccatccgagagcnggagtcangcccccagcgcagcaggnggccccccgcccccanggnngnanngccnccntncncngcccccccccccccccccccacccagctgcagtcgccctgcgacgtcgcaccctcacgccccagcagccgcctcccagcctcttcgcctcctcggcgttcgatcctcgagtcccatctattcatcttcagttttttgaaacagtacgtcgcttgctttatactggccttctttcccgtcctatttactacgtatgatgatactgatacacacaacagctgaagaaaagtggtatacagcagctggatcaatctgctcggccagcaagtagcttctcctccatacaagcacatccctagattgatctgctctaggttgtccactgcttgccgatctcacatgttccagcatagcttctttccccattcagctaattttttttataatacatattgtttgatgctaattgtgtagtcacactaatttcttcgtgattcaattatcaatttccaaccgatttcagtatcccaaattattcccttcttttttccctgtataactgtatttgcgctaacagtttaattattcccttcaatttcttcacaggattaactactttgatttcgtcttgggtttattactagattaagtaatccacgaccattttacccaggttgttgaactattatggggaaatttcttcgacggtaatacgtaacaatacaatcctttttcccctaactatacaatttctattattatgctcctttgttttccatatttatttgtcatattgtgattattctggttaccttgcatctatcaagcacctttgtattttaaggttttagtattctattatgttacatggaaagtttagtagtacacttgctgcactgaatccctacagataattcctatcactgaacaatgtttagtgaatcaataattcctatcactgaatgacatttagtgattcaaatgacatttagtgattcaatgattttatatgtatcttgcatacttggggtactaaatgataagatgaaatataactgtagataattcccaacttatcaaaagtttggtgatcctttagtcagccctgtaagcatgtttcagtgaagccatggctcagatggagattctttttatcatgtgcaacacgatgattcttcaggctttggcaattctttcagtaaccatcaatgatgtaagtgccagctacagtttgtacaggtcccagtcttctttgatttgtttaccaaatattacctgacctgagttcacaatttaagtcataatagtatgatctcaaaattctcaaattaacttaaaatatgttactgtttattttacctcaaacttacattgattcatataacatgtttatcttcctcatgtactgagaaagcacaaagaataataaaaaaatggaaaccacaccactattctggaatggtatcatgagaactaatgagaccaacaatatctctacattaataaattatgttaattttcttgagttaattaggttgcccctaataaatcgatacctcaagaagcactaattaggttgcactgcttattcttcagatacagataatggtgagtttttgatcaagtttccaaaaagacgcgaatattagggaagaacctaatatttggaatgggtgaggcttcgaacccaggtcgtctagcccaccaccttgtggagctagctagaagatccttggtcgtttctcatcacactgtttcccccaaactacaaaagcaagctgttcaacaacgatgtgcttctaaaaactaaagttgttgaagtggctgacgccacgccggcactgatgctgagaggtgggaaaggggacttgagtgtggctatggatggtgcaggagagatcacaatcggcagcctctcctccctgatcacgtattgtagtcccggcttcctgccaccacgagatcgtcgaagccgcgccgtcaatagtggaatcagccattaatcggtgctaaaagccaagacacctctgaatttatttaatcatcaattaaaatattattacatgtctcccgtaatattgggaagaacgacagaccaaatcaatcactcgtaagttataaacttcaacaaaaggaaacaacttaaaaattgaaaggaataaataggacaatgtaatgcagggttggccattgggtgagaaccattaataatgtcgtcgctcagtcatggatgaaggaatagatggggaggtactacataatcatgcttgtttcattgtttgaatataagcgacgactttatcaaagaatacctcggcctccatagcatcagcttcgcaacttaatagggtaaacccctagtcgtgtgcttgaggattgggtagtcaagcttccgttgttctctgatatagctatatttggctggtcggcccatgtatctattaagtagtttaatctgaattttatttgctttagatgtattttgctatgtatattcatgcttaagatgaaagtgtgaatctagtgcacatcctgggagctagattcatgtgagtatgagttaaagaatatttgagatgttgtagatctttagccattttgtcaagtctcctgaatgtgtaacacatctggtcgccgccttcgagtggtttgatgggcacatctcgggctaaagttgactggcgggctaaaggtccagcaatgtctccaatattcttctctcgaggcgtcggatatttcattatttttgtttgatgacttgaattattcacttcatctctcaaatataatgggaggtccggagagcctacgacacagaaaaaacataaacaacttataaatggtcccggcttcctgccaccacgacatcgtcgaagccgcctcgtcaatagtggaatcagccattaatcagtgctaaaagcccaaacacctctggatttatttaatcatcaattgaaatattattacatatgtctcccgtaatattgggaagaacgacataccaaatcaatcactcggaagttataaacttcaacaaaaggaaacaacttaaaaggtaaaaggaataaacatgacaatgtaatgcagggctggccgttgggtgagaaccattaataatgtcgtcgctcggtcatgatgaaggaacagatggggaggtactacataatataatcatgcttgtttcgttgtttgaatataagcgacgactttatcaaggaatacctcggcctccttagcatcagcttcgcaactttctgcacacttcttgcttgtggcgggatcctccttatatactgcattacactcattgttgcaaaaatctatgaatctatccgcctttagatccttcactcccttatgggcctcaaatatagacttggtcttgatgaagcagaagtcttcacattgtttctcgtcgatgggggctttctttttctgctcactgcattcctctttgcacccagctctcactgcctcctctagcgtctctggctcctttcccatgaccgccacaagggtggcaaggagcagggccaccgcaatggtcttgttctgggccattagcgctgtttttcttgagtgtaattggtgtggaacaaagatgacttcccttgccctgatgtccctattatatagtgcatggatgagagtaaaggagctatataaatatgtggcggagagagcttcgtgggccaccaatggtgctaattataggcataatttttgacgtaagaaggtagagcaggttctacattataaccatttcattaatataaatcaggggttacatgatttttatcttaac

SEQ ID NO: 23551 - DNA, 878 bp, Oryza sativa
attcctgcagccctccttgtcgaggtccttgaactgcagcgactgccggtagtcgctggtcgccgtgacgaagacgacgagaaggatgctggccacgatgccgagcccgtcgtgcgcgcccttgggccacccctcggtggcgatgccgacgacgagggagaagaaggcgcacgccgcgaggatcatcagcgtcatgtcctggagcgcctcccagacgaacacccagaagctgcgcgactccgtctcggcgaacctgttgatgccgaacagctcctcccggacggcttgccggcgcctcgacttcgggagcccgtcctccggcgaggtgcacagcttcgccgcgatggcctccacgccgccatgggacttgagcttcttgatgtcgtggctctccacgatggagctcagctcctcggcgcagatgccgtagcccgccgccttgacgtcgtcggggaccgtgtactcgctcgccggagcaagtcctgcaggatcgtgccaatgtcatgattgggctccatggaaaagagaaaaaaatgttgatttcattctgggatgtgattgtgaactggtatcagtatcgttcataccttggatgaactgaagtgcagcctttgacactagcacagcaactcgcagcttctcctgaaatcggtacagaaaaatgtgcattgatggtaagcctcgtgaattttacagtggaacaattgcatgaaaattcatgaaaaaaacatgagtttgctggcgtttaatcttccagtgctcaaagaacgtgcagttttagcagcagattgcacacaatgaatagtcgagctggctgaaggtttgtcaacacgcacactgacgcaggacacaggctgagtttctgtgtttagtacatg

SEQ ID NO: 23552 - DNA, 2227 bp, Oryza sativa
cattgctcggtaagtttccattagggcttgattttgcttgtccaaatgcctgcagatcccttgtaagtagtgtaatgaactaaaatcctcaagaattaagggacggaaaagaaattcttacttggacatttcagctgaatgctttggttccattctcaccaacagcctgataccagttcctgcaaattgctttacattttaaaaatcatttaaaagcaagctagaaagttgaccgttattttatattaattgaggaattctgagttcacgccttgagggtgcagtgaggatggaatcgtactgctacattatgatctcattcaaaaaaaaatgaaacaaatatatgcaattgtatttgtttcttacgcataggagagctgccctggtaccctaggatgcaaggctcaattcagcaatgaacgacacatgaatgacatgattatttgatttgacatctaaaaacattgcacatatagtccgatgtcatcttgtcattctggttttctagaatcaagacacattttgttctctctttattggaaatttaaaagaactaagaaatagctaagatgaaaaaaaaaacaacatgtaatcaaatggacatggcaggctgctatttgacatggctatatttcaacggaacacaaagctcgttgaggtgctagagaacagtttacatactacacgggcccagtaaattttcgtgggggcatggacacatcacgagttattaacaccactgttcataaatcatagtagtatagtattattttgagaatatcatgcgtccaaaatatcctataggcacagttgcaatacaatctgcaggggcaatggcgggactaacatgggggcaatggggttgagatgaaccctaaataacaggaatcggcgtatgaaggggatgggctaattggagggaaactgggggaaaaaaaatcgatctcctatctacgcgacgctgactcatgaagtgggcgccgaggagggaggagggatacgagagaagaaccaataataccttagttcgattcgagcagcgatggaggccggccgtgcgcgcgaggaggccgcacggggtggaagcctgaagcaggctagggcgagttcaggaagaagaggggaccgtgctcaccgcgccgccgatctgctcgccggccgcggacacgatgaggcgaggcggagcaggtgcacgacggcgcggagcggggcggcggcgttggagctctggctcaccgtgctcaaaagtcaagacaggcaggaggtcgattgtggggcggggccgtgcagcgctctgctaccgcctgcctgtgggtcatatgcacaggcccatgaggctggaaagaagaaatttttcatctcggaaaaagttcacctaaggtcccttttcttgacgtcgagttttaaaaccgttcctgaactgaaataccaagatacaatgtatgtcacatttggtcccaaggcagtattactctatgattttggtgacatggcggttgaatcagtgtggggcccacgtgagcgccacatgtcagccatcaattttcttccacctctctcgactctcttctcatatcaacccaaacctctagggcagccgacaacgggtggggagaagggtgccagccggcggggacaagctcgacggcggagactgccggctagtgtggctcccaatagccgggagtgctcgtgtcatgtacctgactgcgcacccaactgcaattgcaatgtattcacctgcacacacaggggctggggcttccgccacgtcatgctgcccaagctcttattccccaaactcagagccatctccactgagctgctcaaaagccgatttgtttaggtgtcctcgagctttgtctctcccccgcggaggcgcacgcacagctccactgcatcatcttcgaggtcaactccatttactccacgctgtggtcgcgtcatcctcaacgcttccgcccttcttcccgccacccgccaccgtcaagcttgtcgccggtcgccagccttctcccacccattgccggccgtcaccgtcaggcttctactggcgtcgccgcccaacggccgctactcttctcccctcctgttgtcggatgccccagaggtttgggttgagatgggaagagagagaagataaatggaataagactcagccgccacatcatcaaaaccgaggagtaatattgccttgggacctaatgtgatctgattttacaagatt

SEQ ID NO: 23553 - DNA, 1532 bp, Oryza sativa
atcatatcattgtttgataaaatttaaatatatagatacatttagtttgttacttaaatactagtattggtaacatataaaattttttggcacaacataattccatcctactaaatttggtaattctgccaacttaattaaaatttgacattcacaaatttttggtaaggttgtttttggcagtaataggaacggagtcaaatttaactcatcagctctcacatgctcatcggctcatcgcttgtgtggctccgaaactcaagaggctgtggctgcatcgcgtgcgagggcgagtgccacgtcgaaacgacgtaggctatgcagcttcctggccatgcctcgggcgagtctgccaccacacgctgccaggagagagattgacctcagctatctcaactaccagcggcttccggtgggtcgccgacctgaccctatcaagttgagcgatcaatttcgtattgaactctcagaaattatcagcaccaactttccgtttatgattagcagccaaaatttaaattttaggttaaaagttgattttaagtttatggttaaagttgattttaaggttttttttatctaaatttattttctatttttagatcgctaaaactaagacgacgtatataaatttttaattacaaattatttagaagttttaattacaaattatttatcgtttgcaaatacgcaatgagaacctatatcgccccaacccatctgaaacgtacccaaaacatcaggtggggataatcacctctactactgggatcgatcatactgagcaaattgttcagcaagaggacttggattaaagcaagatgcacctcaatttgcaagttgaaatattagattagacgccagcaatccgcctacccggttgcgtacacaaactaatttaagcaatttggcgattaccacatcaacaagcaaagtttatcatccgaataagaacaaatacacagcggaacttaagcggaaactgcgggtataacaagtggcagttcttaattaaatcttggtatgcatatgatgattgtgaagcaacctcgttgagaatccaagggtagtctacttattacttgcacaaagtaagaacacaaatccacagctaatcagcatgagaaaaaaaagaagataaccaaacatccactgatgtgttgaatgaaattcaccactgcgaggatctgatacatagttgatttgattacccgataagatctatatatatcttacagacgaacagaaagataacacctaacataacttaattactgataataagaactatatatgtcttgcctttgacactggacataatacctaacacgaatttagtgctactattcttcacctgacattgaactcacgctcaccaaaccacaaatcacaatcactaccgacgaattattcatctaaccaaacctctactattattaccactactgctgtactaacagatcagcaacaccaagccagcctaaatttccaccaaactaaccccaatttttcccaaccaagacaccacctaa

SEQ ID NO: 23554 - DNA, 4876 bp, Oryza sativa
tgcaaaggctgtttaggttttgttgagatgattggtttttgaacagtcattctctcggcatgttatatgcttattttgattatgacgtgagtcatagcctaggtatttcgactcattaattgtcatgatatcatatttataccacatttgatggatctttgaaagtttttactcagattcttgtcatatgtgctgatttatggaccttgagagtattttttactcgggcctctttatatcttcgtttttggtatattaaagctaaagcagtcggctggatgttttattaaacgttgcatatgcttatctgtatgatactttggataattcggttgtaaaaccactcggatggatgttatttgcactttgactatatgtttagcctttagctactcacatagtcgggggctacacctaatgaggtgcatctatttgatgcacccgattatttatttttagcccttcacagtctttgattttggtactcgggagatcaatgcagaagaaattgaaacactcggattatcattttgcactacgagagaaggctattttatcgactgtaaaggtctcaggggctactgtgaagattatgtataccccatacctacacggcatgtatagttcgactgggtatggggtgccatgtatagatagaatatctttaaagggactcgggttaaattctaaacttgtatgtcaagcaaatacccgagatcctagtcggttacgattgtattttatctgtaactacctattccgttagggatatggactgtattttgtaatacggaccccttcccctatataaggaggggtccgggtgcctctaggggcacaatttttcacccagatcatacgatcaataatacactcgtcggatcaatccccggataggattagggtattacttcttgattaagaaggcctgaacctgtataaaattccttgtctctaaacccatccacttttctagcttgatagccacccccttttagtattgccgaaatcttgtttcgacaggcagtgatggcgggctcaggaataaaagttcgatctcgagcttttttagtcggcgacctggttttgagaaaaattcaaactacacgagatcggcacaaattgtctcccttgtgggaaggaacgtttataatttctgaagtcactcggccaggttcttaccaactcaagcgtgaagacggtactcatattgacaactcttggaatattgaacatcttcgtcgtttttatgcttaggcattacttttgtattttcctctttgactgttaacatcaagttgtcccttgagttatcagtcgggggctactataataataatagagtgtgatttttatcaattcaatttgcttacttgatttatcattgccttgtttgattttttggcttagccaatgaggactgagtttttttaaaacttttgaggtttctaggctcaataaggtttgataaaaacttttaagaaatctggagctaagtttaaatcatcaagcatagcataaatttatcagtattgtacaaattgtgcctccatcatcatcatcatccttatcatcagaatacacaatcaattagattcagttctttcatcatcagaattatcagacccagtcggcttaagatcgttgtcctggaatctctcaaccacatcagcggctatcttgtcagcggccttttgcgcatcactaataaggtcaagggcagcctcttcacttgtcccgtctgcaaagccgtcaacagcatcaatatcaattttcgggtacaaggacttggtcatcaccagcgctaggcctgctcccatactcccagtttctttgatgttcttaaaatatgtatctggagcagctctcagcttgtcgaagatttcgacagcatcaagtgaactcggaccgttgttattgaaaaacatcacctagacgagtggcgtagcggcattggcgacttcatctctggctccttcaagcttcttgattttattaactaagacatcgaattgggcctgggatttgatcttgtggtctacatgaataagtttacatcaatgactaggcatgaagattagagtggtttttgaagtattagctaccagtaccttcgacatctttcagagccgagtccctctgtttcgccaattcggccttgtctttctccagagcttggattcgcttctctagctcggatatcttggaagctttcactgtattgcctttcattggtcagttgcacatggatagcaacatgaagcaggtcagacagagacgatatttaccttttgatgaaccgctcagctcaaagttggagtcttgaagctcggcgatccgatctctaaggtcatgttcagtcttcctagcaagctctttggcttcacgcagctggtctctggttgcttcaagggttccaaggtggggaactaatttttcaagagttgcagtcttcgcctcattcctgagatggattctctgcaccacaaatttatccgtatttaagcatggtggccgacaggatgattgaagccatatatagggagacttacatttacaaggtgagtagcttggccgagtgtcttttttagcagacatacttcctcgtcctctttttgtttatttattacgatcccctgcggctgcatttcgtcatcccaccacttgactaatatgggtgggcgagaatcttcagccgattgtatccggaggacctcttcttcgtcaccgatcattgcaccttatgcattcataaataatggtgggactattgaagaaagtttgtcagatcaaagcagatttcagagagttgtgtacctgttataacttccggtcggggacgagcaggcccttgtaccctaacaggagagctggaccctggattgacgttggcatcctttttaggagggctgtttgcttgagcctctacttccgggatgtcattattttgttctgtacccgactggtttccagtcgagggctcctgattagcaccgactccagcttcgtccgactgatttccagtcggggtctcgttgctggtttctacattgtcggttgctggatgattgtcactcgggcgattttcgacagtcggcccggtttcttttcaaggacccatctccatatcagtcggctcagggtcttttccataaggatctatgtcagatggcttcctacaaatttgagttatgctatcagtgctatttcaatagtgagtgagcagcaatacaaggaaaatggccaaatgatttgtacctggaggacttactgattttcggcatgggacgactggatgatttcttcttcggattagcttgccttgattgttttccagtcacccctttgctgccagccttttcagcatcgtcattttcatcgtcactcagaaccaaattcctcttgcggaagtctgactagttagccgattgagaggtgttgggttgagtgtcaccctggatttttggtcctccgccagcttgaccagtttaccaccggggtgagcagcattgagcaattgggggatctgacttcatcaaggcgaattcctgggcatgatgatccaagttttcaatcaactttatagatgataaaagcgtgcttttgagaaaggctgagatattaaatacataccggtggaggggggttgaaagcattgtacggcaccactggcagcaagtgcgagtagctgactacgattgcatttgagaagattttatacattctctcgttcataactttgaattcaagagatttaggatcttcacggttagggtcatgcttgccatcgaattcaaaggccgcgcgagatctttcattgattggggccagccggctcttgatgaaatgccgggtgatctgttctccttgcagaccctgctccttcagcttcagcatacgatccatcagggaaagcgcttgagcagcttcatctccattggaagtgagttccaagtatcttgatacactagaggaaggcaggagtactcgggaagagctggttcgggattttgtacataaaaccaatttgcatgccaacccttattcgaagttttgaaaggcatggagaagtatttttggcttaaggttcccctcagttgaaatccagctcccccaactacatggtttgctcttgtttggctgggatttgaggaagaagatgcgacggaacagggcaaaatgcggtcttatacccctctcaagtagttgagtttgaaaatgtaaaaattatatgaatatatttgtcttgaaaaataatttcataaaaatatacatatatcacaaaccccagccaaacaagaggaaaccatgcgtagttgggggagctggatttcaactgaggggaagaagatgcgatggaacagcgcaaatgcggtcttatacctaggaaagactcgcaagcataaataaaattggcaatgtggactatggagttggggtttaggtgatgcaaactgatcccgtaaaactccaaaattccccggaaaaatcttgaggttggaagagaaaatccgccatagaagaaatgagaaaataccacgacttcatgtgtgtcaggggttggaaatgcttcgccgcacgccgcacgccacccgatgatttccttcgccgcaagaacaccatgcgctaccatttccttcaagctctcctacgtgacgtcggaggacgcccattggctctcgaagctctctctcctccaccatggatgtgaattggatgatgcgatttgctttggaaatggctgggaatggatgggggatcgatgcggtggatgcgcggaagatttctgtggagttttggaaggcggatttgagcgaatcggtgaaccctagttccgctggtgtggttttgcactgtagcggggaatggggaaagt

SEQ ID NO: 23555 - DNA, 911 bp, Oryza sativa
gcgacggacggatccgcctttcccgacggcggggacggcaagggcggcgggaacagacggcagcgaggacgaagtgggtgcgggaatagtggactcttctgtgattcctctttgtgttcttatgtgattcctctcttctttgtgttcttgggtgattcatcttgtgttcttgtgtgattggcaacgaaatctgtggcgggaggaggggatttgggcgcgacttcttgctgaattttcgagggcgaataggggatttcgctaggggaatctcgcgcaagagcaccgggcggcgagggaacgactcccacagcgcacgcgcctcacatcgattcctccgcgcgtccccttttccaggcgaggttttgcgccccctagtttaggcacgagcgccctagctgagacgcgggtctgagtgacacggcagcaaaaatccaacgtggcgcgactaagacacagtccaggtcgacgcactgtgagaggcctaattgatttgcattgttgtggattgagagatggagaccgttccttgaggagcggggagacagggctcctctctgtacaagtacactgtagttcaaaaactgcaccatcgtctcgttttctctttaatgaacaatatacaactacagaatcagagctctcgctgcctgccctcttacagtacacgttgtggctgtcaggggatgcactttaagatagagaagagttgaagtctctcgtttcgccaggaggtgaaaggttggagaaagagaatcctatcgaccgaccgatgccgatcgatcagagttagcgtagtggtggctactacactgatggcttagctagtcgtatatatgcaatgcaaagcatccatgatccagccaaggcatacagcgatgagagagagacgatccaagtgaagaagaaagtag

SEQ ID NO: 23556 - DNA, 1787 bp, Oryza sativa
tctttgatgaacaggaactcttgtttgccttagccaattgcctctattatacgatcggcttggactttctgcaacattactgcacccaggacagtcttcaatagatggcaacctcataccttcattccagcaaaatctaaagaactcacaaccccaatgaggatcaaagccgcatcatcttcttcataatgcctctcctgctgcttggcatatttcttctgatatttattgataattttagccgaattcacctgaaaacctctaccacattgacaggaaaaggattgccatcaaccttcatcggcctcttggaatcatcaaatttgatcttgcctccttcaatagccgcctggatctgctgtctgaagactttgcaatcattggtagaatgagacccaaaattatgccacttgcaatacctcctcttgcctaactcctcagccgatgggattgtatgaccagtaggaagttgaatctgtttttccgaaagtagcaaatcaaagatcttatcggccttggtgatatcaaagtcatacctctcttcctttccagaactcttcacccattggcatggtataaccttcttgcttctaacccattcggctgctgctatttcggagtcatcatcatcatcatccgatccatatatgtaaggacagacatgattaaccttttcaaagttcttcctggcttctgcaaacctctgttcatgcaaggttaccttctgtgcaagatgtgacaaactatcaaagtattgggacgagaacttctccctgatcggagctatcataccctgaaaagccaaatcggctaactgggcatcagttaaactcaagctgtagcatttattcctcatctccctaaacctttggatgtaatcttgcacaggttcatcatgtctttgcttaatcgccgttaaatcagacaatttcatctcatgaaccccactatagaaatagctataaaaatgcttctccaaatcggcccaactgttgattgatccacatggcaaagaagaaaaccaagtgaaagccgatccagacaaagacaatggaaataacctaaccctcaaggcattcacagccgatgcttcaccacaccgagctaagaatcggctaacgtgttcatatgttgaagcactatcccgccccgagaattttgaaaaatctggaaccttgaatcggtttggcaatggaactctctcaaaccactcagggtatggatgccgatacagatttccagcatcctgaggcttaagcccaaactgttctctcatcacatctgcaatcatatcggcccatggtcgttgctgaggcacccctgtgcttgttgtggcacgggctcgaattgattgtattgaggagtgaactgagactgagccgatcctccttgctgatattgaatttgcggcgatggaggctaatactgataattcaaattgcccccctgataattctgaaagtttggttgtatattgcgcaccaaatgttcgggaataacttgaggtatcaccgtttaatctggttgcacattatgaaccaaatgctctgggacaacactattcacagcgtgctgccttagctgattgtcaggtgttccgaacccagccgatgcattcatcaaaccttactgctgaatcggctgaacaacctgttgtctcggtggcgtttgctgaatcggctacacaacctactgtcttggtggtgtttgttgaattggctgcacaacctgctgccttggtggcgtctgttgaatcggctgttgttggattgggtcaacaataagct

SEQ ID NO: 23557 - DNA, 5400 bp, Oryza sativa
tgcattgccttgctcgccaagaaggcgagaatgctagagagagaggaagaggagaaagaagaggggagagagtatatatgacaggtggggcccactatttaaaaaaagaaaatgctaactggagtgccacgcgtacaccacatcggataaaaccgctctggattgggtcgaggggggtaattcgtccggtattgaaagtttagggggagcaatgtttttgggtttaggggggtaattcggtcaaccatgatagttcatggggttaattcgtactttttcctttgcgccacgttaataggcttggatccaccaggagttggcctcccaaaaaagaattcacgtttacgtgaaggcctcgttaaccgcataatttcacaggaacagaacacgtcgagcataatcctgggaaaacacctgatttccaatcggggtcagttgtgaaccaacaagctgcaggcgcaatgaacgaacttctctgtccagtttcaaactacatgcaaactgttctaagtcttacaaattcaacaaatattacggatatgcaggtgagttttcaacaaaattttagtgagatcaatgatgtgccgctagttttcatctttgagtgcatgttagagggcacatttacgggagtgtgagtatgacgcagtgtgttgtgcgtgcacgtgcatctgccgtgtaataaaaaaaaattcaaagcaagcaatgtaggagtaaaacgaaaactgatgcaaagcctttggtaacccattttgttttcctattgcacttcttgtaatccacaacacagtcagctacggataaaaggagctgacatcttagtaggaaggtgcttgaaacctctagtactgtgtttcacctatcatcctcttcaaggttaataatctgaagaaagatgcttgcagcagtgagagattttgggctaggcctaagtataatggtaccacaccggtttactgatgctaagatttatactctaccctatactcttaagctgctacttggatggatccttaccaaaccatccacagggtcaggtcatgtacaattacaagttagtaacctccaaatcctttttgtcagcctgccaattttatctagcttcttgatgaaaatggcaaagaactggtcgtggtttatagcaacaatctgttgtcctccaaagctgtgtgcaatttcaccaccaaccaaatttgtaccagattcttcactttggaggtaaatcctgttatttccatcgttcttgtgtaggtagaaatttctacctcccacgtctccaatcttatcgtttttgttcaaacctgccagcaaaagattcagcttttacttctataatcagatcactcaactatgtattggcaatcgaccaaggtaacaagataatgttggaaatttgacttaatagtgagtagtcacctgggctcaacgaaagcatttctagtcacttatgttcatatcctttgttccgtaaagaaaaacatgaacttattcatgttttagtatgtaacaactagtaatttatatggtccaacgtgggagataataggactcaggtaaacaaagaactgttggataccagcatcattacactggcattaaaacctgcaacctccataattaactatgttccgtataaacccatcagtataatttaaccaattatgggttgtaagttgaaagttcatactacacatcattttactgtgttcaggaagacctgaataaattttcactaataatagtagtagccaaactatcatatatacctgcagtaatttcatttcactcgaaataatgctacaattcttttgagtttcgcataccattcttctagttctatgttcccttaaggtgcgccacagcttttggatgcgtttcttactagattcactttacccttactcacaagtgcaattcgacatatattaagcgacgaatgtgaaggctcgtgttaaatgacttactctggaggcagaagtgggagtggtggagctggaaggcctccgcggcagctggatccaaacgtgggcttctcccctccttcgcgtacctctccaccacggctgcgatcgcctccccaacactcgcacccagccgaaccatcgccttcacaggcccgacgctcccctcgactgtcacgctcaccaccacctttgattcctgcaccaaacgaagcccagccaattcactcccgcgaaccgcgcggctaacaacaacaacagtccacttctgtacctccctgggattgcagttggacagggaggcggcggaggcggagcggccgaagggggagtccggggtgaagacgtcgaagcaggtgtgcggacgctccagcggcggcggaggcggggacggcggggagagcccccgcggctcggggtggacgcgcccgccgctcaacaagagcgccggctcggacgcggagcgcgcgagggccctgctcccctcccgccgcggcagcgaccgcgacgccggcgcggggcgcaccgccagccgaaccctccgccctccgctcccgctcccacgccgtcgcgacggcgacgaggagagccccgccggcgatcgacctagccggatgcttgcgaaccgggaccggctcttcctctccggcatccagttcagattcgagaccgcttgtttgatcctgtgctcgcgcgtggagatcgcggatggacgcgatgccgcggagctcgatgtgtttttggtcggtcggcggacggtggtgtcgtcggcgcaacgtttactttcgcgtcgccattacggcgagcttttttctgtgctttactcaacaaagggaggaagcttcccttcatggtgatcctcttccctggaactggtcttatggactgtactccatccgtggtacgcgtggccccacgttgtcagtgagaaaaaccgcgtaaaccgggagtaggcgtggaagagagggagttgtctcggcaagaatttggggtgggggtgccggcgtgtggtgcggaattacgtcaatgggcaccgtaccttcataaataacgaatgtgccaccgggtgtttgtagcttggttttttttctttttaagatcatgtgtttttagggatttttggagcttagaccttagagggtagtatggggaggtgttacgtgcgtgcgagcgggattcttttccatgtcgctactcgcgagaagatttgttgttttcttttttcgttttttcgatgatacgaatgcggaatttctatttctacgtcagaaaatccattgggccgtctaatatatttagagattcatgttgagagatagacctatatacttctcatgggccgtctgtatgggctattttttttgtgtactagactatatgggcctagttctttgggctctataggtggtggtgagcgagccattactgttcatttttttaaagtccgcatctacttttgctcagttctgacatcccacacatgtaagtgatttactcaagatataaggatgaatgataaaatttaaccaaacttacaacgggttgtaattattaggtagtatttgtgtgaattttgccaagatttaatgttgtaccaataatttttagaaattcatctagcctatctctatatatgtgttcccactttagaaatggatctaagcatctataaaaattatatttaaactcttcttgacctaaggtgatgttgttaggtttgatattcagttcatgatgcacatgtcacaagttacttgcttaatgatttgtatttatattttgtattatgttaagagaatgtttataattaagatataatatactctatgtgagttaatatgtttattaagtcctatgttcatgatatatgttcaggtgagtttgtcaagttagtttgtatgaatttgccactgattagaccaaaaaattcaaaatattaacaagtatataaagattagaagtaaaatcggcttgaaggccaatagatatatttacacagaaatgtttcaagtgttttgagcaaaaattttttaagatttatattattacatcaacccaagaaattttggattgtcgatatcgcgtgtaggcggatgtggtttacttcatcgatgatctttgcatcttcggcatccgaacctggcacaagcttcatagctttggtttgagcaggtagatgtttggtcaatgccttcaactttgatctttgctcttcaatggccttgggaagatcggctaaattctgtttctccaagcaatatattcttgtgagtttgttccaattttgccaggagatcgggttcttgctgttcaagttcattaatgcgcttttgggttgattctgggccagcaattagttcatcaagtttggttttgcttttgtttacttgctgcctgctagattggagagtcgattccatagccttgagttcaaggcgatctgctaatctttgttgaggtcgttgaaactagaatcgacgcgattcaagatgagctgccggtgtgatggcgtcaattatatcatcgggcagctgatcttggacttcttcaagtctccctttgatcgggccactgtcagtcactaaagcatccaatgaagcacccagtcgatcagctatgtctaacagtcgtgctctcaagtcatcagagatagaaaatttggtcttgcttgtgatgtcttcatcatcttcgtccaaaaattgccttatgtaagatgaaaacatatcggctagcttctgcgaagtatgggtgaaagatgagaaaaagcaaagatggccaggaattgtgatatgggtatgcttacttggattgggggtacaacagcagcagttatttcttcttctccctgttggctgccgatcgcggaagtagtacgttcacttggtgctcgtcgacgaggagaagacgatggagccttgggctgaaaatgttggatgtcagaattgataatatcagctgaaatgaaaggatagaaataaaaagaacttgccaatacatgagtaggagcgcgaggtctaacaatgcttgtatcggctgcttcattatcggctgagtctttgtcatctgcctctttgttttcattggtaggatcatcaaccacagtagcaggagcatcatcgacttgttcttcttccacttgttctgtcaagaactcttcaacttctggatcaatgggagaaagattatcatcggcagatgttttggatttagaagtcttgggtttcttggatgttttcttggaaattgcttctttacgctttcccagtgtctggattagtgttgatggtcgttatagaccagcttcgactgtcaatacaactaaaataaaagagaactagctatacttgcaatgcatattttgctttagagtaatatattttcacttgtacttggggtattaattgtttgcagagatttctacataaatgggggctgcagg

SEQ ID NO: 23558 - DNA, 2964 bp, Oryza sativa
cccccctcccttccaagggtcaaacccccctctcacctcagttaaagatcggtcaaagcacccccatgtcggtcaaagcccggtcaaaccacctaccaattccccaccacccacctcttttcaggtatcttctcgcggaacggtgcaataacgcgacagctatcgtgcagtaatgttgtgccttacgtgcagtaacaacattcaaatttagttgaaatatagtcaagatggatctacttttgataagcacttttttctaacataatggtgcaaacggtttaaaagaatcatacatcacatgagagatattgttcttcgaagcttgggttttttggatcacatgatagcattactactcgttactactatctgttgtacgttactacaatgacatcgcgatgttactgtagtgtgcagtaaagaccataacatttgtagtaccaatgcgtcttactgcaattcttgaatagcgttactgcataaacatatgtagtaatacttccactttgttcggtaccaagtatatttagcatgtgagacttttaacccttttttttatttttggtttactacaatttcaccacgatgttactgccaaatatgcagtaatgttctatatgttctactgtaacaaagtgtgttactgcaattctggatagtgttactgcataaacatgcagtaatgtgtaactgtcaggtggtaacgtgtatatgccgtgcagtaacaattttacttttgtgtagtaacaagtaaatagttagcatatgaaactttgaacccatatattcctgatttgatttactgtcaaaagtgtagtaacgtcatatacatgcatgcagtaacactatattagagggagaagaccggttttcttaagaagagggaggaagaacggtttcttaaggaggagagtatgtagaagttgtgggcactgcttgctggcagatctggacaaaaaggaattatttaattttcaacaacatccagctttcaatccacttgtggaggattggtttcaaagaggatttcactcttcttatgcatagagtgaaggaggaagacaaacaaaaatatcaatcatggaaagactcaattttctagatcccttgtaaagtattttttttcttttttttctctcttttgtaaatatctttatatatatatatataatctattaacacagtaggagcctctcctactgtttctcatcaaaaaaaggagagtatgtagatgcattttgaagttctatcctccacatacagtaacactatagcatcattgtgaaaacggttttaaaaaataatacaaaccttatgagattttgcttttcaaatattggcattttgaactttaacactccatatgcagtaacagaatatgtaatttgcagtaacatgggtatatatatgaagtaacatagttttatcaaatgtataaaattgttcaaaacactcctacatcaatcagacctcactcaaagccacctacagactttacccatagcacacctattcaatcttcatcttgtaaaactgacatagtaaaactacgattatcgtgtagtaacataactacttggaagtggtaacatgcacctattatgtagtaacacttctacttttgtgcagtaacaaatatatagttagcatgtaaggctttaacccatatatttttgtttcgattcctggtctactacaattttactacgacgttactgccaaaagtgcagtaacgtcctatgtgttctacagtaacgtcacgtgttcctatactttcacaacaatgttactactggagcatagtaatatgttatgagtttcggtagtgaaagatattagaattgataatcatattactttctcacaaaattcttaaaacaaatagcatcattagatgaattggttagaagaatgtgctttgaactatgaggtgatgggttcaagtcttgattttggtaatttattttttattttagtactccctctgttacacaatgtgagtcattctagcatttcccatattcatattgatgttaatgaatctagatagatatatatgtctagggatggcaacggggccatccccaacggatagtgctaccccgcccccggacacttcaaaaagccccgctccccctccccagcctcggggctgactgctccccgcccccgtccccggcctcaaggctgacttttcgccgtccctatccccaactgggttctcggggccccatggggatacacacctgcacggctgcaccattggctagaagacattgcgaggagcaagatccccattcatgtctagcaggcatgcaactgaagccaacgaagctaatgaaaatcaaacagaaaggttatgcggctatgcacaggcgccaatgaatcaaattaatgcattctatataaaaaaataaagaaatacaaaggaaaatcaaagaaacgcatcaagtgttaacatccatggaaccagttgaagttattcatgttcaaatcttcgaccgggactcggtcggtggcatccgcttgctagccctccgttacagtcgagatggctctgataccaacttgtcacgcccggaaattcactagtaatttccgaacttatttgtgcataaaatcctcatccaggaatcagccgaggtacacaaactgacaatttaatatacagattcatcaaattaactaaaacgataagtacttacttaagaggcacttagtcctcaccatgaagaaaactgcagcggaaaataaaatctagcgaagctccggctccactcccacaggcagctcaactggggtataagccaaacgtcttctcctctggatccttattcttcaactgaggttgattgattattgcaaggtgagcatatgacatactcagcaagccacacagcaaatatgcaagtgcacaaggataccaaaggatggcataatataggctcatttgcaaaagcagca

SEQ ID NO: 23559 - DNA, 5194 bp, Oryza sativa
  unsure (1)..(5194): unsure at all n locations
ccgttgtccccgagaaatctcacaccgtttcctctgttttcaccgccgaagcaaactccgtcctatctctctccggtgatcccctcggtgcacaaagcgatttctaggtgatctcttctccggccaaatttccgcccgcggcgatgtcgacctccaccagcccgtctaccgcgccatcagccgaatacgctgaggtatgtgcccatcagcagatccctcttttctgcacagtagattggttttcctcatctcatcttgttttcttctctattccttctggattcgtagcacatttccaatctagttgcaattccaagtctatcgcatgagagacattatttccttggtctgatcggcaatctcgaccctactgatttcatcattggcgaaaccaatagaatccctttcaaattggccaaccctaatctaggtcattggaagagcaccttcaagtcttggccatctcttgaaaaaacttgtctgtgaaaatcctccgagcaggggccgagctatccacattggcacccccagtcactccccacccccaacctagaaacttaggggtgatatttgtcaagcccagaaattcactagtaattcccgaacttatttgtgcataaaagcctcgtccaggaatcagccgaggtacacaaactgacaatttaatatacagattcatcataaaaataacgttacatacttacaaaaaaaagaaactgcagcggaattacggtctagcgaagctccggctccactcccacaggcagctcaactggggtataagccaaacgtcttctccttcgcaacttgtcttcaactgaggtttgattgattattgcaaggtgagcatatgacatactcagcaaaccacacaacaaatatgcaagtgcacaaggataccaaagaatggcataatatagggctcatttgcaaaagcagcatttagcaaacagttaagaattgtaaaacagtagagtaattaatcatcaatattaatcaacactgaacaacgctgcacaggcccaaccatcctgaacaaccatacccggctgtacagatctatctccaaaccaggaatgtaccattccaaaccaggagctaatcaaattattactagttatagcatcattcattatggtgagaagtgtgagactaatcacaaaagacattgttagacccgcccataaccgcgggcacaattattcgaatagttttactctggccagaggtgtaccactgtatccacaagacacgattccacacatgttaccatgccctgaagtaccaccacggcactgcaaagggggaaatcgtgactgtacccttcgcacaacacaactcaccacattgcaccattcccggatcatagtcacccccttataaacaaggtatggactccccagcgacccccgtgggcttatctccaccacttctcaacctggtgctctgcaatgaaccatgctatacaaaaggtaaagccgttgcccacgctggcttgtggttggcacggttaatgtttcacaatagtagctcgcgaaccggtccttaattgtcatgagcacgactctcaaaaccatgtgctcacaacccaccattatcaagttttagttggcaagtaattaattaaccaatcacgattgaccatcgtgaactatcattaagccatcattaaataatagtaagtcataagttatcccaatagtgtgctaatgtttctaagcatggctaagcaatcatatctaatatctagctgaaccaatatataaagctcaactagtcaagttataatatcccaaggtatcaaggaatagagtaatcaatgcaaacaggccataacaaaggaataggttcacaccacccggtgacatttgaaaataaatgcacagttgaaataaatagagaatttaaatataggatcaacatgctcaaaggattgtgtttaggatctgtgtgacttgccttgcaataatcggtcttcaattaatcttcttgaatacttctggcgcactcgcgaaccttcgccacgacggaaacgacaagctaacacgcaaaacgaggaaaaagactaataaaaaccaaataaacaatacataaaaagtaaacaaacatgtagatcataattttagatgaattatgagacttgaacggcctcattctgacttaatatgaatttaatatgaattttacaagattaaatctaattaaagcccatttaaaaagaattaaataaatttaattcaatttatggacaattttaatatgtagatctttattttatataatttttgcaacttgaaccacattaaactgagttcaaatgaattagttatgaattttcaaagattaaatcggattaaaacacttatatggattttaattgaattatgacgcaataatgaattatttttgaaaaggaaaagggaatttattgcgtcagcggctagggtttcgcggtggaccgggcgcacggcggcggttcacgcgaacggatggccgagatcgatccatccaaaacggacggccgagatcgatcggtccacaaccggctcacggaaaagggcaacaataacttcggcaataacgtcaccaccggcggcggcggctcaccggctcgaacggcccaccctcgccggcaaacaacggcgcgacggcccaaacggagagcaccaacggttagagcgcgacgcggcgaactcaccggtgaccaaagcaactgctggatgagcaacggatggcgcctgtgacgatgaagatacngcggcggtttttctggtcgactgtgacngcggtgctccggctgtctccggcggcgacgaagaggcggacgaggacggcggcgacttggcgaccacgatggcgacctgcccgagcgacgacgacgaccggaacggcggcggcgcatggctggagcggcggcgacgacggcggctcgaggttacacggcgctagggcgcttccgacggcaagagacgaaggcgagggtggcggcgggtaaaggagacaccggggatccttttaaaggggctagcgagctgcgacggaggcccacggcgaccggagacgggaaggaaaggttagggttcggaggaaagaaaccgatccgattcgacctcgaatcctcgagtttccaaaccgaattaggcgattattccataagagaaaaggaagaggagatcgagaagatcatttcccctctattgatttccccggatcgggaaaggatcgaccggatttggaaggagacgacggcggcgcgacgctagggttcgagcggcggccggcgcgaggaggaagacaggcctgacaggtgggccccacctgtcagcggcaccgagagagagaagagagcagcggctcgagctgggccgactgggccgagaagagagagagaggaggttttgggccggctttcggcccaaagccaaaagagacttttaaaaacctttttcaatttaaattattcatgaaatgcaattccatttattaaaaatacttccttagctcaaataaatcccagaaaaatctaggaattatagaattaagcaaagtatttaacaaaattttatctagcccaattttatattgagatttaacagattaaaattagatcttctcttctaggcttttaaaatcatttctaataattccttttaaacaacaatttataatttaaggattttaaacaagaaaagctcttaacaaatataattagatcattaaaatcaaataattactgaactgttctttgtatcatttaggaattgagctccgaaaaatccgagaaaatttcagagagttgacttaatcatggagaatttaataaaaattaaatccatccatgctttatattaaggaaattttatttcccacatttaacttcacttgtaaattaatgaacatttaatataacttctaataataatttattaaataatttataaatcctgaaacaaaaatcaggatgtgacatatttggtccctcagctgcggcggtgagctttgagcaggcgacggcggggctgcgagcttggaagcggcgatggggtgacgcggacgaggccacgcagaacaaggcggcgtctcgcgccctcgccctgtcgcctggtcgattggatctgagaggagggggatgggaagactgagaagtggagacggtagaccagggtttgctcagattatatatgtggacctaattgggccagtctaattgggttgtgggcttaggaaatatagcgtggcctatccacctcggggacccatggggattcggggcctggggactgttgaacggctccgcccccggcccacccgatgagggcttttcttttttgccgttttcagccccatggatggtagttttagcccatttacatcccctaatagagtaattccccaccgggtgtgaggtgtcggggccccattgccatccctacttgcaggaatttgtaccagccagccaggtttatcgtccaattgaccacacgatcacaatcgaaactttggaaggttagtatactacacccaacttaagtgtcgatcaaattttattgaatgattctttaagcctctttagcaattctactagtaatcttacacgtgcaatgcacgtcttgaccaatatgaattaagtccagtgtaatacaattgtaaaaatatgttatatcaaaaatcaaatttacggtggtatatcgtccaaagctaggatgggcatttcaataagccaatgtaagtgtatacgtggaatccacatatgtaataaaacaaccaatgtgtaatatttgataaattataaatgcaatgagttaagaaacaaataaacaacaaatgtactatctgcattttaaatatatgatattgttggcttttggacatttgaatatttgtctaattcaaaattttagtatgaatacgcaaagatataaatataagtcatgcttagaaggacttttaagcatgacttaaatttacataatttttagattaaacaaatggtcaaacgtcacgtccaaaaatcaacaacgttatatatttaaaaaggaggtggtaatttcatgcatcaaggtgtgacatcaattttttttaatctgccccatttagtattacaccattcagaaatcttggtgtaaataaaaattgttcatgttgcgtacataaattcttattgtttcctatgtgaaaagaggggcaataaaac

SEQ ID NO: 23560 - DNA, 1606 bp, Oryza sativa
tccagactttgaccgggtatgcttactctttgggtgaacgtgaagcttatattttgtcatgccatcttaagtttctattttaataggcctatagtctaacgttactgattttaactttttgtttatgaagattgattggcttaacaagtttgtcgaaaacatttggccttatcttgacaaggttggctcatacaagctagtgcaatattatttgtccaagtttttatttggcactgttttgtaaatattgtcttttacaggcaatatgtaaaactgcaaaggaaatcgctaagccaattattgctgagaacactgccaagtataagattgattcggttgaatttgagacattaacattaggttcattaccaccaacatttcaaggttagttctactcttatatcttagttgcagacattttggatcaatttaattacacagaagtactttttagccaaaagttgctacatcgtaaaaagacttttcatgctaagaatgcctaactaatttgatcaagtaaccatggaagattcagatccacggctaattgaaacaactatatttatgaactttatgtgaaatatcacatttttgttgaagagtcagttatgaaactacatagtcctttgtcagaatagaaagagtatggcccaaagggccagttacacttagtttatattatttttaaagttactttattgaatttatagcttatgtgccaaatgtgagtatacctagcaacagcaagttgtttaggtgtacattccagtcttacaactctgttagcaaccgagacttccaatctcaattccactcaaatatgcaagcatccagtgcaatagcaaccaaactccagtaaatagaggtggagaggaggatgaactaagggaattcaactggtggaagatgccagaaacttctggaaggaagaggaagaaggaaggtagggaggaagaagatcgacagggccaaccggccaccaggtcgccgccaccgttcgccattcgccgattgctcgatcgatctccccctagaagtgcatactctgttgttttgtagttcctctcctctcgggctaggctttggaagcgacggagccagcccagcccacttatgttcctaacaaactcatgttattggccctactcttgctcaagcactcaggcttctatctggatttggattatcaataatcactaataaaatgaaaccaaaaataaagtaactgcctagcttaacttaggcttccaatccaggtaaacctatttgaagtttgaacactcatttccgcgtcaatgagaaacgtgcaggattatggggccaattaagcacttttgtgataaagctctcttcgacctaccttaaaaagaaaaaatgtatgttagcggagttatagcatactagcatatggcctgtgcgtggcaccggatttttaatcaaaaaaaattatcattaacatgttattaatatctcttaattgttgaacatatttgttaatcacatgtggacctttttagtcccgcataaatcctttttccttcccacgaaaagtagagagttggtgggagtagttgagatgtggcccctctagccccacatatcattt

SEQ ID NO: 23561 - DNA, 1807 bp, Oryza sativa
actccactaaaccactcgcagttttctgcttaagtgcctattcatccggttttctttgattattccactactacattttagcctaaattttcacctgtctactctaacttaatctgtggcgttttttcttcacaaatgttgatggtgacatgtcggcaactgttgacttttccctaccttgcaggagattatcaagactcaggtagcaaacatgtacttgtggccaaaagtacttgaggtgccaatcatggatccagcaaagtaatgcatgctataatctatctactattttgcaaggcatgtccttctggttgctaatttggtatcttctttttataacattgaattgaagagcacaaaagaagcctgttggaattttgcatgttaacatcgtacgggctgtcaaactcaccaaaaaggattttctgggaaaatcggatccatatgtgaagttaaagctaacagaggaaaaactcccatcaaagaaaacgtcagtgaagcgaagcaacttgaaccctgaatggaatgaagatttcaaattagttgtcaaagacccagaatctcaggctcttgagcttactgtttacgattgggagcaggtaatggttaataattttaaatatcctcctgagctgtttaatccagatgctttcaatcctacataaaattttcttatcaggttgggaagcacgacaagattggaatgagtgttatcccattgaaagagcttattcctgatgaggcaaagtcacttacacttgacttacacaagactatggatgctaatgacccagcaaatgacaagttccgggggcagctcactgttgatgtaacatataagcctttcaaggaaggtgattctgatgttgatacaagtgatgaatctggcaccattgaaaaagcccctgatggcacaccggaaggtggtggtttgctggtagttatcgttcatgaagcacaagacgttgaaggaaagcaccacactaatccatatgtaagaattgtgtttagaggtgaagaaaggaagaccaaggtatgaaaaacaggtttaaatgtgtaataaactttcaccaataacatttactgtaggaaattttgaaatcaatgggtagttttagtcactacattataaaatataatgtttgatcttgtaatactgtttatgcagcatattaagaagaatcgtgatccacgttgggagcaagaatttcagtttgtctgcgaggaaccacccataaatgataaaatgcaaattgaagtcattagcagaccaccaagcatcggtatacattccaaggtatcatttctgtgatctgattatctctatttgtgttgtgacatcaacttttagtgtttaaagattaatggagatttgtacttcctagttgtgtaatcctattgagaaaaacagctaagctataactagtgaacactattgctaggcacaccagttcccactgcaggacagcagctggtcagggaaaataaagttctatctgacaattctagctgcaattctaataaccagtacggggagaaccactggaaacttgttgataactgcaaaagcagttttcagcatctcatttcgttattttttatatgaagttattactaaattcagcctccaagtttgaagttgtttttagtagaacatttttttttgcggggaaatagaacagattattaacattaagagccacaagaaatatttgaatatgctaatttaaggaacaaattttctgtcgtgggaatgtatttaaaatcacgggatacattcactactttgcagggcatttaccccccg

SEQ ID NO: 23562 - DNA, 678 bp, Oryza sativa
aatggtgagattttggtaaacctgaaactacaaaactgtggttaatcggctggtatcatgtctaccttgaatgcatcttcttcaaaatccaatgtcgtgcatgcaaaatatcctgttgttgcttctattgctaaatcttctaatgctaccaatgtgtctaatcatcatgaaaaatatacttgttctttttgtggcaaagatggacatattgttggtttttgtttcagattagctcataaacagaaaaaggagagagagattgcttttgcaaaatcaaagtggatatatgcctattggatcttctggtcatgtgtctcagtactggattcctaaatttttattatcttctaaccccagtactgaggcttcgacttctgcttgtgtgtaggctttggtggcaaggaaggagaacgtgtggatcgtggattccggttgttcgcggcacatgaccggtgataaaaattggttctcctctctcaaaaaggcatccaagactgaatcgattagctttggtgatgcttctacaagtgtcgttcttgctacaggtttggtaaaggtaaatgaaaattttgaattgaagaatgtagctttggttgaggacttaaagtacaatttgctttcagtttcacaaactgttgatgaaaattttgaggttcactttaagaaaactggaagtaa

SEQ ID NO: 23563 - DNA, 7492 bp, Oryza sativa
cctcaatttgatgggacacattacgccgcttggaagcacaagatgaagttgcatctaatctctttgcatccaagtatttggaaagttgtttgtacaggtattgatgtacccaatgatgacatggagctcacctcggagcaagagcaactcatccaccgcaatgctcaagcttccaatgcaattctctccaccttgagtccggaggagttcaacaaggttgatggacctgaggaggccaaggagatatgagatactttgcaactggctcatgagggatcacccgccgttcgtgaggccaagattgagttgttggaaggaaggcttggaagatttgtgatggatgacaaggagacacctccatagatgtatgataggataatgatccttgtcaacaagatcaaaggacttgggaatgaggacatgacaaatcactttgtggtcaagagacttctccgtgcttttggtccaagaaatcccactcttgtatcaatgatacgggaaaggaaagacttcaagaggctcaccccaagtgacattcttggaataattgtgtctcatgcgatgcaagaagaggaagctcgtgaagtgaggcaaatggtgaagaatgccgccatgatcaaaaatcaagaagtagctttgaaggcaaaacaagaagaagtgtcaagttgtgaagaaattgaagatgaagagatggcttttattgtcaagagattcaagcactttcttcgcaagagtggctatggaaaagggaggaaggatgatgacaagggaaagaggcaatcaaagagagcttgcttcaattgtggcgaatatggccacttcattgccgattgtcccaagtcaaatgaagctaaggctaagggaggcaagaagaagctagagcgtgctcatgtggcagaggtgtggtactccggagatgaaagaagatctcccaggtcaagggccaagagctaaaaccaaaaacaaaagtttaaaagaagaggggggtttcgaccctgtcccttaaatgatatcctctaagagaagagagtgtcttttcacacttgagagaagtggggaggagtctccatcactacttttgtgttacggccccaagccccaaagtgagatgactcaaaagccctctcacatctctcttgatgttgattctagtgatgaggaaagtgataatgaattagatgatgtgcttgagagctttagcaaacccgctatgcaacatttggctaagttaatgagagctttggatagtaaagaacaatcactcgaaaggcaagaagaattgcttattcttgagaagaaaagaaaccttgccttagaggagagcctagctacaaaatgtgctaaaaatgaacaactagctaatgagcttaatttggctaatggttctctagctatccttagggatgtcaatgaaactcttcaagacaaatttgctaatttagacaaaagtcataaagatcttgaagttcaatttgacactctttggaatagcacctctcaaccaaatgtggtttctaatccttccaacccatctactagcaatgattgtgctaggtgttacaatattgatttgaactcttgtgctactaatgttgatgctatgcaagctcttaagaaagagaatgaaaggttgggcacattggtaaaatatggatacatgaagacataccattcaaaagatgccctttataagaccatcaccgctcatcctaacaaggatggacacgggctcgggttttctagtggaagtcctgtgtctaagcgtgtgatggtaaatgggaaagaatgcttgatgtttttgagagaaggtaaagctccacaagcaagtgaggtgacttgtcccttcactggtcagacactcggaagttccgggcaaaatgacgggaagttcctgccctgtaagacaggaagttccgaacattttgtcaggaagttccggacttctgatgagtcgaaggggctgaccggaagttcctggtataatgccaggaagttccggccagaaggtctttactatgatttatatgtaatttccaaaaattcagagggcaaagtggttgcttattttaatgggaattacaatgatgagtaccgcacttgtgtgtgggtgccaaaggctttggtaactaacatcaagggacccaaacttatgacgggagagaggtgtatgtttacaagtcttgatgagcagggtggaagtcgtgaaaatattttctttggagatgatggtaaaggaaaggtaatgtgtctcggtaagattgccatttccaagaatcagtctctatctaatgtcctccttatcaattcaataagctacaatttattatccatgtctcaattgtgtaagttaggatttaattgcttgtttaccgatgtggatgtgaccgtttttaggcgagatgactcttccatagcattcaagggggtgttaaagggtgatctctatctcattgatttcgatgtggatagagtgaatccggaggcatgcttgattgctaaatcctctatgggttggctatggcaccgtaggctagcccatgttggaatgaggaatttggcatcccttctaaaaggggaacacattcattcttggtctatctaatgtttcttttgagaaggattgtgtgtgtagcgcttgccaagccgggaagcaagttgggagtccgcatcctatcaaaaacatcatgactacaacaagaccactcgagcttcttcatatggacttatttgggcccgtggcctacataagcattggaggtaacaagtatggttttgtcattgttgatgatttttcacgcttcacttgggtgtactttctccatgacaaaagcaaagctcaagatgtcttcaagcgtttcgcaaagcaagcccaaaacctctatgacctcactatcaagagggtgcgaagtgacaatggaggagaattcaagaacactcaagtggagaaatttcttgatgaagaaggaatcaagcacgagttctccgccccctatgatcctccccaaaatggcattgttgaaaggaagaaccgaaccctcattgaagccgcaagggcaatgcttgatgagtacaagacttcggatgtcttttgggcggaggccatgagtactacattctaatgtttcatattttcgtgtctttgggagcaaatgctttattttgagtaagatgcctcgctcatctaagttctcacctaaggtggatgagggattcttacttgagcaagttgttgtacatattgtaggtgatgtggatccaagtcaagctataggtactaaggctattggagacatacgactagtcgagacgcaggatgaccaagaagatagggatcaacctccgtcatcaacatccaatagccctacaagtgctgtgtctgctgagccggaagttccggatcctattgaccagaacctccggacatctccaggcccggtagttccgggttctatagtccggaacctccggaccagtggcagtgaagacatgccaacggcgcaagtggatgggatcgatgctgcgagcactttagagcatactgatcaggcttagatccccccagtgcaccatccaaggatacataacactgtccaaagagatcatcccgtcgacaacatacttggtgacataagaaaaggggtaactactcgctctcgtgtcgcatgtttttgtcaacactactcgtttgtctcttctttggaaccaaccagggtggaagatgcgcttggtgatccggattgggtgatggctatgcaagaggagttgaataacttcactcgcaaccaagtatggactttggcggagagacccaagcaaaatgttgtcggcaccaagtggatctttcgcaacaagcaagacgaacatggggtggttgtaaggaacaaagcccagatagttgcgcaaggattcacccaagtcgagggtctcgattttggtgaaaccttcgcacctgtcgctcaccttgagtcaattagaattcttttagcctatgccgctcaccatgatttcaggttattccaaatggatgtcaagagagcctttcttaatggacctatctcagagttggtctatgtggagcaaccaccggggttcgaggatccaaagttgccaaaccatgtgtacaagctccacaaggcgctctacgggctccaacaagcccctagagcttggtatgaatgtctccaagattttcttttaaaaatggttttgaaatggaaaagcgggatattactttcttcattaaaaaatttaagagtgatttattcataggccaaatttatgtcgatgacataatatttggttctactaatgcctctttttgtgaagaatttagtagtatcacgactaaaagtttcgagatgtctatgatgggcgagttgaccttcttcctcgggatacaagtgaagcaagcccaagaggggaccttcatctctcaaactaagtacgtgaaagacatactcaagaagtttgggatggaggataccaaacctatcaagacgcccatgcctactaatggccacctagacctcgacaataatggtaaatgtgtggaccaaaaggtatatcgctccatgataggatctttgctttacttatgtgcatctcgtcccgacatcatgcttagtgtttgcatgtgtgcccgttttcaagcggaacctaaagagtgccatttgattgccgtcaagagaattctaagatatttagttcatactcctaatcttggcttatggtatcctaaggattgtgactttgagcttttgggctattccgattcggattatgccgggtgtaaggttgatagaaaaagcacaaccgggacttgtcaattccttgggcggtcccttgtttcttggtcatacaagaagcaaaattccattgcattatccaccaccgaagccgaatatgtcgccgccggttcttgttgtgcccaactcctttggatgaaacaaaccctacaagattttggctataacttcaccaagatcacactcctatgtgacaatgagagtgccatcaaaatagccaataatcccgttcaacattcaagaaccaagtacatagatatttgccatcactttttgagagatcatgagactaaaagagacatatgccttacccatgtgagaaccgagacccaattagctgacattttcactaagcctttagatgagaaaagattgtgcgagcttaggagtgaactcaatatcttagactctcgtaacattaggtgatgggtggttgtctaattcatagcaaaacatgtatcaataaaatgtaaattaaaaaaaaagagcttttgtgttttgagatcacttcttggtagaagatggtcttgataccaggtataaaacttaaacattccccctcatatccaaaaacccttttgtgaaaatttgcgaaaatttttgtgtgtgtttttattgcgaaaatttggtttttatccccgtcttgtgatgtatattgaccattgttatgtaatgatgattgttggctggtcatatgcatcataagtctttatatgtccataggtttctatttctaatcgttgaattctcgtctattcctttgaacttgggcctgactgccctctgttctgtcaggccggaagttccggtcaccctagtccggaacatccgggggtcgggggtataaatacccagggggagcccgagtctgttatctctctcctcacttcttctcctccgcgattcccaaaccctagccaccgctacagtgctcctctcggcgattttcacttccaaccatggaaatttgattcctctccgtggaatcaaccacattggtggctagaaggttcatcccgcgatcgttttgcaatttcctctcccaaggtagcacttttgatcctcacttttggttcatcatgtttttgccccgatctctaaatatgtgaacctagggagaaaaccttttggatagaattgttcctgctaccttgtagattgccgatctataggattttgtcacatgcactggcctgtttgaatcctctgtgctttagttttgcaggccggaagttccagtgttcttggtccggaacttccggtctctatccagccagccagcaaaccttgattcctccaatttttattttaaccattgcacttcaaccttgttgattcttgttgcagtggtcagtatgcctcatgagaagagacagaagctttcacaggatgttcctgctgactcgagtcccccggttcatggtcctaggaggagattgggcaaagaaaaagttggaaatttttacagtgggagtcaaattcctattcattctaggagggctggtagcattgtcattggtgatgctccccgctctccctctccagttgcatctaagtcagatgatggtggcaatgaggatgagcctagttctgagagcaatcctttgaggctttacaagacaagggttgttgatcctgatcctagacgtccaagtgtgaactatttgaagaatctgctcaagtgtggaatggacagaatggtgagtcctgacacaatgcctgctgactctcaggatgacagattcaggaccgtggtgcaagttgattggtataattctgtgatcatgggaagatctcatccagtggtagagatgaagtggctagactggcagtacatgtccttaaagaacaacttagttttcagtgaggtacgcaaggtgtgtgagcgcaagcacgtggcagatctgttggccttgcagtattcctggaatgaggaagtcattggtcagttatactccaccgctttctttggcaccaccaagaagggcattgaatttgtgaagtggaccattcaggggcagcagtatagggtctctatggcacagtttgctgcagctctggagttagatgatgatgacctgagtcgtcctcatatctttgtagaaaatgctttgtcaccgaccagcactactttcctgtatgagaaggatgctcccaaggattgtttggggactactcgtgggttgcgtccatactatagagtgctttattctatcttcaggtggtcattgctccccaaagtgggagatactacagcacttccagataggcatgcgctcctcctcagtcgcatacgctacaacaagccagatttcagcatcatgaagcttatctggagtgagatatatgagatagtgtgtgaactaaagaggggttgtatctatgctccttatataatgaagatgattgaggcaaaaattgggattagttatttcaaggacaaccagcacaagccttttcgtcctcatgttccctcctcttcagctcctccttctaccagggcgactcgtgcttctacttcagctgctcgttcttcctctgcagctccacagcgctctgagtcttcttcccccataaagaaggctctccgggctatcttttgcatgtgtgctaagacagctaagaaagtgaagaagatagagaggcgtcaaaaggaagattggattgcagcaggcaaggatgtctct

SEQ ID NO: 23564 - DNA, 4636 bp, Oryza sativa
tgcttcattctgcaaaaagcctagaacaaatgacatccacaaccctactcataggcttatgtgacatccccaacccatttaggattaggcctgtgtggctcgagttcgccttgtgttcttgctctgtctgtggtcatgaagagaggatcactcgcctattcaagaagggatcaagctctcaatcaagctatcaccaagacgagtcgggtacacattcatccgtcgatgtttcgatggatgatgcggacattccacccagacttcttagtgactccgatctcgatctcatgggtgagcgagagatgcaagcctaccatatgctcaaggataggtcgtttgctcacacccgagcatacgaccctgaactgcttcgaaaggtatgtatggatcttgatttccgtgaggtttggaatgggtaggatgggagaaatttgttgtggtagataagcctggttctcgtttgcttagtttgcaatttccttgtaccttgctagaggtagccgatggcatttattttcagtttttctgtaaggagtatcatctttcttcgagagaattaagtctacttttgggttttcaccataattgtaaaatcaattttcggaatgcaacttctgcttttgaaaaacacaaattttgggaagatatttcggttgcatcattctgcaaaaagtctagaacaaatgacatccacaaccctagtcataggcttatgtgacatccgggccaattaggattagacctgtgtggcccatgtgagttgtgagcgcatgtttagtaccaccttgctagtttagcaagagtggaaccatcttataagggcttgtccctccaaccatatcactcccgggttaacccttttacaggaagcgaggataaaaatgtaagtggggtggtatgtgtaagtgtgcccgcctgtcggataggctggctacgcggtactagagggagggttgttacaaatggtatcagagccgatcctcgcggttgcgcgtacgggtcaatgtgcgggcgtatggcgcatgtgggctccatatggcgctggcactggacgtatagacgtgcgctaagaggggccgtattcttggacatttgcctatattcccgtgtggctacatgggtaagttgggcgacggggatgtcgagtcctttgagagggtggggggggtatgtgacatcccgaccaaattaggattagacctgtgtggcccatgtgagctgtgtgtgtatgtttagtaccaccttgctaatttagcaagagcaaaacaaacttataagggcttgtccctccaaccatatcactcccggcttaacccttttacacgaagcgatgatggaagtgtaactggagaggtatgtgtaagtgggcccgcccgtccgatgggctggctacgtgattcttgagggacggttgttacagcttatgcataaatggcttggcatgactttattccggttgttacagcttatgcataaatggcttggcatgactttattccttagagctgatcttagacccattcatgaggatgagttgattatcttgttttccatggttagaaaaattaaggttactcctgtgcaatgcatgatttgccagtggttagaaaatatcaagtttactggtcctattgaatgcacttctttaggtactcgcatagccaatggacttggggttatacagggtaatctaattgcctatatttccacaattcgttcttatgttgatgaagcttatttagtgcaaggtcatacagttaaccacgggccagataatacacttgtgtttttctttcttggctatacaaatgaatcccgttacctaacccgaggtatcatttgtacaactgccaagagctaaccatccttttgcagacgatagaggattttcgtgcaggtacttcgcatagggctacccacaacatggcatgggaagaacctgaggaatcaacgtcttcaccaccagtgatgatgtgtgaggccgactgggccccaaccaaggatgctcctggttggacccaagttccataccacgacgccggaagtttggcctggcaaagcgcgattgacagccggtggcaagcgcctcatgacacacactgggggcactctcgttcttctagttccattagcatgcccccattctccaggatgtggagctcaagttcctctcgaggaaacctgggtaagctcactaggaggatgggcacgctggaactgcaagcaggagaaatccagtacacgctcgaaggacacatagcacaagcacataagtggcaggaaaatattgatgcatgactctccaaatttgatgacatgatgcatcaatagtaggccgacttgcaggcctactttcgccatcagggattctatcctcaccctggaccctgagcaacaagcaagcttgggggagaaggcctctctcccgctaaggggacttgtatctttccatttcccattgcatttatatctagaaaacaacataaaaatttgaaaaacataaaagaacaaaaatataggttagattttatcatgctaggtaagactgcttagatctgtatgttgaaatgatgaatattggctctgtttaatatctcttaaggattggttcatagttaagtattgtctcaacttttaagtcgggaaggccaaatattatctgggaacctgagagatgtgagttgcacattgcatgatctgagcctaagttgttgtgagatatgataaggtaaaatagagttactataatcttgttctgaatttgactgcaattccggatgtttttatttttcaaaataaactctaaaagttcctcatttgatataaattcctaccagagccaaatattattgacattgcaaaatcttatattttggttgcttgcacttccattgaactttgtcaacattttgtgacctgtgttagatccttctcatactttttgatcaagatcacacttccacacatatgttaaactttatgatcaagctagcattcatttcatccattttatccacttcatctatttgtcatccaccaaataaatactccatgatatttatgcctcttttttctaaaagctaaataaaaagaggagagtggctaaagagagagagagagaagaaagagagaagaaaagaatttgtaccaatacaaaatatggggcaaggactgtctcaaaatattcttcttaaaagaaagagttaggcaaaaagactctctctcagatgctttcaaaaatggagaaagaggtatgcaccaaggagtaaattcatatatcccttccattttcactaccatattccacacacattttgcacgatcttgatcaaaggtataatgttttgctatctgctttggtctggatttttgacttagtaataaatgtgaatacaagtatgtgtcctttgatccctaccatactccacatatatgactttagaataggaatcaaaatggcaacatcttggtgaggaatatgcacttatacaatttgagtgattgagagaatcatttgaggaacttagtttttatttacaaaatcatttgaaaacctccggaatgaaagttagataaagaatgagtgattagtgctctaccaactgttttgtctcccaaccgctcaagataaggagaagcatgtgtcccacgggtattggccgtatgggtaagccactgtgcctacttacttaacttgactgagaatactcatactttacacctgcacctttgagatatacatcatggtagcaactcctgatcaatacttaagtttgtttttgtgaatcctttactcgggacgagcaaaggttcaagcttgggggggggggcttgttgatggttgttatagacgaatttcgaccgctaatatatccaaaataaaggagaactagccatgcttgcatgcatattttgtttaagaataatcaatctccacttgtacttggaattttttttgtttgcagagaacttacataattggaggagaatcgatggaaattaaccgaaccataaatcgaaatccgttgataggtagacttatgggtggatgggcttacaaatccagtgaaataacaccaaacgggtccaaccaccacagcactatgccctcctggtgtttcgagagaccaccccagattgccgagttccttacgacaatccatcatggccatctgaccggaaatgaatacggaggagtacccatacagggaaaatgtcttaggattatatacggacgtgaaggaatacccgtactgagctgtcaccatcagcagcccacctctggtgactcgttgcatataacctcaaaaaataatgatatctaataatctaagcaccacacttacacttaaatggtgttatcttcgctggcggtccactttacccagccaccagcgaggatcgatcttcactggcggtccttatccccccacccctttgttacattttcacaagcgaatctatggtttggtcgccactgaaaattatattgtgctaccatgaaaaacccttttttgtcgcgattggaaaaatacctttttccaatctctagtgccttgatctccgtcctaggaaaaaccagggtacacttcaacaaacatgatacaaaagccaataatatttacatcattacaaa

SEQ ID NO: 23565 - DNA, 2818 bp, Oryza sativa
cacaccaacttgccttaacccaagacctacgatgagttagatcgaaccgacagccttatatagctgggccccagctcatcccaagtcaacccaagccatccattccaggttttagttgattaaacaagttttaagagggaaaccactaacttgcgtacattgctaggattgctcataaccaagggcatggctattcgaatagattatactctgatcagaggtgtacatctttacccacaggacacgccttcctaacgtgttgccacgcgccacataccactacgttatacggacggatggcatgacatagttcttcactcatcctagccttgaacaaaagtaccgactcaacgctcgcctacggccagggttcctaggataggtaggttatggttaagctccatggcatcaggacatcctttggaagtgaccacccggatgcccgtcatgtgccacaacatctcgactaccgaacacccgcacgtgtagccttcatttgcctcagagatatctatcacccaacttcatccatctctatatgtgtcatcctgttcatgactagactaagctacaaactaagcctaacccattagacatgtggaagtacggtagtgctttgcaatagaggctcaagattaattcttatatttggcggggtgctaacttcccacaactggcatgcactcaaaccccactagaaaataggttttaggggttttgaaagagaaagagagtgccatgttcaggccaattaatgttatggggattaatatcaccttggaaatgtggtgaggaaatctcaagttaaatagggaactattagagagcccctgttgaccggttgaggtgatggtaggattgctacatgcgcgcgcatgcgcgcgcagaggcgatacaaagcgaggcaggcggttgctgctactcctctctctctctctattttgtaacggacgggaattgaatcgacgttaattcggctaatcaattacgtaacggacgagaattaaatcgatgttaattcggctaatcaattttgtatgaatgagtgaatgaattccaacggattgatttcgctattaatttacagagttgaatccgattagtttcgatttaattactcctgaacgagtaagcactatataatccgccacacccgttcatcctctcacaccatgcttcctcgttgtttcctctccgttttgttcttgcgctagccactgctttccccggtcctgttcacctgcgcgcacaggtaaacgggacgagcaggcctccagaagtccgtcctcttgtgtacctacacgagtaggcaggcgatcaagtttttggggagcgctctcaggtgcgacggctctgtgttatctacgtcaggctctgcttcccctacgtcaacatctctgctgctgttgctagaggtggcttaggcgcaggcagtggtggctctactggaggagactgatccgggaacgtcaacaccaacggaggcaatactgcctcatcatctagcggaggaccattctctaggtatacttccactctcctattgtcactaggggtgtgtttggttgcctgcatggtacctggctcgcatgcatgcgtggatgcagtggatggtcgtttggttgcctgcacgtagctcccatcctggctgagtggatgcaaaaatgccccgttagccaggctgagcaggaacgctcgatttgagcttcgctgcccagccaggcccgcgcgatgcattgcactgcacccatacatgcagcattgcacccacgcatgcaagagcaggcattggagttaccaccctgcccctctccccctcttcattctacccaacaagcaacgagactatggacatggcgaagaggcagcgaacggctcgaaggcgacgaagcttgacggggggcacaacgacgagcacaacagctgatccgtcctgctgctgcatccctcctcctcttcatgccgtcccccaaccttcaatcgccgggcaccgtcgtctcctatctttaatcactggcctccagatctgatggagcggagcggcgagcggcgggcgaatgggagcgtggggagatgggtggagtggtgagcaacagggggaggggagcgacgggaatatgggcgcatcggtagcaggcagtggaggggagcgacaggcagatgtccgcatcgacagcggcgagcggaagggagttgctgatggcgacgaggcaacgccgatcccctttccctttttttctctcgttttccgctttcttttttctttcggtttttctctcatataactaaacgctgtatgtactactaatgatttttatatagacaagatagtgattttccagatctaatattatataaaagattatctaattttttaaataaaaaactaatataattatatatatatatatatatatatatatatatatatatatatatatatatatatatatggtgtataggtaatctcacccaactaaatgaataggtaaccgcactcgagtcaatacaactaaccaaacacaatctcttccaaaccgtatctctcatgcgagtaactaaatacaatctcatgtcaacctggctagactaatgtaaacaaccaaacaactgcatgtgcatgctcagagataggtcaaattcagcctatatgagagagatgacccttgcttaggggatgcgagcaaccaaacacacccatatatgttaatggttaatgctcatcgcaatgacagtattgtgctatcatgtgaatgttgatgattattttataaaaagcacactactacacaaccgatttttgcgtgcggctaatatg

SEQ ID NO: 23566 - DNA, 764 bp, Oryza sativa
aacaagattcttagcaatattgatagcactagtattatcagaaaagagaggtactttctcaaaagtaaaaccataacctttcaaagtagataaaagccaaagaatctgtgaacaacaactagcagcagcaagatattcagattcagtagttgattgagcaacactagattgtttcctagaagaccatgcaatcaatgatgtaccaagaaaatgacatgttccactagtatttttcctatcaattctacaaccaccaaaatcagcatcggaatatccacttaagcatatagaagatgaagtagaataccaaaatccaaactcaagtgtatgattcaaatacctcattattcgcttgaccgcttgacgatgtgaagcacgaggagaagcttgaaagcgtgtacacaaacacacagcaaattgtatgtctggcctagaagcagttagatacaacaaagatccaatcatacttctatactccttttgatcaacagcttcaccatcttcatcaggatccaacacagctgtagaaccaattggtgttgaaattggcttgcaattatccatcttgaaccgtctcaaaagatcctttgtgtacttcgtttgatgcacaaatgtaccttaaggtgtttgcttaattagcaatcccaaaaagtacgataactcacccatcatgctcatctcaaattccctgcgcatagtctcagcaaactccacaaccaaaccgtgagtcgaacaaccaaagatgatatcatccacataaatct

SEQ ID NO: 23567 - DNA, 7830 bp, Oryza sativa
tcctgcagccccatctattataagcatctagctgaaccaaaccaatatataaggttctagctaatcaaattataacccataggaaaataaagtcatctttggccctaattaaatgggaaaggctcaccacccggtgacattcgaaaataaatacacagttgaaataaatagagaatttaaatataggatcaacatgctcaaaggaattgtgtttgggatctgtgtgacttgccttgcaataatcggtcttcaattaatcttctggaatacttccgatgtactcgcgaaccttcgcaacgacggaaacgacaagctaacacgcaaaacgaagaaaaagactaataaaaaccaaataaacagtacatataaagtaaacaaacatgtagatcatgattttagatgaatttagagacttgaacggcctcattcaatatcatataaattaattatgaattttacaagatttaattccaattaatcctattaaagaaaagactattcaaaattaattaaaccgtttacaaatgatttataactgagataaagattaaaacaacctccagaaaagattagattatatttggtagatgacatatgataaaaagaactaatatgccattgaagagagggaacggatttatatggctgagattaatcttgaccgagtcgaccaagatcggattagattaatctggcaagcaagcctcaagagataccgactcaacgagtcaattctacgtgacacgggatcacccaaatgatcaaccgaaaccggcgaacggaaccggcggctctgaacggctctaaactaaaggacgactcaacatggacgaacgaacgaagcacggggaacacctctttcgaacgaacgagcgaacgacttaacaacgactgcgactaaaccggtgagctagacacgattcacggtaaagcccgggtaccgcaaacgataggccggtaggaatttagggatgcacctacggctagacaacttgactaccgagcaacggttaaagcggcagctaggttaaagcggcacacagctgcgacacggcggcactagggcgacttggcttggctaggcggcggcgactcggcggaggcacgcggctagggttagggcaacggcacagcgacgacgacacacaacgacgacagagcacgaaagcaaggcgcagcagctaagcgtggcacggcggcggctactcgacgacacaaacgagagattaaaaactaaaccgagggaacacagatagacgtctcaccgaaccaaagcgatcggagaggaagggtcgacgatgacggtccggcgacaacacacggagacgatgacgacactagggccaaacaagattagattagattagatgggattaagaccctagggataaactacaccagtgaacgacataggagcggcggttgccggcgaaccatggcccaataatgcaaacggagggcaccgggaggtagagaaggcgacggcgattcttaccaacacttacgcgacgatggacagcgacggaagatggccggcgatgagcttcgaagggcggcgaggtactgtccacggcggcgatgattttccggcgacaacacatgaagatgatgacgacactagggccaaattagattagattggattaagaccctatggataaactacaccgatgaacgacaaaggagagaggaaagctcactgaggggcagcgtgacgatggatgatgacggcagacggccggcagcgaggtagaggcggcgacggggacgggtcagcgacggcagcgacgtttctgcaatctttggcaaagaaaaaccggtggccgggcttcaccttgctcctgcgaacccaatggagtcgacggcgaccgaaagaggcggctaaggcggctgctagctgcggctggaggcgcagcaaaggccgaaaccttctggttcgcgtcggcaagcggcttccggcgggatttggcacaaaggaaccaatggccggggtggagctcgactttgcggagccgagggaggtggtcgcgctgaccggcgacggtcggggcgatggcgcacggcggctggagcggcggccggaggtggagagagagggagctcgcggggagagtgtttccggcgacggtggagatagggagaggtggcggccgaaagaggagaaggagcgggctctatatatagccatgggagcccagggatcgagcccacgtcgacgggaaaaactcgggaaagtttaggatcttcgccggaaaaaggaaagattgatccgcgaaattggaaaggatttccatagaaacttgtgggatttcttggggaaaaggaagaggagattgagaggattccattcccacaactaatttggaaaaaggggcaacgaggtggccggattagtgggaggaggcggcacggctgcacaggctcgggacggctcgggctctgtctggaggttgaagatagagtactgtagcgtcagggaggtcaaacagacttctctgcgggctgagaggagaggagggaatgggctgaattcggcccaagactaggaaggaagattttattgcttttccaaataaattaaccaataagatgatctttcaattgttaaaaatacttccaatgctcaaataattccaagaaaaatcttgaacatacttggacactctaagtatttaacaaaattgaaaccagctcatttaatgattaatttaatatgtgaataattactgaaatgttctttgcattattaacattaggaattgagctctgaaaaaattcgagaaaattccagagagtataattaatcatggagaatttaataaaaattaaatccaaccattctttatatttagaaaattttatttcccacatttaacttcacttgtaaattaatgtacttttaatataaattctaataataatttattaattaatttataaatcctgaaacggaaattcaggccgtgacaaaactccacccgagaaaagctagattacatggtacaagcgtgtattggctagcaagcaaactcattgggacgagattggaatcggcgaagcacttgccctcaccacagcgaattcagccaaagatgaacacttaatggccgctgccacatacttctgtctaataccatcaatgcctttttgttcaatcaagggccgatgacaccaaccctaatagatatcaccatgattactggtctggacgtgtcctcgtcagctaatcccatgaatctgaacaccaagaatcagtacgacttcaggaccaagagtataggtggttggtctagttatgtggcggcatatatgggccagggatccattactcctcgagaacatgtggccttcttgctcatgtgactagaaaagttccttttctgtggatccagttgtggtcctgcaaccaactggcagtttgcagccgaggctctggaatcaaaaagagaatttcctttaggcaagatcctcctcggctacttataccaaatgctgaacaatgcatcggccaagatagatgtcggctcagcggttggagcaggtggaccatggtagctgctaaaatcttggctcaacctgatggtcatgaaagtcgtcaatcggctatctatgacagaagctgtattccctaggctagagccgattgtagaagatgatgaagaagagcgcacccatcgtagatgcatgtcatatggagaatatgcatccacaccagccgatgctggagcaaaattattggctgaattgctcaaagattggttctgtagtttttatgaggactttcaaaacgatgctcgagtttggtttccttatgaagattcaatgcatcttgacctcccatcagacttcagatttgaagatatcaaccatgaaaaatttcaaaaatctagagaagtcttctcagctgcaattagcccatgcattcttcctatcggcatacatcaagggaggaatattcaggtttcttatgaattttatcacccgatgagctctgccagacaacttgggatgggtcaactaccaatcggcttgttctttgctgataaaatccaatgccgagaggaaatttcatcaaccttgatgatggatcagctgctcaatctccaaggacctcctctgggcagcattgaaaatatagagctggcaagatttaggagcagaaactttgacagatgatggggtgaatggaagctgcatctgttccaccaaccggcctcaatgtatatgacagatctctttcttgatgttatacctgaggtaaaccttaacctcattaatttcatttgaataattgtcaaccgattcataacttgactaatcttttcttctattttgcagacaacagaatcttcccctccacaccaaagcaatagcggcaaagatatcaaatatgccccaagtctaattccaaatggaggtggaccatctccccctgtcatcggctatcatgcccccaagacttcaactcttctccaagggctcattagagaactagccgatgctggcaaaaagagaaaaaccagagcatcatttgtagacacatcgactctggctccaaagaagaaaaccaagtcaaagaagaccaagtcaactgatgatctgtctgccctagatccatccattgagcaagctttggatgaacgagagatcaaagaggatgttgatgaagctgcagctgaggtaagtgatacagaaagaactccatcggcttcacctaaacaaattcctctgactccctctgctccagctcacttctctagggtaaatatctttccttgattcccttttataactattttatcctcaaccgattatttactaatcttgtctttgcagaaaaaaagaattgccgtgaagaagaaatcggcaacaacaactctcaaaccggctccaccagtaagatgttcttaatttctcattagccgatcatagccaatcttatcttaacatttatctctttttgcagcctcctgctcctccttcttcccctgtacaacaatcaccaagtaaccaaactccatcggctacagggagccattatgttgaagaagaagaacaaccagctgcccctgctatccaagtaagtttccctttgatacaagaacttagattggctatgtctatttagctcctaactctcttgaaattgttcttgtaggttttagccgatctattctcttttgacatcaaggactactttgatgaggtagaagaagaaaccacaagcaaggctctagcccccttggatgacatatcaagaaaacacttgaagatatatcccttcgggtagagtcttcattagacaatctggtagccgactgtggttcaattcgggcacgatatccagaaatccaagccctgatcccagacgatttggcaaacaccattactctagcagtattccttgagcaacaccaatttgagctggaaaaggctaagcaacatatagacgatcggcgagagcggatgaatatcgaagtcactattcaatccaatcggcagctcatgcatgaagagaaagccaagttagatcaactctctgttgggccgattcagttgaatatagattggcttgaagctcgcaaaattaatctaatagctcaacttgaggaatgcaacgctgaactggatcatgaaaaacaaaagctagccaatcttccaagtgccgttgaagaacagaagtccagactgagatcggctatcaagaatgtggctgacacgactaaatctctcaagatcatccctggaaccaacgcccaagacatccaagccatcgaagaaatagatcaaatcaggcaacgggctttgtcggctatccagcgctatctgtctcaatgacattttgtgtaatagactctaggaatttttgtaatcggctaagaaactctggctcttcatctaactcatcttgataatctttatgccgattcaatataactccataattttgctcaaaaatttgcaattttgcatatatgtgaccccctaattttacaatgtcaaaagcattgataaaattataatttgaactaagggcgatataacaatatcggccgtacatcggcaaaccaaaaccgattacaataaaaaaaacggagggcgatataacaatatcggccatctcaaggcgatgtgaatacattggctatcatgttttggcaacaccagccgatcatgcattaacccaaacacttgggtaatatttcttcaagtatttgtcatttagcgctcgtccatagacttctccatcgagtccttgcaacatgtaagctccctttgacacaaccttatagatttgaaatggtccttcccaattcggtgaccacttgccgaatttgttatcccgagtcccaatcggcaaaatcaattttcatacaagttctccttccgaaaaagacttgagtaccactttcttgttataatgtcgagcaactcgctccttatccttggtaaccttggcaagggttcttaatcttggctgaaccaagtcttctctttcatcggccatgagattataatattcatcagctgtcaaatcattttgcaactccgttcttcttgagccgattctaacttcccatggtaaaacggcctcatctccgtagacaagcttataaggagggacttggatcgatccatgacaagccatccgataagaccacaacgcttcggccaatcgagtatgccactgccgaggataatcagaaatctttctcttaatcaatttgatcaaactcttgttagatgcgtcggcttgcccattagcttgtgcataatatggtgaagaattcaacaatttgatacccatgctatcggcaaactgaacaaactcatcggacatgaagattgaaccttgatcggttgtaatagtttgaggaataccaaatcgatagattatatgctcttgaacaaattgtatagcatccccagaatcaaccttcttcaaagcaatcgactctacccacttggtaaaataatcgattgccaccaatataaacttatgccctttactcgatggtggattaatcataccgatcatatcaattccccaacctctaaatggccatggtttaatgataggattcatagctgatgccggtgccctctgaattgctccaaatttttgacaatcttgacatcccttataatatttaaaacaatcctccagcattgtcagccaaaaataccctgcacgtcgaagcaatcacttcatcttatgagccgattgatgagtgccacaaatgccttcatgaagctcaccgactgcaaccttagcttgatcggcactcaaacacttaagtaacaccccatcaatcgtccgataatagagttcatcatccaataaagtatacttcaacgctctatatcgcgatttccgagaagccgattgagatggattctgtaaatattaatgtacatcatatctccaatcatcggctgttaatgcagcaacctcaattttgacatctttgatcatcggcttatatcccgaagtcccttgggccaaatcattaacatcaatattctgctctcgagatacatgcttcaaagtcaccagccgaaactctttcatcaattctcggcacttctcattataaaccatcaatgtatcatttttgcagttatactcccctgccaattgactgatcactagcaaagaatctcccataatctcaatagcatcggcttcaacttccttgagtaactgcaaccctttgagaactacctcatactcagtctgattgttagttgcataaggtttaatagtataagcaaactcaaaacttgccccccgagcagaaattataaccaagccgacaccacaaccat

SEQ ID NO: 23568 - DNA, 1419 bp, Oryza sativa
attttcttgattgcattaacactcctttgagtcacctcaatccctctctcatgaacatgaaatcccaaaaactggccagcaaatacaccgaaagcacactttgtcgggttcatcttcaaaccatatttcctagttctctcaaaaaccttcctcaaatcggctatgtggtcctctatctctttagacttataaccacatcatcaatgtagacttcaaccaaccagccgattagatcatgatatatataattcatggttctttgatacgtagctccagcacttttcaagccaaaagtcattaaaacccactcaaacaagccgattgcaccaggacaccaaaaagccgttttatggatatcctcttcggccataaaaatctgattgtatcctgcatttccatccataaaactcaatatcttgtgccctgaagcagcatcaaccaactgatcggctactggcattggatacttatcttttagagtagctttgtttaaatccctgacgtcaatgcacaccctaaccttgccgtttttcttgataacaggaactatactagaaactcactcggcatatcagcaaggacgaataaaaccaacatcatataaacgtttaatctcagccttgacaggttcgagcatatcggctttgcatcttctcggaggctgttgatgtggtctaactcctggtttgataggtagccgatgttcaacaatcgatcggctgagtcctggcatctcataatactcccgaaaaaaccaatctctgaatttctttaagagctctatcaacttggttctaaattctggagaaaagttcttactgataaatgtcggccttggtcgatcgcctggacctatatcaattccttccaaatcatcggccgacatgaaaccctgtctttgcttgtcatcgagatcatctactgtgtccttagtgcagacgtttgaaccctccacgacgccctcaaaataatagcttgggctctccatcttcaattggctgtatatcacaatcggacacttttagaaaatctccatcccaaacttttctagataagaaatcgagaccatccatctcccaaagagctaaattggcattggcaacgttgactgacctgtcggctggcacgatttcaatcttgtcgccttgccactgaatcaagcattgatgcatggttgaaggaatacaacaattggcatgaatccaatcccttccgagcaacaagctgtaggaacccttcccatcaatgacaaaaaatgttgtagggatagtcttgctgccgactgtcagctctacattcaaaactcctttggttttgatggattgccaccaaaatctttgagcaccatgtttgtcttgatgagatcctcagcatttttgcctagcttcctaaatgtagcataaggcatcaaatttactg

SEQ ID NO: 23569 - DNA, 5480 bp, Oryza sativa
gttgagcgggagcgtggggagcgggagcgcggaggcgatctcggagtggacggtgttgggcaggcggcaggcgcgctcgaagccggccctccggcgtccgcctcggccggggtccatggtggggctccggcgagcggagcggaggggaggggaggtgaaaccctagattcgaggaggggaggggtgggggatcgaattcgaattggaattcgaattgcggcggaagggcggatttgagattagggttgcgtggcctagataggcaagcatttaccactcgcctcgcctcttctagcctagcctagctgctacagtgattccagttcgcgcccgcctcccgccggcgaatcgtgccgcggaaggaggacgacaacgacgaggagacttttttgtttttttcgtgtgtaccctttgtttcgtttttaggagagagaatgaagatgttgggctactttttgaaaggaacaagtctattttatctccctcctccatctcttgcctgtgtaaatcacctttcaatcgtaaaaccgagtataatacattcctcatatttaaaaaccggtgtaaatcaacctattcggtggtttcaaaaacggtttcaacctatgtgccgctcataagacccacatgtcaatgataaatatataaaaaaaattaatctcacacggccacatgttcagtcatcctaatcttcatatgtcagccaccctaatctccttttctttttcctcgccctctttcctcgttctctttaatatctcttccatagtctcttgaatactttcaaacccaaatatgaggttgtggagggctgaaaaaaaattaaaactgatgaagaatttttttatacacataattatgtatagccctgactatgtaattagttgaatataactaaataaatactcagagagtagataaatcaaccagtcgagtggttttattaaacaattattggcaaacatggtgtcaaatatgaattaataatactcaaaatggatttaccaactccctattaacaaccaagaagaaatatcatgaacatcataaagccaaagatattggtcttaaaaagttgcacacatatgtggtttttgttaaataaaaacaatgacgcagcagttggctgattgcatttgtttaacatacgctaaacagtgcttatctttaatgtaaaaaaagttaaagtgtaaactataaagctcactgttcaccacctatttaaatcacattgtaccaactcttctaaataaaaggttgtgtaacagcaagaaaagagaattttcaaggtattggatactttccacgtgcatactgcaaagacaaatatacttgagtccctaaaaacccgtggaaggtcagtaaatgtttaatggacttcagcccaaaaaaaagcttaaagattcctaaaaaacaacacgatactgtgtatcgtcttgtccaccgcttcatcttcacaaaaattcctcttcgcgctcctattcacttgccatcgccgccaaagttagggctaagcttgtgtaggtatttcgctgatctttttttaagtactgcacttgactataatatgggtgtagttagaagttactagtaatgacggcgactccctcgctctctcatcgccgcctatctattttcctccggtggctagtgagggtagaaggggaaaaaccgggggagagagcggtttccacatgctcctcccctagccacagccgacccaacgcgactcctcgctcggtcccccagccgaggagctcgtagagccgcgtcccttgcaagaagacgcgcgcctctactgggggacggcttgggcggaaaagcgcccaagcgaacgggagctggacgccgtgagccaaagccactcgctgagctacgcattgtagatggcctaaaagagctggccccagtacaatgtcaacacttttttgtcaagattaaaggctgatgcaccatataagccaataaacatgcagaagaagcattttattcacccggtggtagtgtggcactgatgaaataataatttccgtaactaaccgaggagctcaacaatgaacaaatcctctctggaacacaaaagcctcataacaccaaaggctgttgtttaagttacaagtgttgggctacaaaattgatgatgctgtgtaagaacctgtgttctcacttctcagtctcagttatcagtcttttagtgtggttttggtacaaagccatccaccgcaaagtttcgtgtagctgctggtaatgccagtcgcatgccatcaagttctggctttgctatcacttgacagccaagacgagacctgaatacagttcacaaaattgatgccagattagaaaggacacgcatttaaattgaacaaaaactctagtgcatacaaagctaccatggtatttatacaattacaacttaccagcatgagaatatctcacttggctattttaacatgttggttgataagttactttgtctttaatttccattatgtcatgcatatagcttaagtcacggatagcggcaattagtttgtaaaggttgcacacagatacaggtggagacatatcaggatgattaaggaagcaactgcatatcgtatcctctcatatcaaatgcccccagtcctttgttttcccctccctccctcactatggccatcaactacttaaactattctaacaataccatgcatactcattggttgatacccaacattcttgtttgcacgataatcagacagcaagcaccacggaaccatgaaactggataagccaaattaataaaaccttcaagatatcttcacttacgtttctgtaagtccaaatgcaaggtcaagcatatcattttcttcatctgttggatcttctagcttattataataatttacatcctggacaaaattgaaatggctagttagtggcacttcaatctctacaatagcatgaaaaataataaaaaaaggaatggttatatagagcataccataactatgacatgacaggttgaacacgcaagtgaaccttcacatgctcctgcagtacccaaaatactagaccaagttactaactacaattaaaaatcagtcaatagtcaatacatgaaacatgtcaaataacatcaagtaatcaataatggacgccatgtctattgggtaaacataatttgctttttatagctgttcttatcagcaaaagaagttaagaattgaaagcatagtacagttgcaatgataaatcagtaaccttcaagttcgatgtcattttcatgagcagcttctaagatggacattccaacagggacactgattgtctgctctgtgccatccttgttcacaaatgttacagagatcctgtgcagcacaaagaaatttgctcattagaaaaattaatcggttgttttggacagctatttcctaggagggaaaaactgaaggagaagcccctttaaagacaacaaagacattgaagaaactcacattacaacgacatgggatacatcactaccttgtccaatacaaatattgctaggtattcaaatttcatgctataccagaaaaaggaaaagaaaggggagaggaaatatacttacttctccttgctctgactgccatcgtcacgatcactactagttgttgctgtggagaataagatgttcttctgaaaagttacagaccagtgctcattacatacaaggacatttgcaaatggtaaatcatctcttctggtagtacagaacataatcccaagataaagatggtggtggagaatgtgcagatagataaaatcttttgtctctcagtttcagaatgcacaattcatattggtcatttcagaaaatccatgtcatatctagaaaacatttatgattgctctttttgtagggattgtcagtaacagctatacaaatttcagaatgcaaacatcataaagggtatataagatacagttgacttggccaagttaagctctcggtgaaaacacatacaaagggtatgcaaaattttcgtccaaactcaccactaggcatcacaacaacaagatacagattggactaaccgttgggacaaaacgtcggctgagttgacctcgataatagctggttgtactgcttgccaaattccctactgcacaagagggagaacaataaaaagccaatggtatagcaccaagatttactcaacaatagtggctcagcctaaaccggccatagaatggatagtggaagcatgcatatcgttcatacaaatcgatcgctctctcctctttaatcattcgtgataatgtatagattcgtcatggtttggaagtatttctcagctgcttccagaggattaaccaataaaaaacaagagagacacgaaaagggtgcgtaccagctctgttctcgcgcagaagccgcgccccgagctgcgagatcctggacaacatcgccgcagccgacttcactacccaacacccccactcccgaaccctaacagcaacaatccaagagcgtacacgaatcagcgagaaccgcgtgggggccaacaaagcaaccgaacatccggggggagcagaaggcggagagagaggagacgaaccttccggtggccggtggccggcgccgccgctttcctcccttccacgacggcgggggaagaggagaaggagaagtcgggtgtcgccgccgtggcagaggttaaccgtggagtttggaagcaactcgtgggccgtgattttgtgggccttgaggcccattagtgcagagattagatgggcccattgaggcccatcaaagccacacggtataagagcctcaggagaaaccctcccctaaatttctctccccctcctcctccgccgccacgcagagggggacgccgccgccctccgccgccgcctcacgacgtaggtaacgtcgcttctctcccctccctctacctgctcatgctcgtgtgtatgcttagttgattctgatgagttacgggttaatcgggtacatggtcgttttcagttgattctgtcattagttagtcacgaaatatcgtttttgttctggggacatcttttttctgttctgcggtctgttccttgtgttgattgccatccattcaagcgggtaaatcagatttgatggtttggtggataaaaggtagtatgtgattgttcagcacggtttagcagcgggctagctgctgctaagatttaacatcgatatggaagtttgagaatcggtggactctaatacttgtgcgtgcttccgttgctgccaagccatattgcttattgtctgaatgctcgctcttaaccatttcatgtgctcatatgagcaatctgatttttgtatcaaatatgttatccctccttttttttttacaatagcagatagtgtttatgtgtgttaattgtgaggtcaatttttttttacaatagcagatagtgtttacgtgtgttaattgtgagatcaacttgtcattacatgtatgtacatgtcactggtt

SEQ ID NO: 23570 - DNA, 16545 bp, Oryza sativa
gtctggttacattgggtaactggtcccttgaagtgttttacggcctttatccgccgcatgtgctaataaacacttttaagttgcacaaataaactgtgggttccattttgtcttatatttttagatttactggatattgcttgggaatgtaagttgcagagtgttgtagtaaatgatataatgggtttgttgttctgtgcaatttactctactgtttccaaaggaaggggttcatatacatgttcccaattatcttatttctaaattctcggtattggatcctgttatcctgtattgatttcatatgcactgttgtttgtatgacagaaatagtcatctcagctagtgaaaatggtgcaatacaatttcaagcgtatcactgttgttcctcctgggaaggacttcattgacatcatcttgtcccgcacccagaggcaaacaccaactgttgtccacaaggatatgctatctcccgcattcgtcagttttatatgcgaaaggttaagtatacccagtcaaacttctatgagaagctgtccactgtcatcgatgacttcccaaggttggatggcatccatcctttctaaggtgatttttttcatggttcggtcaacaaagatcactacaaacttgccttgggccaaatcaacacagccagaaatatcattgcaaagatagctaaggactatttgaggctgctcaaatatggagactcgctgtaccggtgcaagtgtctcaaggtggctgcattaggtcgtatgtgtactgtcattaagcggatcagtcctagtttggcatacctggagcagatcaggcagcacatggcgaggcttccatctatagacccaaacacccgtactttattgatttgtggctatccaaatgttgggaagagctctttcatgaacaagatcacaagagcagatgtggatgtccaaccctatgctttcacaacaaagtccctgtttgttggtcatgctgattacaagtatttgcggtaccaagtgattgacactccagggatccttgatcggccttttgaggacaggaacatcatagaaatgtgcagtatcactgctcttgcccacttgagggctgctgtgctattcttcctggacatctctgggtcttgtgggtacagtattgctcagcaggctgcactcttccacagtatcaagtccttgttcatgaacaagcctctagtcattgtgtgcaacaagacagatttgcagcctcttgaaaatctgtctgaggaggacatgaagctggtaatggagatgaaggcagaggctatgaagaccataggccatggtggagaagctaatgaagagggtgttttgttgactatgagtactttgactgaaaatggtgtgatggctgtcaaaaatgctgcatgtgagaggcttcttgatcagagggtggagatcaagatgaaatcaaagaagatcaatgactgcctaaatagatttcatgttgcatgccaaagcctcgtgataacaaggagaggcctccttgcatccctcaggctgttctggatgctcgagcaagtgctgatgctgcaaaggaaaagaagaagctggaaaggaaactggagaaggacctagagaatgagaatggaggtgctggggtctattctgcgagtctcaagaagcattacttattggccgatgatgaatggaaggaagacattctgcctgagatattggatgggcataatgttgctgattttctggatccagatatattgcagaggtgtgaagagttggagagagaggagggtcttcgcctcgaagaggaagctgcacaggaagctttccagattgatggccatgaactaactgaagagcagcgtgaaatcttgggtcagattagaaagaagaaggcattgctcatccaggagcatagaatgaagaagagaactgcagaaagtcgtcctattgttcctagaaagtttgacaaagacaggacattcacaactgatagaatgggtcgccaactttcatccatgggttttgatcctagtgcagctatggaccgagcccgcagccggtctagaggtcgcaagcgtgagaggtcactgagcagagctgccagtgatggtgatgatatggatatagatggccagcagtccagcaagaaattgcgcgcgttgtcgaggtccaggtctaggtcgaaatcaagaccacctgaggaggttgttccaggagaaggattcaaggactctgctcagaagaagaaggcaattaagaaagctaaggattctgtgaggaacaggaacaaggaggctcgtcgcggagaggcggaccgtgtcattccaactttgaaaccaaagcatctgttctctggaaaaagttctataggcaagacgagcaggcgataagtgattcagcacagctgctggtcatcactggtttcaggtaggtggatgtggagcactacttataaacacataatttgtgacatgaactcaattatttctgggcttataactcatgttctacttgctcattttgtaggaagtgcagcatcattgcagcatggtgtgggaaattaggcgaaggaaggcctgattatccaatctgctggacttgttgtgctctgtttattcatactgtctgatggattgctgtgtatcccgtctcatcctctgccgagacataattttgttagcttatgttgtagctttacgctacattaatatggtttcgctagtattagttcgttacatggtactatgaaatactactcctgtaatggtgactttgttattatacttgaattccagtcctattcgttataattaattctttataataagatatcacatgattatgttttgacgaaaggaaaatatgtttcaaatcgttaaaacacgtttcatatgtgataacgatatgttttaatatatgttctcactgtatttcacaaattttttaaatgtttcatcatgtactactagggcccgttcgaatccaattaaaagggtggatggaattttgaattaaagtggcacgtttttcaaactgctaaacggtgtgttttgtgcgaaaactttctatatgaaagttgttctaaaatatcagattaatctattttttaagtttgtaataactacgtgaaacacttaatctttatcttcatcttcaggagattcaaacaccacctagaacatttgatcgcctgatattattttagaaaaatcgagcactgatattattttagaaaatcggacgctcgatttgtagagggttcacagcaatagatgtaatgttctgaaccaaattggataactgtatatagcccgttatcattcgcagaaataactaggactgcagatgagaaaagaaaaacaattactacttacaacgccgaccgaggtgaataggactgatgaatattactccctccattccaaaatactataaggcataatcacccataacccaaaaaccaagaaaataattattatcatcttgtagtttggatcatcctaataaatataatgtatgcatccaataaaattagagaacatgagagtgatgtatttaaaaaagtaataatttaatggagaagaggtcatatttaatagcctatatgcatgtatgccttatattatggaacatctaacaaaatgattgtaatggagggagtaataagaaagaaacatctgatccaagtccaagtgcaagtacagtatttggagcccatgatcgggcgggcatatacaaagaaagcccaaaactaccttagtttagctgctgggccgagtgctattgggccggacgaacacgcagacgcaacggagatatgtatctggagtcgaagcgaggccaacacgtagtggcgacggtgggaagctatggtggcgtggacgctacgacctgcggcggcgggcagggccatccggcgagccgcgtaccactccgacggcgcccctcctccccgcaagctccggggcccccgcttcagctctttcaataggaacaaccatgaggtgtgtgtgtgtgtatccatctcccttgataataacctagttcgttcttaggtttcgatctagagtttcccctcccaaattgaatagaaatatatccttttttttaagcctactgcctctgtgctaatacctgtttcatcatcgcgtttggttgttccccaactaggttaaaaaaagatggatttatttttgcttttcttatttcgaaattatgcccgtaatcccatatgttgagtatttaataaactactaaagatatatatgctcccgcgaaaaacacacacacaaattcttcaactaactagattcaggtttttcagattatgctgcctgtaccagtacgactgttatctgtttattgtgaggggaggagatggtattattccgtaatatgacagatcattctgcagttgtagatgatgcattattatgttcactaatgctcttgtgcttaaccatctcaacactttgctctagaattttgactgttagcactgttaaatttcattatgccgcataagagtgcaatccccctaagatgacaggtcattgtgcacacttgtttgtattgattattgaatgagttcgtatacgtatcattgcgtttcataatttcatagggttttagctgttatgatgttgctcatttgctgtagcatcttgacactacgcactagaattactcttgctgttaccatcgattaattaaagcttgtcttttgttcaagccttcatctctaatgttttagttttataacttcttttttagttttcccttccttttttattttaatttatttgtttggcaaaaccctccatgctctgaaaataatcctgtgttgttcagtattactcttgtctcccctgctagcttgaggggaaagaaagagagtgacatttttctgttcttacaaaactgtacctgttctcccgtatacttggggtttaactactctcaattcccaaacatttggttgaagcaccaatgccaaacctcactaaaagttatattcagtttttttttatcatgctgtactgttaaattatatgccaattgaagtgcactcctcttgatgaaaagtaggcacagccaagaaaaatggtgcttgctttccttcaactatgtcccttagagttcacattccccaggatgatataacatggatgagtttgtacaattaagtttgtttgggtcatgttccctaagtttgggttgcagaactcgtagggaatcgagtaatgcttctttgcttatgtagcatttgaatatcatactttataattttcaattctgaacagtgtgcttttagctgattaaaagcttggctcttgtaccagccttcacatccaatgttttttattcatctaacttcaactccttaccatagagattgtattaagaaccattaacaccagaaagaaaggcttggttgggcacagtgcacttgtgtaaaaggatatagattgccatcattcatattttgttttaattgaacagtgacatagagcgtgtggaattttaaggagaaactgaagttaaatatctgagtctttttgtacaagtctgatagtggatgtggattacaacagtacgcatgttgatatgcagatcgatgcgttgcttgaggaagtcaagaatacaccggttaacatgatcaccgatgacctaatgatccgaaccgtgcggcagtatgtaattctgtgaattgcagcttgtgtttttttggttctctatctggctgaccatcctatttactactgctcttccttgtctgcatgtgtagttcttttctggctcgtcaggagattctgtatcaaaatgttctgcgatcatgggtggttgtggcagcggtactcacagggtatagctgggggtacaacaaatttgctgaaagttctactgtcggatctgaaccaccaaaagaacatgaggggaagtagaagacttgacgattgtttttgctctttacggaagactgagtgtttgggataaaatgcagtgaattgtgcctcagaaactcgcttgtaaattggtcaatttctgttaactgactatcctgtaagacagggcttgggcgaccaatcttgctccgccttttacaatctccagctggtttggggtgtttcatgctctagataggctgctgctggtcgataatcaacggatgctctttctttttatagttaactcacaaggcagcttggtattacaactaaacaagtatatactgacagtgagaagaattaatttaaaaaattcagtaccagtaatgagtaaaataagcaaatttaaggcactacactaaaataaccaaagttataagtgtagcatacaactagctagtaagacagatacagtatgatgatatacaataatccatccatcttcagtggttgctctagcttgcttaatttgtattttaatgtatgacgccgttgactttttgtcaacgtttgaccatttgttttattcaaaaattttgtgcaaatatgaaaatatttatgtcatgcttaaagaacatttgatgatgaatcaagtcacaataaaataaatgataattacataaattttttgaataagacaaatagtcaaacgttgtataaaaagtcaacggcgtcatacattaaaatataaatatggaggtagtaacatttattataggttaattaatgtttggcatcatatgctccaaatcaggaggagtaacctgtaaagagggggagggccgctgtgattggcatgtatccatgcagaattggagatacgccgaatgcgctagctgctcgcctgctccttcaaaatataacttgatggtgatgataactcgtaaaattaaaaaaccaacttaaaaatcaactctaatatgaatgacgtgtcaaaatcccgaaaaaaaaaatctttaatttatataatagtaaagataaagacgcgcgggcacacagatatatatatacacacacatatacatatacgcttctgttgcaaggagtagatatttaggtacaactatgtgctagtaaaatcgaagcactgcaaaattatactccctccatttcttttagtttgaagttggtcatacatttggaagcaggtgtagtatttgaaatttggtagcaaattaaagataaactaaatcaccagtacacgaatagctcacatagagcattcttggaggatggaacaaaaaaaaaacaaatatcttccaggtcactagacacgttaaatacaaggggatcaccacatgcttacaacacacgtactgtaatttaattagctggagtacataatactccctccgttcaggttataatatgttttgattttagtcaaagtcaaactgttttaagtttgaccaaatttgtagaaaaaagtagtgacattttaatctaagacaaatttattataaaaatatatattcaattattgatttgatgaaactattttagtattataaatattactatatttgtctatgaacttagtcaaacttgaaacagtttaactttgatcaaagttaaaacaacttatgacctaaaacggagggagtaatggttacaaacacaatgcaagtcgatcatcacaaaatatgtgtcaggggcaattgcgcaacggaccatattctaaggactaacgtccagttctatttcggctcgtcaggagatgcttgttcaaaacgttctccgttcacgttcatggtttaactgctatcagagttttcagacattctgctattagctctgaaccaccaacagaacatcaggcttttatatatatatataattagctctgaatgtagtgaagatgagcatgtgacataatcgaacatcagcatttttttatatatatataattagctctgaatgtagtgaagatgagcatgtgacatgatctctcctgtgtatccgtcactcttgcgtttactatatatggttatgtttgtcaacgccaggttgtggaggcacttgttcaagacagaaacttcaatcaggttttagattgccaactgagagaatcaaccacttcctttatgacattctgatgaccatcattcaggattcaggagggaattaaaaaaaagtgacaagcatttcagagaactcgcaacagcagctaagttacatgatataaaagggaggtcccaatcaacaacgatttaaatcatagacggtccaaggttaccacagcttgttagaggcatttgattacagaatcatttccagtccatttggaattgagtactattactcttctagtcgtccaagcttcttccttagttcctgccgctcctagtgttcgtctgttgtatcttccttagttcctgccgcttcaggtgttcgtctgttgttccctttgataagggtagcgaccccagcaccgaaaaggtagccagacattgcaaatgcagcaaccatccacaaatgccttatgttgtgtgtgccaatcttcttcctgcgctcaaggatcaagctgcagtacatggatcaaaaggaaaagatcgattagggtgcatgtgcagacagattacattggcgacaaaaacgcttgtagcagcatcacagctagaaaagtacatatatatacctctcaccgctttctctaaccagatcatgttgtgacagaacggctgatgcttgttccgccttcccatacactacttgaaactgcatagcaacatgttaaattccactggaatatgcattgtaaaatttggcttatgatgacaggcaactcccaaaacaacagcagtatatgtcatttaatgatctagtatatatcatttaatgattctttttagtgcagacacttggatcaagtgctgttcttgacagtactccctccatccacaaaagttacacctatttcacatttaagtttttccaaataagttgtttctatttgtagtctgtatgcattcaagatttaagtgaagagataaattaaatgttttattagaacccaaggagtcatctaaatactcattggttccatgcttgcattcactccttgattttgtaacatccaaggtgatctaatttctccttggtcttggtgtcaaaagtaatatgtgtaacttttgtggatggagggagtaattgtgaaactgtggatgacccttaatttgttgacgggtcctgatatgaagatgcttggtttagattactctttgaatgattaccatcatttgtaatgctggtgacaccaagtaggcatgtagatggcccaaaccaaactggcccaacccaatccaaactaggcagtccaacacaatgcaatccagtccccccacagaaactgaactcacaaagagatttctctagcgcggcggtggtggtgacagcacacagcagctttgttggcgctagctgctagcagaggcaaccctgacttgactgcaaatgcaacatccttagcacaggaggtggcaatggcatggtaactttcggttacctggtatccgcagccacattaactatgcctagattattaattgggtgatcttctctaatacctcaatggacattcaaacaatttgattttcttaaaaaaaaataaagattttggtgagcttggtgatcttctccattacctggtgaagttctcctcacaaaaagaagaggctttttaacttatgagcttcattcactactagtagtatactagtataaagttccagaccaaataaaattccacgttgtgcgaagatccgaaattttcatatctaagcatatgcagccctctaattccaaattttcatatctaagcacatgcagccctgtaattccaaatgtaagcaggtaatggatgaaattctgtttctaatcaagaagctcacttgtgtgtgcagtggtccttatccatcagacttgatgtccaacgaaatactccgtataacaaactaatggttgccattgattaattgaatgtttgctgtcaggaaagaaaaccttattaccatttgcaattggttagatcaaccattacgagataaggcacagtgccgtcagtctcgagctttctttgccttttctctgttctaatccactaaaaaatattacttgactgagatgttgttttccttttggaaaattgcaactccagcggtccgtgcaaatacaatccatctgcttggatcgtcaaaatcataatatgtgccaataatcatgatttgtttcacatagaagcgatatcagcaagggtaattgtaatactagctatcatttgctttgtgcctgctagctagtttgattagaaatagaattcaggataatacgtgctctcatttggaattaggggcggcttgcatgtgcctagattgaaaaaaataggcaaaaagattcttttctttttctcccatgtctctatcgacgatagactatcgttcaagctggtggagggggattgaaacactatcgaatttaaactagatcgaatggtaggaaggagctagggctataaatgatataattatagaagagcgaaaaagggtagtagtagcaaggatcgagtacgcacccactcaacaccgtagccgccggccatctgggaaccatggcgcgcgctcctcgtcagcttctctctcaagggaacgccataaatccctcgatctcgacctcgatgtcgcctgctagagttagggttagccagattcgtttttgtttgggttgcgttcgacttgggtcggccttagtctccgatttagtccagccgagattctcgaaggccagtgataataaataaataaagactaagttcactttgactcccttgacaccagtgacccaatctaattcgtatgactgcaataccggatatcttcacacacacacccaattattaaaactgatgcaattttactctcttaggctgtgttcgggagccgacacgcaaaacaaagcagcgtttagcgcatgattaattaagttttagctattttttttaaaaatggattaatatggttttttaagcaacttttgtataaaaactttttttttaaaaaaacacaccatttagcagtttgaaaagcatgcgtgtggaaaacgagaagagggagttgggaacggctgggaatgaacgcatccttagtggttttggagggcggtttcactgacgtggcgtctacgtggcagtgttgacctgatctatggcgttgatgtagcgcttatgtgggacccatttttcattaaaaattttttgtggtgcacactaatatgtggagcccacatgtcatccgttgcatattagattagagagaatttattatataccactgagtttgttcgagtttaacaatttgccattgacattgtctctttctataatataccaacgactttatcagttgttttacaatacaccattggattgggccttcttttcaaaaatacccaaaatacacttagagacatacaagattaacaattggtttatttcattagaagtttcaaaaaatatataattttttttgtgtggccttgccgccttgttacaaaatatggaagtttgtatacatgttttaaattttttctggtatatttagtttttagaaaaaaaatatttttatgtggtatatgagagaaatttgcttatacaagagataatagcataaaaatatcttatatagtgtatgaaagatgatttatattaataatggcaaatagtttgccagactggcatgccacataggcaaaaatgacaaatactccctccgtcctaaaatataagaaccaggactggatgggatatttcctagtactacgaatctgcacaggctgcctaacttctctttgtaaagaggataaagataaataatggtcatctcaaattcaataacattttgtagtgatatggaacgaatagaatggaaataaaactatggtgtcagtacaaagaggctgctaaaatgattacggtgtcaacataaagaggctgctaaaacagaattcattacagagggcattaggatgatcttgggaaaggagaaattgcccaatctgaatcaatggtccaagtattcaacccactaaactatgaaaaaaatagaactgagtattcaatccactaaagtatgaaaagcagttcgaacagctccatagtggcttggccatgtggactatgacaagtgatagtgaaatggtgatggattcgataaaaaaaaattcagtaagtcatacagcatgaaaaagaagtgtgttaatgtatagtattcctgggctcactgattagtgaggaaagggctcggcttgagtaaaatgagctaacatgtgagccacgtaagcaataccaccaacaactgttggatagactttttattccatattataattcaatggttcaagcagggcatagcatggcaagaatcttctaagaataagtttgcattttgtgtcttgtcattcttcataaattaatcttatataagtgcaccccccaaaaaaagtatgtatcatgttgttatttttcacccagccacttgtaacatgtttgtagttcaatgtaacttgaatagaaagctaagaaaattgtgcaagaaaatcacatgaatccttaggggcaacttcaaagaggaatttagaaataagattttattcacaaggccgtgtgcaagtgattggtgtgcatcttatagtgctcccatggcatgcataggtcgatttcacctttctggagggtacagagaaaataaagttatactacaagttactccgtacaagtttagttatagggcatatattttgtttcgccagtacaatgctttgatcaactattactctgtgtagttggtaatatattataatatttgtgtacaaaattataagtagaagaaagtatttatgaatacaaaactaaaaatacattaatattgtttctcgaaaattatatttaatatatatagtaaaaaaatgatgaaagcattatcgtaacaaaataaaagatgccccacaatttgtataaataagttggagaaggatcgagcagtgcttacaagccaacaacaaatataggcagtagcactaagtattttaatgatggggggaaaatagaaccagtgtatctctcttaaaaatatactatatgtttggggtgggaaagaagaagaaaacgtagcgtattaacgcatgtcgctagagcatgtggtatatcatatcagaaatttacaggatcagtagagctcctagtgatgtacagctcctatacagtcgcatatccatggcagcgtagcgttggaccggatcggaggcacctaccaaaccaaaccaaaccaaatcaaatcaaatcaaaataataatataataataaaagagtaaaagaaagaaaaaagcagcgttaatagaagaagagagtagagcagacacgtactgcgattttgcgttgacggacgacggcatgagattatctgcgcgcgccacaaaaggcgaaaaaggtactgcatgtcctctgctcctccctcctctgcgatgcgagggggagggtggtaaaaagtctggcaaaacaaaacaaaacaaaaacgaagaaagaaagaagagaaaatctgtgcgcctccctccctcaaatcagaaactctcgtcgctcctgctcctgtactgagctcctgtactgacagactgacagacacgacgagattcctctcctcccctccccttctcttccttccgtcatcgatctgtcgcacggaggagggatcaggcgacgaccataaaaaaacccacaccgatccgatgagagagagagagttgggaggccagatccgatctccccattagtaacttatccctggaaagaagaagagagggaggggcacgcgaaattccatccctgcccctctcccttatctgactcactccttcccttcgctcgctattcactgactcattagggccggctgtgttttcccaactaatctcttttttttccatcatcacgttttttataaacttctaaacggtattttctttcataatatatatatatatatatatataaattatttagaaaattcatattgatctattttttaaataaaatatagctaatacctaattaattaaatgctaattgatagctttgttttacatgcactgtaaatttaatttcggaaccgcaatgaacaaacacagcctagttaaggctgccttcgcacatctaggagttaatagttcctagaggtgcgaggtgtgtcctagatagatatccgatcgaacatccaataatcatccatgtcagcaggaactctcaacctatgaaatgaaggggaaaaaaagaaacaggagggaaaatatatatatggtcactggatgctgctacttttatacactagaagaaagaaaaggagggtgaatatgtataccagacataaggaggaggagttggttctcctagcgagcgttgacggactggcatgagtcatctagttatctgcgccacaaaaggctgcagcagccagcgaaaaggaattgcctctgctgctgctcctgaatcgcgtgaaatcatgggggtcgcccgctccgctcgtttcgtccgtcttatcgctccccctcctgtactgacagacacgacgagattcctctcctctcctctgctccccttctcttccttccgtcatcgatccgccgcagggaggagggatcaggcgacgaccaccaaaaacccacaccgatccgatgagagagagagagagagagagttgggaggccagatccgatctccccattagtaacttatccctggaaagaagaagagagggaggggcatgcgaaattccatccctgcccctctcccttatctgactcactccttcccttccctattcacggatcgtcgtatctatatttatatagaatataaaaaatatatatgggcttctttttttcgccctacttttttttccatccgtttttttcgtcgcctccttttttttcgccgtttttatccatattctttttttcgtcgcctttttccgttttctttgtccgctttttttcgctatttttaagtcgcaattttttcaataatctttatatcattccctgtctaataatatgaggatttttgttaaaaatttgttccaatgaattatctaatctcattcccagaattctttgttccctactccggatcgtcgtttctttttcttggacacattttggctctctatcgtggcacttaacgcgcaggaagagatatggtgaagtgcaaaacaaatttttccagtggagattttatatggcccgcctttttagtttttgaaaaccaattttacccaatctcttggtgaaaggaaaattttaacaccataaattctgtttaggatttccataataaaaaatttgggaataaaattttaagttgctgttagtgatgcttattcgggtttatttagatgtccgtcttcttatcgtcgggccgtatctagcgccgccgccacatcgatatgcctcccccatgcgttccctcctcctattaattgcaaaaggccaaaaatcaattcactactactcccctgtcattttcccatgagtaccaactcaaccatttgtatattcaccaatctaaaaaaatattgcccaagtctatcaaatatatttatagggtgtgtgtgcgcttcatagagatggctatatgcgcttcatagatattatgagtcgaatagagtagcacatacagaaaaaaaatgaatgaggggtagaccgtagacgtgtactcggtagcatcatgaaaaacctagcagatataacgttgcatagtaaagtaaactatgaaaaaaaaaacacctaattgcagtagtatactctgatgtgcagagcttaattgggtgggctgtcacgtctctaccacctgcctcgtatgcaacatactaatatcctccaatatatgtttgataggagtagttgcgtactttttactttttagcataattttgagcatagttttttttttcttttttaccgagggtgtagtaagcccaacatgatgcatatgactcatgtaaaatttctgttctttttgtttaatgtataacccatgtaagtttagattaatctatgggacacccgaaagctccgctacaaataagctcgcaacagccgtcgttagtatacgagccgtgatttagtataatggttttttctctagtaatatacccgtgtttgtaacgggtcagacttatgcaagtaaggattgactgagtgtagattagaataaatcacaagccaggttcgtataattggggattaaataagtggatggattgaggagaaaacacgaggtatacttatataattaggacttgaattggctggtaggtggattaagaaagtattgaacaacctcaatagatggatggtaagaaggtgacatatggagtagagaaaatcataggggtagcattttcaatgttatgattcaaatatggagcaattgacaagttggtggtaacttggcagaagaaacaataaatatcaagtaagtcattcctacgtcccttaatataaaaagttttaaagttggacacggttattaagaaaataggtagaagtgaatggtgaagggttgt

SEQ ID NO: 23571 - DNA, 11720 bp, Oryza sativa
aattcctgcagcccttctttattattgtttttctttcgttctttcctctctcttggaaatcgcttttgtattttatcggtgggctgggttgggctgggctgggctttttctttctcatcccttcccggattcggatttatcccctttttttttgttggaagtaaaggtgggagaagagcgagaaaaaaaaaaaaaaaacttgtggaaccctaaccctaaccaggacggacaggaggagtagatccgttcgatccccatgtcgttcgccgctacaaggatgatggcggcagcccggcgcgccttccactccaaggccgcggaagacgtacgtaccctactccgtctccttccttccttccttccttgcttcttcttgccttagcttgctttttgattatttgattgattaattgatgatcgctaggtgcgtagacatctcgatgccatggaaaaggccaaccttgaaaggttgccacagctcttggatcccatcatccggcagcgagccgctcgagatgtccaccgcaatacccacaggatcaagatctatgctaatccttgcatagggaggtacttaatccatccattatctatcacatatatatgcgtcagcactcatgtccttttttttatatatatgatgaatcaatcaatgcgatgagctaattaatttattatccatcttaatttgcattgcaggccaccgcccgaagggcacatttggtatgatgtcgcctgggcaaaaaatcttggtctagttttttttgtcacctcattttttgggatgtacgatgttctattcgaggagactcaacagtctgaccaccatatgtcctcctcgttgccaatgccaccctcctaaattattctgtgtaaaatcatcgctgccgaccgattttagattatgaaataataatctccatgtcctgtggtcttactctatgaggaccttcttaattctagccttgtggtcttataatctattagtacctccttaatttaagccttgtggaagcacctacttaatttaagccttgtgggcttgatgtatcagcacctacttaatttaagcttttgtgggcttgatgtatcagcacctacttaatttaagccttgtgtgcttgatgatttaaagtaagtacatccttaaacttaaattaagccttgtcgttgtcgtcttgatgcaacattacctccttaatttaagccttgctgtcctaatgtttttactacctcctcaatttcatttgtaggccagtgtcacaacttaagagtaactttccgtggtaacagtaccactatatgtttttctcaactttaattactgcgtgcacccaaagatcccaaacacaacttgctcactttttttttcatgctgccttttgattatctgtttacaatagggttgttcggctgccctggctgctgctaccataaaatttcaatactagatactgtattggctggctgcaaagcggccatatatagctttaccgaacatcccttatgttgctaagattacagaaacatttgtggtttagacgcttctttgttcactattaccggtacttaattgacggttttatgaaacctattctcaaacatcttcctagcaaggtgacatcatgtttcatcttttcttttcatgggttagttagttacctgtggcgttgtttcagtaaatggtaaactcttttggtaattcttgaagtgatttgtatttgaatggtttcttcgaactgtttgtgatttggcatgttctgcaatcagttgacattgttgttatttataatttgctttcccttgttctttcatgattttgtgctgaaatattatcaaggttgggatagttgtttccgcttgggttatgatgatacttgagcttggatttggcatatatattatattactactctcttacaatgaaccagaggggagtgcttgggttccaatactgcagagctgctagggtgcatgtaggcagtgttgcccttttgcctataagatgggcttggtagccaagcgcctagtcgctcttgtttgctgccaagctgcatgtttggtgttatttctgttaagtgatgcataattgcgatgagcaggtacttttgttcatactgcaatttccatcagcagaaatttcagtgctattagttatggattacctgttgtttgtcttttttgttcagtttattgatttctggttaaattaaacttgtgctgctgtttcaatgtcggtatgtttgttgatgagacgagtcagatagtgtgatactgagctgagttactagcaacatttgtacatcggagtcgaagcgatgtaatatatttgtaacacttcaaaattttatgaataaattgtgtgtttggaactttggaccgattgtttcagtcttttagttactgctttcggcttgtgccacttttgaccgcaccaactattgttggtttcatttcatcttagtgtatagccgagatcatttgtgatgtagcatgcgtatgctatttccttagcacaggaggtggcaatggcataatgacttgcttccttgacaccaacaacagtgccaacaaggaccaggattaagacattcaaccaatttgattgatgtcaaaagttaaatattttggtgatctactctgttaacatatctagtgatgggtgttttgttgttctgtgaaatcgagccaagatacataagcaaatattatccatacatattgctgcatcacaaaacattcgcctaggaaaaatatgtttcttttgacatgagttttcactaatgcaggcatgcatatatgtaatttatctagaccaaatataataattcaagtgttgaaatatgattttttaacatcacatttagaaaaactttatttcgtgagatgagtgctgctcaacttttagatgggactaaaagattggatgtttggacattaattataaatattaaacgtagactattaataaaacctattctataaccctggactaatttgcgagacgaatctattgagcctaattaatccatgattagcctatgtgatgctacagtaaacatgcgctaattatggattaattaggtttttaaaaaaattgtcatgtgaattagctcttatttatatgtaattagttttataagtagtctatgtttaatactccaaattcatccgatatgacagggactaaagtttagtccctggatccaaacaccaccacctaaataggttcttgctgtgtaacctatccactcgggtacttgcatgtgcgcgtatgtttatatgagtgtatgcatttatattgtattttttttaaaaaatttgattttgttttttctaaaaaaacttttttaaacacgaatgcgcttggcccgatagtaacctgaagaagagaaaggaaaaataaaaaaaaatggaacccttacaaattgggcgtccgatttatttgtcaaaattgagcgctgtttcgttagttagaaaaaaaaatgttacacctagtagatggagaatgttttaatttatactgaaacacgttatggaacatggaatttcaccctaaggaaacaccaacaaatctatatcaatcaaaaaccccctgttagcacaacatttcaatccaacacaagggcacccatccaccactcttcccggcgagcatctcgctctcgctgccggcacggctcgcgactcgtcgccgccgccgcccgacgcggggcgccccaaaggccgcacggccgccgctccgtccagcgccgcggcgtggcgcgggcggtagtacgacgacgcgctcatcccgggagcggcagcggtggcgaacctccttgcggcagcgcgtcctgtcgtcgtcgcgccgagctccggcctcctactcggccagcggccggcggcggcggctacggctacggaggaggagaaggagagcgagcgaggcgccccattttttcggcttccatcggccgcacttttgacagcattttcgaaagaaatccccaattgaagaagaattggagaggagaggcggcggcggcggcgatggctggcggcgacagggagagggatgtcgaggaggagacgaggaaccagatgatgcagaacctcttcggcgaccagtcggaggacgaagaggatgacgacgaggccgtcgaggtcgtcgacgaggacgaccacccgcatccgcagcagcagcagctgcttcgccaccaggtggtggacgacgacgacgacgaagacgacgtccgtagcgaaggccatgcccgctccggctaccactcggtaaaaatctcaaatctcccctcccctgcttcctgtccccccgtcctggggctagggcttaggtttgttcggctggaataaatctcgccattgggatactgcagtttgatgaaccagtacatttctgcttcgctgatccccaatcatctgttcgaaaattctgaaaggaacatcttgataataagctttgctagtagaatattgtacttttttggaccaaaactattgtaattttaggtgacgtgatatggagcattgcctcttgaacaccactggcatttcagaattccatcattttgtttcctcacactttgcgcgcaagtctgtcagtctcaagtgtaaatcctctgtgtgtaatgctagtttttttcagtgcccagctgtagcaagtgatttggagacatactggacctatcacggtgtaaaaatcgaaccgtcattccttgctgatcttgccacagagtttagctctcgtaggctcttcttgtgccccagttcttcattgatgcattctgtatacttccgctgcagctatctgatgtgatgcttgcttattgatttgcttgtacaggaagaagtggaaggtgaggctgataatggaggggaaggtgaagcggaaggagaaggtgaaagtgaggggcaagttgggatggaagaagaaagcgaagctgaagctcatcaagctgatcttgatcaaggagaaagtgatggggaaaaggtccagagctccccagaaagagaatttagtgaccgggtgatgcaaaatgatgcagcaggcatggatagtgaagacggaggctatcagcagtggccagtagctagcggaagaagaggagttgttgcctctgaatctgaagggtctgaagatgactattatgctggccgaggtcatgaagatgaggaacctcatcaaacaaggaaaacaccaaggttaagggaaaacaatcagaatcctatctattgtccgtgcattatatgctttctagatctgacattacgacgtactccctccgtacttgtaaaggaagtcgtttaggacaccgacacggtctccaaaacacaactttgacttatttctataaaaatatttattaaaaagtggtatatgtatacttttatgaaagtatttttcaagacaaatttattcatataatttttacatttttaaactcaacaacttgagagttattcaggatttatattcccaaggtttgacttaaacattgttctaaacgacttcctttacgagtacggagggagtaacaatctatccacttcttcattaactgtttcttagtattttgctagtgactcaatatgcactctttgcctatgtatatcctccctacctttgtagtaagtagtaactcgtaagaaccataatcttatgcagctcgccagttgaggaggagagagatcatgaagttgtccgtgatgtatttggtgaaagcgatgaagatggacctgctccatatcgtgatcaacatgaaattgatgaagattcccatgtgagatttttatgctcaagttacctaccattctaggcttaaagtaggaatatctttcgtcgggcttaaagaaaaccagcaaagattttcacggaaattctaaacagagccatttttttatacattctgcactgagcaagtacagtatgctaacgatgacttggtggcatgttgtttaaactgaatatcagcaaaagtattcatgtaattcaatatgtagagaattttgtgttttatcttcttttaaattcagagttaccatatgatgcttaactatgtaacaaatttactaatgcaggtagcatctttgctaattatgtatttatctaaaaatctaatctttctccctattcatttcttgtatgtaccctgcatgaatatagatctgtgctccagtcagtattgatcaactttcacacctaacttttttctggatgcaataggtactcaaaatttcctcctttcttttttagagatcacctatggaagatgaaggtcactatgagaaggatttgcagcctgaggatgtagtagctgatgaagatatgagatatgaatcagatgaaaatcgtgaattgaaaccaaaagagaaaccagttggtccaccgttgaacctggtggttccacttaagcagccgccagctcaaccggacagagtgagttgactacccctttcgaaccatatatctttcagtctttgaccatacagcactgttatcttttctgacaagatgattatatattggcagacatcagttatctttgatggatatttattgcgttgctgtatatacaccagatttttatttgtcattctttgtatctgttactgtttaattgctgatattttgtgcttgttcgtaaatgttgttgtgcagaactgcacaattgactggtgcagtacaatgtcagaaataaagaacctgtgctgctatgaactccatgcttgtacttattatgtgacgttggccctttagtagttgaaatttcttttttatgtcatggtattattgaagagaactttgctgtcatgttataggcttgactaggaatattaatgattggtgcttaaatattttgtgcttttgcagctattcatagatttttttgttactgactgatttcttaacttgtagatgaatgtgatcaaggtatcaaacattatggggattgacccgaagccttttgatcctaaaacatatgtggaggaggatgtatttgttacagatgaatctgggactaaaaaaaggatacgactggaggacaatattgtgcggtggagaaccgttaagaatgctaatggcactacatctgtaagtggaatgtttttcaagtagcattttgaaatcctttagcattacagactcagttatgctatgtcgccatcttctaagtttccctccctgaagatgctctgggcagcttcttaactttcttacaataatcagggttgtgaactagcctttagtgatgcttgcaccgagtcttctctcatagccaacttgcccaactgttattatgtattccctgcaaaagaatatatatgttattatacataccataagatgcttggtctgtttcattttcttcctccttttttttggtcattgcccttttaagtagtttgtgacaggtggtcggtgcactatgtggctatgcatatgataaatgagcattgttgcagtgtgaaagtaatgcgcgcattgtaaaatggaaagatggaacgatgcagctgctgattggtaatgaagttcttgatatatctgtacatgaagcacatcatgatcagtcccatctgtttctgaggaatgggaaggtaaagtacttcttatctgcaattcaacaatgttcgctaccacctctgttcattcatgctcttaccgcataggtctcactaacctgatataattttgaattgtaatgcagggagtccttcaatcacaaggaaggctcttacggaaaatgagattcatgccatcttccttgtcttcgaaatcacatcgtttattaactgctcttgttgattctcagaataagaaaactgttaagatgcaaaaatggatcgaatctaaggatcctgagaaagtgaagcaggaaaaagaaagggtaaccaaaaactccatttcttaattcattggatgtatatgcaacactgaatgacatgtgtatgacttacttttgtcccaatgctgcttctgatatggttcctatgtcaaaaacaacatgatttgtgttgtgttatactcactttccatttttttctataggggatagccattgggcttgacgtaacatgaacatttatattttttcccttatttctttagattataggagttggatgcatgtaatacttaatagagtagaataatcagcaagatagtcagaatgcaaacttcaaattaagtaaatataatttggtatctgaccatgagagatttgagcagatactgaatttgtaccagataactgacaaacaagtgaatatgagcataactggtaagctagtaccattaaggaaatgctactaaagtactaactaatgttgcaagctacaataatggtcttcttcatggaaatatgagcttcaaatttgattattcttgggcgcatagctagtcaggatcactatataaaataattgagaggacagttgatgcttttagagcaggataatcagcaagcaaatttagagcatgacaatcagcaagcaaattgtttttcttggatcacaaacatgtgataacatttttagctatagttggtaaattgacgattctccagtgtctaaaaacattacatgcaaatcttggcatgttgattgtaaatctcttgaatggtaaagagcaagattttcatcatatttatcctaaaaataaagatgtaatcattatgaaatcatttgaatgagttccacaatcttgttgctttctctgttttttttcttccttttatgatgagaggatgagttctaagatgtaagaaatttatgtcgtcattccaacaaatatcaatgtgatatcaggtcccattttccaacaatactgcaatttgtattcagcaaattctcttgtttgtgtgttttcatgtttttctccaatgcataagcaagcattaattagctcaatttctgtggcagttcaacacgcgttctagatcctgtgagtttcagctttgatttgagagtctaaaagttattgtaacatgatttgttcttactgctacgctgcatagcatttattgtggcttgctccagtgaacttttcacaaaaagtaaatcacatagggttaagtttccttttgtgaaggcgcaataaccaaatagttgacatgccgatttagtaaatgcatttaatcctgttccatgctttgctgtatttcctttctgttctaaacttgttatatatgcattttgaatgaagtttgtcccttttcaatatgcaggccttgggccaaaatattcgagcccattcaattcttcaacgcaaaaaagaaaaggttagccgcaagtacacacagcctgccaggcaaagaaggcagctttctcctggatttttggaagatgcattagatgaggtgggtttcttgtcatttctcttatttcttccgcttaaggtcattgatacaatcagttattgttgttcatacagttctagtattagtaataaatgatatttagtccagacgcatcctattaaatctcactagtaaatgccatttgaatgatcgccagtctttccaatttagctgtgcggccacttttggctgcaatataatgctggtaaagtgcaagaccctccacacctttttcttttctcgaacacgcaggagatctgtgtaggggcggtgcggcacaggggagtttagaaaaaatcccactccctaaacaccgtcatgtcttacaaaagaaccaaacaaaccgaatgacctagttaagtcgcaagggctatcgacctagcaaacaggtttcgaagctttgaaactccaggcaagcaccaaagtgcaccttcatttgctactgattggatcaccgctgccacatacagagttgcacactgccacaaacagttgttcctatgcttccaaatttccctccacatcttattaacactgcccactccttatttgattttagcaagtgatttaagttcaatttcactttccgacctaaagctgttgcatggtaaaaactctgttcagtgaaaactgaaatcctcttcagtcctacatgttatttacgcgatgatatccaaaattttcttgtctggttaattttatttccttttttgaaaccatgtaggctgctatcgtatgcccatggcacgtacacataaattgtttatctgtaatttcataggggcaatatggacttgtttaagcttactgtaaatggctcagatacatagaatcattatgttggcagtttgtttgtgtgagatttttttctatgcttagctggtttactcaactgtgagtgtaccttactgaatggttacatattcagattctgggtagatggttaattttattctgctgttgtagctcacatgatgtttttccttagagttagatacacgtgttcaatagctgtttttgtaggagtaaaatgtgctgtgatgatttgcaacttgtccttttggtgcattctggcaggagattggattcgacgtgacaattaataagactttagtactggttatgcccaataatttattcaatttcatttttggcaggacgaggaacctgaccatcaatatggttctcgccgaatgccagcacgtagtcgttttgaggatgaactggaggctgaagccctagctgagaggcgcatagttagtgcaaagaaggtgagcaactcatcagcatgtaacccttgttatttttaaccaatgtattgctgtttatacataatctgtattgtttgcacattttcagtcaagtatgggcagaaacattcctcgcaaaccatcatttcctgctcgtccgcctagacgacaggcaaatgaatattctgagagtgaaagggaggagtcagagtatgaaactgaaggagaggatattgagcactcaccaacccaggggagggaagatgagcttgatgaagaagatgaatatgaggaagatgtggaagaagaagcagccatgtcagatgaagaaattgaggtaagaccaatgtcatggcctcaaaactcttggttttctttttcacaagttagcaatgtgattatgtgaatatatgatacggatgaacattgtcgtaaggttcaaattttgcaagtcaggttttttcttggatatgcccaataaagacattaaggaattaaatacttttgcagcatatgtgaggacaagattttcaagaatcttgacagtaaccactaggaatatgaccaattttgatagtattttagtttacattgctgacattttgtagtttatgctcagtagttctgcaacagagtaattaacaggtcagcaggcagacttgctgctttgtttatgttgaagtgaaacaataggaaacagaaaaaatgtactcagttcatgtttgactacttctgcacactagttagcatataatagctgaaaggaatctacgattggttttttgttgtagtaatatagcaaacttgaaagaaaaacatgatgaggctagctgtatataaatcgaaactgaaagaggagcctctgctgcaggaaccaaaacggaggagagaatctgggggtggcagtgccagccaaaggcgcaaggagatcgactcggacgatgattctccaccaagaaaacagcaggcagttcatcgtcggaaggcggtcgtttttgacagtgatgacgaatgatgatgaagaaagagctggtttgcaaacaccaatgttggcatggcaccatattatttgcttgaggattattggttagtaataaccaaaaaagaaaaaaaa

SEQ ID NO: 23572 - DNA, 3939 bp, Oryza sativa
cctgcagccccaagaatgtggtagttgaagggcacaatgtactggaattatcctttttctttctctgtaagaacagtttcgtttctcctttttgaaaaatatagaaaagaacagttagtatcttgggagcagaaaaactctaagaatgaggcgtagaagagcccatggtaggccccatgatacaaggaacatgttggaggcccaaacaaaagtaagcccatcaaggtccagtgcggcccattatctatgtcctcgtcgatgccccacctataaaaggagattcattcgtaaaccctagagcttcgcttctccgcagccgccgccgccgccgccgcgttccaccacctaccacccccaccggagaagaagaagaaaaaggagaggaagatggtgtcgggttcggggctgtgcacgcggcgggtggtggtggacgcgcggcaccacatgctggggcggctggcgtcgctggtggcgaaggagctcctgaacgggcagcgggtggtggtggtgcggtgcgaggagatgtgcatctccggcgggctcgtccggcagaagatgaagtacctccggttcctccgcaagcggatgaacaccaagccctcccatggccccatccacttccgcgccccctcccgcatcttctggcgcaccgtccgcggcatgatcccccacaagaccccccgcggcgaggccgccctcgccaacctcaaggccttcgacggcgtcccccctccctacgaccgcaccaagcgcatggtcgtccccgacgccctcaagtacgctcgcttcgaaccctttcctctcctctcctctccttttcttttcctccatgaactaatccatggcttctagggttcttcgcctccagcccggccacaagtactgcctcctcggccagctctccaaggaggtcggctggaactaccacgacaccatcagggtacatttcctttctgtattcatattcacgctgcttttcgttttagcttgaatgcatatgctgctgtaatgcttttagttttaggttgaatgggacgcagattcagtgacattcccccgtgacattctcggtgacattgagtcactgatatgtgggacccacatgtgtttggacccacatgtcagtgactcaatgtcacgggggaatgtcaccgaatcacaatccggttgaatgcatatgatgtacacatgtgcccccttttacttttcggatgaatggatatgctaaatacatgtaggagtactattgaactgaacgtgttaggatgaatgcaatgctgaatacatgtgttggactgttaagaatagttcatcttggaatgttatggtattatgtgatcacttttgtgaatattgggcccttgtagctatttgattgtacaactgtacggtggtaacgcgttgaactcaaactcaacatgctctggatttgaatatgtaggtttttgctgagctacttttatgctgtacacctctctagcttttgttttacaccatagcctcaactgtctgagattagttgatgactctgatgatgcacgaaatcttaagtatcctatttatttatttgcacaaagatgatggaattcccataaacctgtgattacttatgctatggctgtgaatttgcaaatgcatctttttttttcttgtttgcatccccttttcaattgttacacagcatgtttttttttctaatccatgttgagttaaatagcatatttggcatgattggtaaaatgaagaaaaaatacatgtattctcactgatttttcagaatgatgtttacaaccagctacttctgaccaactgtgccatttctcacaacaaaatattctgtttgatacatttatctgctttgtttctgagtttgtgctattatttcaaccatgtcctgcatttctaggctgttatcatctcaattctggttgggctttttatgtttccctttagttcttatacatgaaagcacactgatcaccttgtctattgcacctgcaggaattggaggagaagagaaaggagaaggctaaggttgcatacgagaggaggaagcaattaacaaggcttcgtgtcaaggctgagaaagctgctgaggagaagctgggttctcagatagatattttggccccaatcaaatattgattggcctgattgtcatcaattttcttttcgcctttataatatttctgcttatcggtaccatgagaagtgaaatgatatgtctgtcgaaacatgataattttgttccaattgaatactagagagttatattggcttgatctgattttccctcttgaattttcaaccttgaactctcctaactggacaaatgacccctctggtttgttctgggttattttgatcctacttaacgagggagtaatttggcctgtgatttttaccctgtggttcggaactaattttctcattctttgcaatgatgtctgttaatattatgctcggctaggttccttctactacgttttatcccctagccctagcaccttcgcttgctcatttcttcctttctattcaccaattgtaccgtgtaattagctctgttgtgtatttttttaaaattgtttgtgcagaacaccagattatagactgtataatatagatagaatcaatactcctcctgaatattttaatgtcagacactttatgcctgaatattttaatgtcagacactttatgccaatgttagtattaattttctggagtaatggtattggaggtcataggaagtgtgtagtgtcgcacagatgcgcacatacttcagcggaaatatataaacccattctgataatcaacttcactcactaaacgttcaaaagaaagtgctcaaagaaagagtgaaactaaaattaagggttcgaatgcatacgcaccagcatcaaattaaacatagcattgttctagtgatgatcgactgaagctgcataataaaggggatcccagtccacaacgatttaagcatggaaagaaggtacttgaattttgagtacataataatattattattataataactgggctttgtggatacatatatggtgcattataaaacaagctaggggtacaccttcctattccatggcgtattacttaacttgggtcaactgatagatacactaaggtcctgtttagttatacggctgaaaagttttggcgtgtcacataggatatacggacacatgtttaaagtattaaacatagataataacaaaacaaattacagatgaatttattatgcataattaattcgtcattagtaaatatttattgtagcaccacattgtcaaatcatacagcaattaggcttaaaagatttgtctcacattttatacgcaatctgtgtaattagtttttttttgtctatatttaatactcaatgcatctgtccaaacattcgatgcaacaggatgaaaagtttttacgtggaacccgtgtctcttttcccgatgcttcaaccacgcaagcacattttatcttttgaaccaagccgtcgccttccatccttgcatatttggcaccagctgtgctcccaaacatgtactaccaacaaaacccgggacattcaactctataacatgtgggcccttatgtttctatgatatgtgggttcagtgataaataatttatcaccacttgtaagagtggcaaatagttaattattccgcaaaagccactccagcagcgacccacacattccttaggttgcaggcgccgatcttcttctgacggtcaagaattaggctacaatgcacatcagaagggagggaaaacaaggaggaatgcgatgttatcattacattacaatgatcaattgctgtggagataaactacatactacaataagaactaccgagtcattctagataattaagaagtacctctcggtgctttctctcaccaaatctcctttaacccagt

SEQ ID NO: 23573 - DNA, 14675 bp, Oryza sativa
ggatctttgcgtcagggatcacgctgctgtcttcttggcacatgcgcgatctctccgtcttcaggcattcgatgccggagcatatcatcttcaccagctgctgcccgctgctcatcactggatcccttgctgctactccagtgatgagtgtggtttccttctcaaacttgtcaaggagaagctcgttcaccgcctcgaacattagcttccggtgcgctctcttgggatcatctggctttgtggtgctcctgctctgatggatcccctcaggtttggatgtccacccagattttcgttgctcaagaacaaagaacaggtcagggttgatggggtagcctgatgtgtggagctgcatttgtgacagccctgaaccaaggtctttcatcagaagccctgacgccagtagaatctcggatacgtagcgatggtctgggcttggcgtctcgcacaagaaggcaatgtgatcgacaggaggtgcctcatccttgtttacgctcaattgctggagcttcttaaggaggctggctatgtttgcgagcttgctgttcttgggttgtgtggggagctctgtggacttcttttcagaaggcttgcaggactcttctgatggtgatgggtgatgctcatcatctgcaaatttcaagaaattaggtttcagtctttggaacacaatatcaataccactggtaacaatttcagtaaccagtccaccatgttaggttcatgcgttttctacttctctttttcagataatggaatgataatatcccagcagatgcatctaaagatgcataaagacaaaaactaaagcattcttgaactgatattcattccgcatccgtgtcaaatatagtacattaaatgctgcggcccttgtaattctccttgttctgttgtcaaaacaacatgtcgtgcagcaactaatcgctggtctgaaggcagattctttagcactccatactgatattgcaacattaatgaaattaagaatgtgcctaatgctactgcagaaaaaacgacaagcactctatcattgaaactctactgttcacattacttgggggttgcatacttgcattacgacatatcactttatctagcaagccatgtggataaattgtaaaggaactatgcatacaggagatcttttgattggtagtggtaggtgcaatcatagtacaccacagtaggatttttgtcaactctcagttatgttctttccctccttgaggaaatttcaaaaccctataactatggtgcataatgcacacaccattctatatgagaggaacactattggtagcaggagatctctatttgcttactatgtgcacgtgaacctcaacccactgccagcgttactacttgtcgaaaattaatatgaagaaacctaattatcgagtcatgtaaacatcagcagacatgagtcatgtaaacctttacacaagaagttccataaccaaccaactctggaaaactaagacatcaaagcaggaagtaattcaaaggacactccggaaaacctattcgagttcccattttcttttgaaaagtactaatactccactttatatgatcgatgaaccaagtagtatgaagcagcagatcttaccaacattagatgaatttgtggtcttgctggtatggaaaaattcctcctgatcaaacgaagagtccaatacagagactggactaggccgctcagtaatagttgctgcaggatccatagatggcaggtccttgtttgcatcataagaggttttctgaatttaagtttaaaaaaggtcataattagacaagagttatggtatgtttgtacgatttcaaatttccagcttgaacccaactagagttggacagatttcattttacagaagaactatgaccaaatattgtagctcttcctaaaatatatgtttttgctgttacaaaggtgaatatttttttagataataggaaggtgaaaattaggaagaataatactgtgtttttacattaataacatcatctatgaatatggatgaaagagccaactggaggaaggaaaattgtttaccactttttgaggattccttcctgatggtgtttgagtgccatgctgagatctcaaaatgttaacttctgcagatctgtctgtacttgtcacttctacatccagctctgatgcaacacttatgctaccatctgaccttgcggacatatcattgccttcctggttcaggctccttgtccttctacttacaccattttgatggaaatcttcaccttgtgcttgagcaggttttcttctaaatttacttctgggtgatactgaatccaaatggctcctttccacagattgcctttgattcttgcttgaatcgggagagggaattggcggtctggccctccgctctgaatcaggttttttctgttgtactctagggctagtggaatttttatgctttagcaagcttccattattttctctttgcatctgctgtctcctagctgagttctcagtcatcagctgtgaagtagacttctgtttcctgctaatttcttcattccttccatttgctctcttgtcaaaagaagcaaggtgttgaggtgtaggtgcccttgaactagatttggtatgttgctccacagcttccctagtgaccttctttgagcttttccttttatcagcactattggctgttctcagctgcggtagctctgataaaccgcctaatggaccaacagcggaatcctcggttacatcacttaacaggtctgcagattttgcaggcttcatgattacaatgggtgatttgaagcttctttctgtagtgctatcttcttccgttgtaaatgatggggttccttcaggtgcctgtttggtgttgctggtgctattcagtctcaggtttacatcagtcacatctccgttatcatggtctccatcatatatcttcggcatcgatggttcctcacgtttcttgttctgcaacaaccctttcgcttgcatcgagtccaggatctgcttgagtgccctgagatccttgttcgattgctgaaaatcaaggtccttgagccgtttctctatctcactgtaaactgatgcagcatgttgctcttttccatgagctccctttgatcccttcggcaattttctaggtagcacaatcttctcctgctgtttccaaggtgcagtttccacagggaacttagagttaggaacattcttgattgttgcatctagattcctctgctgcctaggagtagcctcattttgggaagaaaggctcaaaggcctcagcatggtgggttcttcactcctctctgtaactgatttggatacctgtgaagatatcgcagtattgtccttatgctctggcaagtcttccaaccccatgagtttcgcaacaacgctagggagacgtttacaggcattgtgttcttgctgggtctccaagggtggactgtaatctttactgatgctgcttctcctgtcttcatcagtcatgcttggctttggccttacgtcgatttcgcggttcctaagagggctttcctttatgtctagtgacaatcttggcacctccctaagttttgacgctgattcccttccttcacacgagaagcgaggagcatcatatgatagccttggttgctggactgattcagatggattcctgagcttggctaaaactcggagggattcgtcaatgtccatggttcctttgtttttctcttggatagcactgttaggaggctcattcaagattctaggcggatctccacaattgaataggtgatctttttctgcctctttggtgaaagttctgattgaaaaatcacgagtatctctatatattgaatcctttacgagatttcttataccaagagttgggtagctaggttgggctgagagcttggcaagggcatcatcaaggtagtaatccactccacagtcactgtcagaagagctcttgagcttcggtgagcttttgaatggcttctccggaaatagcattcgatcagtggaggataggtcttgctgtcctgatctgtttccatcaagggaggacgacgaagaacaagacgacgatgaataagatccttgcgacaactccactgttaatggtgctctttgattatcgatccagcttttactcatgttcttgtcctgaatgcagattgcagccagtcaaacagattgtagaagacaataaacaatgcatccatgcctattgaatgtaagaagaaatattgaaacttacaagaacaatctgagatgaatatcttgttcgctcttccccaacacttggactgcttgacagtgcatgggctgtttcagagaattgaaatattagaagggatcttccgattaaaaaaacatcttcaaatggctacaaattaaatgaaacaaagaaaaaacaaatatgtcaatgtcgtagttcatccaaacagccacatttctcggaaagaaccttcttgtaatttaataattagtgctgtcaacatttgtgagatagatttattatccaaaaccaggctcttaataatctgtctacagggtgtaatggctctctttctctctctctcttttgtcggctgctgcgaccaactcccagctatttagcactagtacagatttttttaaaaaaatcttagtagctgctaaagattccagagaaaaacttccatctcactctcacaaaaactaaatgcacctgtaaaatccggcacctggcccaaaattggggaaaaagctagatctcactaattgtcatcaacacctagcaattcaatgcaggatgaaggaacaccaggagcatgcatagcacccatccatacaaccctgacatgaagattttggaagcttctgagaccaagcaacttcactcatctttcacaccaattatgggtttataagccttcaattacacatatcaaacaccaaagaccaagtcttttatgcacacacaagtcaaatcaagactgatagtctactgattgtacagagaaatgcaaacaattaaaaaaatctcgatgtagcagaatgaacagaaaaggaaggtaaaaaaaaaattgcatctttgaaccgagcaatagcactaggagaagtgggggaagcaaagcaagcacctgggggaagaaggcgattgtgggaatggtgggcggcgaggggataccggcggtcgaacgcctgcaggatcccggtgacgcaccccgcctgctgccggtgaagctccggccgcctctcctccccgagcatctgcaagtacttggccggcatctcagcaaccaccaccgcctcaagaggaggagaaatcccaagaaattccaggaatgcagggaggtggagccaccaaccagtggcgcccttgctaccagctcaagcacaccaacaagaacatctcagcaaatcttctctgaatgaatgaaccagcccagagggaggggatcttgtgactgtgtgagcatcaggaacatcaatggcctcactggagaacaagtgtgagtgcaagaagctgctgcacaagcaccaagaacggccttcctcctcctccacctattcttcctcttcttgttgctgctcctgtgtgagactagtgtgacatggagtaactagcagacgacaaggaaggaaggaaggaagacttgtgatgtgaagctcagaaaaatgggtgagaaaggagaggagactttgaggccaggcagtgtacaggtttgcaagatgtcaccaccatatgagggaggaggactttgctccctttttctaatgcaatttagcataatgtgagtacattaactgccctgctgcacaagaaagacactggaaatgctgtattagcaggctaagtatgtatcaagcgcatcatcatcatcaggctaggaagggagatgttaagggtgggggcagaggggtgcttttgttctcttctcagcaccccatgtgctgttccaaggtctttcttggccctacccaccatcagagttggatggtgcctgtttgtgcacaacagcacaagctgcacaccacatcagcatctctttgtcattttggcattcaggcaagcaaaaggcctctgaagagttagttgtgctcaggtaaaagaaattctcctattgttcctaactggttggtgagatgatctcacagggtggccttacttacaaagattagctgtgtcattagtgtgcaaatgatctgttgtctgtacatgtaaaaccgcactgcacttttagtcaaggaggcattaatgtgagggagggaggaggagtgcaagggccaactaacaaacagtgcattgacggtgttcatccgtgagctcaagaccagatgcaattcttggctttgaagcatgtattggtgctttgccatgctgtgctgcaagactgctgcaaccatgcacagacctagagctacaggagtgatctcctctctgtacaccattttttcaacaagatgttaaggcatagggacatatggattatatggattcatggctaaatgaaatgactaagtaacccccatataatggtacaagaaatgtgactattagcctttcagttaggccactgttttaactgttgaatgttgatgacgaaaatggcttttattccacatttttagtgtttacctaacagaagaaactgctaataagcatgaacaacaatccaagaagcatttgctagaactttgcactggttttcatttttcagtggaagcgagaagccaaagaggatgtatgtatttgtcagttacctactccaatgtggatcttgtagctaattacaaatattggtgcctttttatgcttaaaatatttattagatcttgatgagaactaaatttgcctgatgggtgaaaggaacatgacacattgtgactcagtgatgagtatatttgacagtgtctccgactagggtgaaagaggcagaccaactcaaatgagtgatcattcatactagtatttctctgtcaggactactacaatctttcagtcgtctaaaatcattgatgaacagtgggtggaatgagatacctcatccatcttcatcaatcatatagaggacccctttagctaccaactaaatttgataacaagcgtgatatgatacgcaatgcaaaattactgctagtaattaatgtgcagttattgtacaaagaaaaggatttgcaagaagaacacacctcttctccttgcaccaaacacatgactgtcctgatcagacaccctcatgcgccaacctgcaatttgtttagatacctgtaacagctggtacagtcaggcaaacgtgattgtgaaagagccattactggctctggtaagcatgataaaataatgattaagaaattccctcagcagtaggcaagatctgatgtttgtctccatctttactttccagtggttttctatctttcctggcaggaatcatgatgtggcattcatttgattctatcacataaagttaaaaggcactcgctcaccctgtctggtagattattattctccaagtagtacatttcagtgtggactcctgcttcacttctactaaaatgtgatcttttgcttaatcaccacggcttgacaatgactaccaaacaggtgtaggttaatgtgggaaggtaataactaatcagatagggtaagaactttgcagaatgcctagagataagaatatatactagtatcatacaagtgaagatcattagtaattaggtttttggacaagaactgcagatgcaccaagcaacaccacatggggggaaaatgtaggtgtgcagtggcaaatagcaatagcaattagtagcaaaattatcaaggacaggacacaaggtgcccccctcaataatcaccaagcatgttcaatcaaacaaacaaaagacctgtctgcaaccagctaggctggcacatgatgaagcacagttctttctctctgcatcagaagcttcccccacccacatctacatccacatgcaccagcacccatgtgatccctaacaagaccagatcagtgttgttcatggtaggtcaggactcctcaaacagcttgattgattccttcgacacgctaatgctaattaacgaacaggcaagcagtgatcaattcttctagtattgtgaggccagtcaaaattgcagtatggtccaagcatatcatacctgtagttttttcataatcaatactgtatgtatataaatcaccagtgcacatgggagccatcgcattgaccagctagatcatcactaaattaatcaacatttagccaagatgcatcgagattgcagcaataccgttaaggacaggagagatggacactttgacatcctttggctcgtttagttatttggtgaaatcaagatgatagtagtatgcaatttaatagtctcacgaatttctttatatctgtgggtggtttcacttctcgatgcatcaaactatgcatttggccgtttgcaacggcatgtcttctccctcctttgcttggacgttgggtcatctataagatgcatatgacaaaacaaaaattaatctactatgctaagtattaaactaatcgtgctcttgctagccaagagaacagaaaaggcaatcacaaaagggaaaaagaaaaggcaaggttcacgcatgctgcatgagacgatgtgtacaattaacctcctgagcaaggaagaacacagagatatacagggcacctgcaaatctacaagagctttgtgcccttatcactgaaagtgatatgcttattgctacctctccagagaaagctgcatcacagtcttcatggtggtgtggtgtggtccatcatctcttgatgttgccattttcacaagtcatgcataaccatgagcagagcagcaattgaattggtgtgtttgataaatgcatttcatttcacagcatgcaggtccagtctgactgactggtatagtactatactgtagtatagtatgccagtatggccagatgtgtgtagacatatgccattgttggatgtaccactactagtacagtagtacaagaattcagcaaaatctagcaaagatgacaaaaggtctcccgagctagcaagtcatgcgtgtggcatttgcatcttgtctccttgtcaattgccatttatgaatatctcattgatgtgggtagtgaagtagtatccttgtaaacaatggatatgattttactgttttaccattggaatggcatctaggattattttccaagtaactcaagcaagaatagaacttcacacatgaatgacactaccaaagaaaagcaggaaatatcccacacttcagtgaaccatcagcaaactaattggtgtagaatagatatactgggagtttaactgagcttcctgaaccaaaggcgagatattcagagtaagaaaaaaataaaaaaaaaacatgaaaattctatagtcttaaaaattaaatttatacctatcaaagaagttcaactaagcacaaccaaatctgcacaaggcataacctaagtcaagattacaaataaatgggactaaatacaggttacttacttcatttgccctcattcatcacactcgctgacaagtggcaaagactattgatattgtcagaatagtcaggcaattgaagattttaggctgaatcaggtgggagctttttctccaggatggcaggatgtgctgctgccagtacagcggctgtgaccacacacacagacacactgcaccttgagcaagcacctcgtgactctgcaacctgcacttaacattaagcatacagactcatcaggcgcctcctgctgcattcattcatcactagtacaaagacaagcaatctacatgtaaacttacataccttcctgtcttcaattatgggttcttgctccatccatccaaggccaaacagctgcaagcatgtatcatgtatctgaggagttaaacatgcactatcaaacagtgtagataatgatttaggaagcatgaacagagacatgttttgatcctggagcgatgagttggcctgatggtccatacagcatcttggcgataattggtatccatgttttcaatgtctcacagaaagatatcaggttttgcatgaacctgcaaatcctgaggcacaattcctgctaatcaaatcgataaaaattaccatcatcacgatcaataggttcagaggttatcctttttgtcctgcacaaaaggtcactctcgaatattgctgaaaaggcctaccacagttggacgtttcagagcaacgtacaacttctttggacaaaccaatcacattcaaaatgataatattttgttctgttcctggccagaattgaggttaccagagagttcaatgattgttacaagattacagcactttgtgcaagggagaaaggttacagcttgaaacattcttacaagttacaacaaatagttcaccaaaattttccaatgggaactaacaattacaaccctgttacccttgatgccgggaaactaaatgattcagtgtacgtgcgactgaaatacaggcaaacaggtattacgttcttccatctcatcactagttcagaacaggaagggaccaaaacaacaagctatcaaaactgggcaattgccccattgtctaaggctctacggaactagtacaaaagtagctacaggtaggtgtgtcaagcgagcaaacagaaccaggggtcaaaaacttcatgcccatgcaaatgctcaatgcttagcagactgaaccaaacggggccatcaggcaaagggcttctccagtttatcaagtattttcacatagaaattccaatgtcgatcactctttgtaatggaaggttgaccgaatgggtgctcctgtacatagcgctgaacatcatctgcagtagcaaggttctccagatacacccgaagatctccacctggtcctgctcatggaaaattggcatcaacactaaccattttggagcaccaattataagaaataaatacttaaatagatcttgaaataatggagcatacccaatgaatcatctttcttgttaagatagctgtaggggtgaggaaaaatggcagtgtgtggctgcaaaatacatatatcaggagaagaataatgcgtgcgaattacaacaacttgatcttatcacaacagatataaattgcataggaacaggggtgaagtcagtaccggattgcccaaaaccttgtaaggggaatcatccacaagtaatgtatttgaaggtgaaaactcttcttgctcccatggaagatcaggatcctctttattccacagtttctttagctccttcagtactaatggtttgtttttgttttcaagagttttaaacccagtaccagtgcatttcgacatgtcctggcaaattatagtgtgtgcattaggacctgacttgcaaccaaagctacagaaaaagaaaagaaacaagagtactaaaacaaaaaaaaaatacagtagcataaaatttggagtttttcaacaaccacttggccttctttcaattactagctaggcagaaaccatgaatttagttgtaggctgtagcaactatgcatacttttctgcaacttacccaacagaataatagggactgtttcatatccttcttcataatgatatttacaaccgaatccacatttgctctgcagaataagaatgttgtcattaacaccatgcaagaaactctagcaaaaacaagagatgtaggggagaggaattagtacttcaatctcgatgaccatatccctagctcaaagttctcgaagcaaaatctcagaaaatcatcacagtagggtcttgtgaagactggcacacaaacgataagccattgcaaattagtatattgtatttgatatgttggtcctttatttacagagaacactagtatgtgtacaaatataattgtgtatcaagtattaaataagcaaccttacctaattttccccgaacctttgcatgtgacaggtgagcattgtggtggtcctgattgatatccgcaagcaaaccattaatatctagaataagaagttttttccttcgaaatcttatcaatgatcctcttggtgagtagatgtgccgaaaattctctttgtgtgcctgagctatatttgatctatcgctccttgcactttggcaatcggataagacagcttgaacttcacattcaccatccatcactccaaccgaagcagtctcacccaaatccatcctttgcaccgagggtgcctcaggaacacttgtttgatttctcttcatctttttgtttgatttcttgcattcagagcctagagaaatatttccatcagctgtcatcaccaatccaacctcgtcagcaacaggttgcgaaggattcttgcatttagagccaggagtattattcatgtcagctgttgccaccgagacaacctcaccagcaccaggtagcaaagaaggattctgcacattgctccttctattggcattttccttctttctcctccgcctatctctattctttctcctttttctttctatagaactctcatgcaacgagctgcagagctgggagttattatccttattccctttctttcctgccaccaaatcttcagcactgtttacctcaggacattttggttcttgcccatctctgggaatcgcaacaacatcagcatcttgtaatgcaccttccccacccctgcaaccacctccagattcattggccaaatctgtgtccatcacaacagcactggcatcagatacagcagaaggggattgcttcttttgtttttttgactttgatttcttcccttttggtgccgccccctccactgcagaagcctcaaagaaaatactgataagaatgattaattttttagacgcaatttgaactaagactacattcagaattcatgaggacatggtcagcaagttggtgaaatgcaattagaatcaaggcatcagggtgctgtgtagatgcaacatttttcttttgaaaaaaatgtgtgcagatggtatatcagttcatgaaagaactctgaactcacaaaggctcgttaaatcaatggcatcagaggcaagaaatcaagaattggactctcaaatagccgcttaaccctaggtggccatcagcaaaagccctgggcacgcgcacagctgttgcaacctacagcaaggggggaacggtccatacctgaagcagaggcgccaggagcctcctgctcatccacctccttatccccctccggaaccgcaagcgtggagatggcaccgccacgccgctgtttcaatgtcttgctctttcccggcgttcgatccatttctggtgttggatcatgcccactactcgcaacaacatcatcagctcgtaatgcgccttccccactcgtgcaaccatttccaggttcattagacaaatctgtatccgtcacaacagcactggcatcggatacagcagaaggagattcctgctgcttatgcttcttccgtttcttgtcctttgatttcgtcccctttcgtgtcccctttcgtgtcccctccactgcagaaaattcaaagcaaatacgagaagcatgattaattctttctcaacgcaattaaaaccaataccttactcagaatttcaacatgtggagttgacgaaatgcaatttgaactatggaatcaggacgttatgcaaatgcagtatttttcttttgaaagaaatctgtacaatgcagtatcagttgaagaattgtactttcaaaggctcgtcgaatcaatggcatcagagggaagaaatcaagaattgggccctcaaatggccatgcatcgataagccctaatcctaggtgtcaaggccctagacttaggcaaaacccctaggcatgagcacagcttttacgacctacagcgaggaggatatggtccgaacctgaagagaagcagcaggagcctcccgctcgtccatctcctctgcctccggcgctgctgctgtggacgtggtggcatcgcattgccgtttcgacgccttgctcttccccagcgttcgatccacatccggtgttagatcattgccacttctggaactcgcaacatcagcatctcgtaatacaccttccccatgcgtgcaaccgtttccagattcattggccaaatctgtatccgtcacgacagcactggcatcggatacagcagatggggaaccctgctgcttatgcttctttcgtttcttgtcctttgatttcttccccttttgcgtcccctccactgcagaagtgtcaaagcaaatactgataagcacgattactgcttgctcaatgcaattcgaacaaatatccctattgagagtgtcattagggtgtgatgcgcaagtaggcgaaatgcaattagaattatggcatcagggcaatgtggaaatgaagtacttttttataggtgcaaatgcaatatcagttcaagaattgagctcgcaaagggttcatggaatcaatggcatgacaggaaagagatcaagaactgcgctctcaaatggatgcgcgtggttaaacctaggctgtaacaataggcaaaagccccaggcatactcacagccatagcaacctacagcgaggatgagatggtccgtacctgaagcagatgcagcaggagcctcccgcttgtccaccttctctgcctctagcgccggcgctgtggaggtggtggcaccttccccgctcgtgcaaccatttccagattcatcaggcaaat

SEQ ID NO: 23574 - DNA, 24185 bp, Oryza sativa
  unsure (1)..(24185): unsure at all n locations
ttcctgcagcccagaaggataaagataggatgaaaattcttaatcctagtactcgatagattttaacagtgtatatatacggaatttttttaatttgtgaaagtcacattccataaaacattttttagaaaaaaaaaagaaagcttggtgaatgtctttttaataagccaacaatgaataagtttttatggaactttaagggaattaaaatattttttataaattatttgtagagtaattgttacagtctaaatgcgctctatgttaaatacatagtatccgcgccgcctccaatttagccatactttaatgcatattggttagcttattttgcataaatggttgatcagccaaagcatttggctatccgatgaggccctgtaaatatacgtagtgcagagtaggcaaagagtttaatgttggttgtttcatagccattcgagttcaaggacaccccggtcagatcttcacgctaactttccaatcgctggttcttcctgcttgcgactatgttgcttttgcttccccggttctgatcgcttgcgcgcacgagagatcggaacaagcaaggcctctggaaccacaccttcgcctgagatctgcaccgggtaggcgggtgatcaggtttttggggagtgcttccgcacgactggtcctcttcctctgttgttcgccgtccgttcgtttgcatcaccatgactgctggagatggcacaaacggacctacagctggcacaccgatcgacaacaccaacggaggcagttctgcatcacaatccagcggagggactttcacagggtataactttctaccgctatctttgtttgtgttccttatgttagtcgcaataatattgcgttctctccgtgaagatgatgcttattctattctaagcatgctcctggttatgtttaattttatcactagatcatcttacattgttcataccaatatgctattgccgatatatgtctgtatttccaacagtatccgcgctgcctctaattcagctatactttaatgcatattggttagcttattttgcataaatggttgagcagccaaagcatttggctatccgatgaggccctataaatatacgtagtgcagagtaggcaaagagattaatgttagttgtttcatagccattcgagttcgaggatacacggagagtcgatcatgtcagcttcagagaagagcagcaagaagcaaaaaatgctgagaaaagaaaaacaaatgaaatggacataaaaagcagaactgatgcagaaaatgctgagaaatggcaacagaagaaaaaaagaacgccgttgccggggatcgaacccggatcacccgcgtgacaggcgggaatactcaccactatactacaacgaccttgcttgctttctttttatgtttctttttaaagatgttaaaagtgtccaactaaattaggtacagcatgggggaaaagccgctaccatctttaatatgtgaggattacattttataaaactatcattaaactaaaaatttaaagtatcatatcacaaaattgtagatttactgataaagctatcaaaaactacatatcttaactctattgctttttaaaagttacaaaatctgcaattttgtgataaaattgataaatttgtagttttatgatgagatgcctcaaatctatagttttataaaaatatggtgctaaatttgtagtttttttaattaatacacatccttatatatatatatatatatatatatatatatatatatatatatatatatatatatatatatatatatatatatatatataaaatctttcacaacgaggtcagcctacctagcacaattcgatgatcaagaagctgacgcagtggtcaaaacaaatttagaagacctgggctccatcaaaatacaaaatgtttacatggttacttaattatgaaaaataggatcgggatatctgaccgactataacgaagagagtagctgaaaaatattacttctctcagctttgccatcgcttcaagaactgcccagcatcacaagaaaatatatggcaagcagtggcgccaaaactgcacaatgatcaagttaacactaaccattacgccaatgataccttgcttgagcaatgacagatgcacagtgcacacgccaggacagcaggggaaagtcaaaagcattgtgaggatgacaccaatcctggtggcttgggaaatttgaagcgaatgcaacaggataatcttcagcaagaaacaaatagaggcgtctgaaattgctggcggaataacagaagaaattatcactagggctatgtgtgacaatattggattgaggtggtgtttgggtccagggactaaactttagtccatgtcatatcggatgaatttggagtattaaacatagactaaatataaaactaattacataaataagagctaattcgcgtgacaaattttttaagcctaattaatctataattagcacatgtttaatgtagcatcacataagctaatcatggattaattaggttcaatagattcgtctcgcgaattagtccaagattatggatgggttttattaataatctacgtttaatatttataattagtgtccaaacatccgatgtgatagggacttgacctaaacttttaagtccctatcattccaattccattcgtgatacgtgcgagcgaactcattcctctgtgatagcaaagcaagcagagtactccagatttactttcactttactctttttctttaattctgttggaaaggaaaaaaaaagacttattccatataaactgtgtaagttagaagcatgtcgatcgtggatcgctagatcaaatgcacactatatatatatactgctgctaccattcattcagcaattaacaaattattgcagcagcaagtcaagtgtgtactgcatccacgacacatatgcattatcgatcgtagcacaggtgcgacatttcaatcactcaacctctaattattccttcctattgagtagctttgctatatagctcgcataactctcttaaagatatattcattcgtttcttgcatattttctaaatagctaatgtacaaaaagtttaagaaaaaaataacaagataaattaatgtataacatatcagcttcataaacataaaaattcaacttcggcttttactgttgcaaataaattaagctgatgtagctcgtatgtgtatatttatagtcatatttaatttgtttgttttgtgcaaattatataaattaaatttaaatttgtatgtttgtgtgataatatatcacatattaatctatctcatcaagtttttatagtttcttttataagtatttagacgacacgaaaaaaatatagtagtttcctgcgtatgtatgttgttgggaataaatcccatgttagttaattaaggggagttaaaccaacttaaatataaaaggagtccctcacctcttgccttttttttaacaaattagtccttttcagcgctaaaaatattggcgctaagctctaatccgagatggcatgaattcgctgagttatcgtagctcagcaccaaataacttggcgctgaggtcccgacgagttaaattaatgcggagggatttctagcaatgtccgactgatagcacaatggttgtagagttctactctaatctaggattaagcagggtttgattcccatctgtcctattttttttctttttagttttcctttttcttctctctctcactctttattaatatgttttttttttatttttgttctctcgttttatttttctatctttatttttctttttttttctcgtaatactatcttcaaaatatattttttttgaatttagaaaaaaaaatattaaagtggcatattatatagcaaatgagaacttaaactgaaattccaaatcaaattcaaaataaaacaaattatagaaatttgaaaagaataagagtaagtagtcaagagaacaaaacttattttgtaaaacatattaattctaaaagaatgctaggaggaagagaaaacatattaattctaaaagaatgctaggaggaagagaaaaggaaaaaacccaaaaatacaaaagaaaataggagaggagggataccaggattccaacctagcaccctagggctcacagcctaagccatcaaccacctgctataacggttttgcttccatatgttgcctgcgcaactatttaaatcgtcgcgatttatttggcgctgagctatgatgactcagcaaattcgtgccaccttggattagagcttagcgccaataaagttggcgctgacacgttatatctcagcgccaaggtctatggcgctaagtccacggcctatttttttgttgaagtttttttctgggactagtttcgaaataagtttttgaaaataatcaatttgttaaaaaaaaggcacctcttgagctagtttttttaaggtgtagtaaggcttcctccagattttttttggggcaaacatatgtatgtgcacaacaatcaataatgccaataattaatgcaggtgtgttcttccgttcttctcttgtttaccatataagggcatgtacaaaggtagagtcagatataagctctagttatctagagactagcatcctacaacagttataaataaaatggtctctaatcattaatgtatccaaatacgttttcttacttttctttcctttctttcaccaccatgcaacaaaatttgctctaataaattctaagagtcgactctgagccgttgtcatgaataacaaccatactcctttctctttcatccatgtcatcaaatttacttgcatggtaatagagagaccactaataaacaccgttgtacatgccctaagagtatatactcccatccataatcatgaattcatgatatctgtcttagttaatttaatttaatttatgttgggtggacgtggatgcgcatgatgagcgctataggcagctgagcacaagatcgatcgatcgatcgaaataattaaaaggaaggaagggatctagtggccggtggatgggtttcaatccgccggtgccgcagaaggacagcgagtgggagatccgggtggctgtgctgctcagcctcctccttcaggtcatcctcatcttcgtggggcccatgcgcaagcgcacctcccaccctgtcccgtgcttcgccatctgggcatgctacctcctcgccgactgggtcgccgacctcgccctcggcctcctcctcaacaacctcggcaacatcggcagcagcagcagccacctctctgccggtgccggcggcggcccgcccatcttcgccttctggacgccgttcctcctgctccacctgggcggccccgacaccatgaccgcctactccgtcgacgacaacgagctctggcgccgccacctcattggcttgctcttcgagctcttctccgccttggtcgtcttctcctgctccatcaggagcaaccccatgatcccggccaccgccctcatcttcgtcgtcggcgtcatcaagtacggcgagcgcacctactcgctctactccggcagtgtggacggtgtcatcgccaaaatcttccgggcccctgatcctggccctaactacgccaagctcatgaccgtgtttggcggcaagcggaatggcggccttctcgtcgagatcaccattgccaacggcgaggccagcaaggccaaggaggtgttgcagcagggcagtgaggttcggctggtggagacgaccaaaagcctggaggcaatagcgtacgagttcttcaccatgttccgggtgctgtacgtcgacatcaacctcagctacaaggagaggaggatcagccaggcctacttcctggaccgccgcgacatgacggcggacaaggcgttcgaggtgatggagatagagctcaactacctctacgacatggtgtacaccaaggcgcccgtgtcccacagctcggcaggctgcgtcctccgcttcatctgcaccacctgcctcgtcgtcgccatcgtcctcttcgtgctcctggacaagaccggcatcctccccgtggaccgtggcatcacctacgcgctgctgctcggcgggctggcgctcgacgtggccgccatcctcatgctcctctgctccaaccggatgatcgtcttcctcgaagccaagcacatggcgtggctttcccgggtggccagggccgtgcggctgcagccaaggcggtggtcggagcggacctcgcagctgaacttcatctgctactgcctaggcaagcccaaggagcaggagggtcgccgccgccagtgctgcaggcggaagacgatcccgccgagtgtgatgcggttcctcatctgggtcgccaacaaggtgggcgtcagggagaccttggacgacttcttctttatccagcgcaagccggtgacgatggtgagcgtcatcgggaggcggggacgatggtgcaactgcaaggagggngatgagagggcgccgacgaccatcgatgcccttgcgtatgtcttcgttggtctccagagggaggccataaaattcagggactccgaggactactacttgaagaagctgcgcggctaccgcggcgaggggaccctattggatgacgagggcctcttccgaaacatcaagatggagctgaccaaggcaacacgagaggagctcaaccttaggcttacggaggaggagagctcgagctcaacaaccaagaagaaggaggccgaggagattacacatgacgtcctgcagctggccgacaagaagaagaaggagatagacgacttggtgaaggagaagctggatggcgtcctgcggaacagcatcgggagggagttcgacgagtcgctgctgctatggcacatcgccactgacctatgctgtcaccgagagcgggaagggcctcggatgctcgacaccatcggcttgatgtccatcagcgagaccctgtcggagtacatgctctacctcctcgtcaggcaaccggagatgctgtcggccaccgccggcatcggcctactccgctaccgggacacgtgcgccgaggcgcgccgcttcttcaagtcggcggaggcgtgggaccccaaccacgacgacgcccgccggatgctgctttccgtcaacacgtccaagaagccggccgatgtgaagggcgaccggagcaagtcggtgctgttcgacgcctgcatcctggccaaggtgctccgggagctggacgacgacaccatgtggagggtggtggccggagtgtggagggagatgctgacttacgcggccggcaagtgccaggggagcacacacgtgcgccagctcagccgtggcggcgagctcatcaccatggcatggttcctcatggcgcacatggggataggcgacgtgtatcggatcggcgagctggccggtgactccaaggccaagctcatcatccatgatcaatagctagctagccatactcaatagctcatcgacgtccaatcttcaccaagaaataatatagacacgtacctcaaattgctagcagaataagagcataaattattaattactagggcaatgtgcggagcaaaagatttagcgagaatattgagctgattaagactattggtactatgcatagtacgtgttttccttaagtgtaaatattgctgcctgcccctacttaatatagcaccagcaattgttgtcttggattcaaaaaaaaagtatatgtagttttgtgaaagattgaataaagtatgagtagtttgtgaaatttactcataaattcactagggctatgtgtgtggagcgaaagatttagcgagaatataatattggattgattgagacagttggccgcgctatccaagcatagtgcagctcaccttggtattatagtgttttccttgagtttctgcctacaagccttgcttgcactttaatttgtaatatattgctgcccctatttaatatagcaccagcaattgttagcttggattaaaaatatatatatatatatatatgtagttttgtgaaagattgattaaagtatatatatatatatatatatatatatatatatatatatatatatgtagtttgtgaaatttactcatatataattaagttattaaattatttgtgtttttctatgtttaaatggagcttgttaattagtttataaagtgatgtatgacaccaaaatatatgtggtcaaatgtttgtctattttgttttcaaaaatattttgatggcgtgcatgaaaacagagccctagctcaagcctctgaaaaggggtggcacaacattttgtagcgaacacgattgaatagcatctgtgtggtgtactcaactatgtaggccaaaaaagaaagacatctcaaacaaaaagtgaaaaaaaagactgaagcaaccaaaaggtacttcctccgtttcaggttaattatgagatgttttaactttggtcaacgtcaaactgcttcaagttttactatagacaatttaagtaatatttacattaccaaattacttttattaaattagtaattaaatatattttttataataaatttatcttaagtcaaaaagattactatttttttttctataaacttggttaaatttgaagcagtttgacttctttgaccaaagtcaaaaatatcttatattataacctgaaacggtgggagtacttacgtaggcctctctgtgatgtgagtgtgatatgcaaattagcctacgtacgtgcgacatgcataacatacacgcattgcatttgcatgcatgctacatagctatcgcttgcatttcactccacgaatgagtatatttcctgtgcaaaagagtacttgaagttataccttacgaatgggtaacaaagacaattactgagtcacatatcaatgcacaagcaaacaatatcaaatttaattaacatagagagaaaaaacataataaatcattctttttcaaaacatagtacaagtattaattatgcactcctatacacttacgcacacccactaatataatataaacatacacgtacaccatacacctccgaagaccttcgatatatctgagatagataaaatcatcaacacaagtgtcgacgtttgatgtcgcgattccggtatttacatagtatggggatcgttggtactaggatatacgcgggactgaggtaaaagagacggaggcgaggatttttatacatgttcgggccactgaattgtcgggtaataaccctacatcctgttggccgaagccggtcgttgctcttattcaccataatcacacaagtacaatatttagggtagcctatctaactattgtcgacatagcggtctgaaggtctgactcgtagtcgacaacagggtagtcttcctcctcgagttcgtgcccgacgagatcagagatagtgctttcatctctcctgacagtatccggagacaccgtaggggactagccgtgcctatctctgaagtcgatatccggcgtcttgtcttggcgtatgtaggcttgtattggcttatggctttgtggcatctatgttgtccgtagattgtggtgggtgttgattgtattggttctccccctctcctcctaggggccttgtatttatacccatagatgtcctcttgtccaagtagaactagggaaaccaatatggatacaatccgagtagtccttgtcgttttcatgtataactctggttgtctttccttatccggaactcatcctatatccgcagtttgtttccatataggacatggtatgtggtgggtcctgccgagatttagtcaactactattaggtatgtggtatccataaccctgacagtagcccccgacttcaatgcaaatgaacaaattcatattctcaaccgcagaccttggagtaactgttatcgagctcacgtgaccgttctcggtgagttcagagataacgttagacttcctttattagcctcgtgcgggcacctaaagggtttgtctgagtcaaatctccgtcgtcaaccaaaaaagtatagagcatacgactaagtctcccatcttgctgtaatcgagaatttagattgaagtcaagaaattttatctcggcgggtacaccatctcttcattccgtaatccttgtcgagatccactaaccgttctcgagtgatcgagaaggcgcagaatctgcgacggagccttgtcaacatttgttgtactcgccttagtcgatcttggtgtagaaccatagagacatgaagtcttcaacaatgtcgaatagaattttcctgaaatcaatactcagaaaaaaatattagatagaaatagcccccgagcgaatgctcaaagggtgacatgttataatatgtatgaaaaattgaaaatgaattaaacttacagaccaatgttttgtatatgagcgtcttctcttttaccgacttcgatcagtcagtttgttgagtcatacactctccttagcccctagccttgtcgtcggagaatcgttctcggaggataaggctcttagaccttcgacctgcctcggttgaataagcactgatcctaacccccagccgtgaagttggaaagtccatttccaattacacggcttggttaatacgcatggcgagaactcttacacgaccagatcttacatggtctttcgtctctacaggatccgacaaggccttatccgctctgggcgtccccagccgaagttcccttaggttcctcaaaggccttgtcaggacggcgtaaagggacatgaggatatgtttcaactataggtgccgtcgtggtaagggatctctgggtaaaacacttggcgatattgtgtaccagataccaactttgttgaggtacaggtagtgggagaatcgctgcacctctggtcaaggactaggtagtagtcataactcgatcacttgaagtagaaatagtgggagattgctacggtttactggttcgagaaccaacgcgtagaattatctctcgagcaccaacggaagtcacggtgtgagggattgctacgggtttgctggttcgaggaccagcgcgtagaattatctctctagcaccaacggaagtcgcggtgtgagggattgctacaggtttgctggttcgaggaccagcgcgtagaattatctctcgagcaccaacggaagtcgcggtgtgagggattgctacgggtttgctggttcgaggaccagcgcgtagaattatctctcgagcaccaacggaagtcgcggtgtgagagattgctacgggtttgctggttcgagaaccagcgcgtagaattatctctcgagcaccaatggaagtcgcggtgtgagagattgctacgggtttacgggtttactggttcgaggaccagcacgtagaattatccctctagcaccaatggaagtcgcggtgtgagagattgctacgggtttgctggttcgaggaccagcgcgtagaattatctttctagcaccaatggaagtcgcggtgtgagagattgctacgggtttgctggtttggggaccagcgcgtagaattatctctcgagcaccaatggaagttgctagagttggtttattacatgtgtatctcatgtggccagcatgactcacatacccaactcgtagcatatccggatgtccgtccgcgatcatgtcgggtgatcaagccgacatcgttcgcgagcaattatcctttaacagccttttcccgagtagtccagccatggccggtgctatgagataggttgtcggtcttcgttggtaggttgggagcgacgactatgcatttgtcaagaacgttctcgacaatacggtgtactcgaccacatcctactcgagtgctcaattgttcctgaaaaatattgtctagaaggcaagacatatagcagataatatcgagtatgtactcaaaaaactgcatggatcttctagtactatctggatgtaacgagcagatgtaaatatcaggcattatatagaccggaaacaagcatgatttatacagaagaaaatagagcgagcccccagtgttagaccgtagtcgatttaacatcggggacactcgcgcaacagatattgtataaaaaaacatgctctaggtaaacataacagattatagatctgacaattctgtatgatctgaataggtacgataaattgcatataaaatattgcgtacctttgtagatacataccggatgtatctacgaaattagtagattaatttaaaaaaacaatctaccaattaccttgtagcgtactcgttcgacatcacatgatctgacatcttttggtacgccgcgtatcttgaggctcggtcgatctcgagagatcgagttgttgatgacgatggttccgatctcgtcgagagacatccccacggcgaagttgtcgagtagcttattgtcggagaatccatcttttgaacccatcttgtcaaaatcctgaagcaccaaaatccccctacctggcacgccactgtcgacgtttgatgtcgcaattccggtatttgcatagtatggggatcgttggtactaggatatacgcgagactgaggtaaaagagacggaggcgaggatttttatacatgttcgggccactgaattgtcaggtaataaccctatatcctgttggccgaagccggtcgttgctcttattcaccataatcacacaagtacaatatttgaggtagcctatctaactgttgtcgacatggcggtctgaaggtctgactcgtagtcgacaacagggtagtcttcctcctcgagttcgtgcccgacgagatcagagatagtgctttcgtctctcctgacagtatccgaagacaccataggagactagccgtgcctatctctgaagtcgatatccagcgtcttgtcttggcgtatgtaggcttgtattggcttacggctttgtggcatctatgttgtccgtagattggggtgggtgttgattgtattggggcttccccttttcttcctaggggccttgtatttatacccataaatgtcctcttgtccaagtagaagtagggaaaccaatatggatacaatccgagtagtctttgtcgttttcatgtagaactctggttgtctttctttatccggaactcatcctatatccgcaggttgtttccgtataggacatggtacgtggtgggtcctgccgagatttagtcaactactattaggtatgtggtatccataactctgacaacaagtatctcatagtcgacagatccaagtctaccacttacaaaataattagccgtaaatatgatcacacctataaatccaatatttagatcacatccgtacaacaaataaggatgcattctcaaaggctcgaattctaattaaaaaaaattgaaggtagaggcgtccctacattttttaagaataaattgcaagcgtgttggggattgaacatggaatgaaaccgcacacaaattccaattccattcgtggccaggctcgacggcaacggcccacgggatctagagttggcgacccacctcttcgtcgacctccgtccaccctcccgccggcgatggaggatggacacgacaatggcttcgtggagctcgattttcatttctttttcaaaatctggatccgatttctattttttttaatccaaaaaatgttttcactggcggttgtctttatcttgccgcggttatcttagcatgcctcctgttaaactcgattttcgctagcagctagctggccgctagtaaaaaaacattattttcactggcctttggtcattggcggtgccgttggccgctagtgaaaatccattttagccgtcagcgaaaatgattttttagtattgggtgagaaaatatctgtttgggtgtgagcatgagctcaccgatttttaaaatattgtgtcacgtaagattaaaaccactttgattgaaaagggggtaattcgtctggtttgaagagtttaatttaaggtgtaacatgtttggtatttgtattgaaaggggtattttaggctgttgtttgcttaagacaagtatcatcatgttgtttgcttactagatgtttatcttttgaggaggacatgtgcatggctgtcgatccaacgatcatcaaattcaaaagtcataagcatgatggtttcaaagggtcttgtcaacatggatcaacctttaagagcactcatagtggctagaccatctgacagctgctgcatgccctttaccgagcagggaatccatccaacttcgattctcatgtgctccttgccttttgctgctagctactccctccgtccaatatatctctagtcgtaggttgctatattctgggacggagggagtatctatctctctcatccgtcctaagaggatatcacagatagatcgatgagcattcaagtttacaacggataagtctgttatccaaagtacatactctccccgtctaaaaaaaagacaaaccctgagtttccgtgtccaacgtttgaccgtccgttttatttgaaaaaattatgaaaaaaaattaaaaagacaagtcacgcataaaatattaatcatattttatcatgtaacaacaatgaaaatactaattataaaaaatttcatataagacggacagtcaaatgttggacacggaaacctatgatttatctttttttttaacggagggagtatatatgctgttttgatctgttcgcgatgaaaatactacttatgatgctgaaagaattacatgtttccctagtcatgtttgttgtcctggtcgtgatataaaagacaagtaagagaaaaaaaagttccttacatacgtaaccatgcattgatacatgtcattggatttcttctatattaattcctaagaaggaagaagataagggagggtgaaagaaagaagatgaacttgatggggtgggtctcatgtatagatggtaaaaaaaaatgaaaaacgtgacggcgatgatatgggtttaattttgcaaattttgatatttatctgaatagttatatttgcaatgatacggatcaaattaaccaattaacaaaaggagagaaaaggtcgtccaaaacctccgttaaaatagtccgacaacaccaccaccattaactaaaggagagggcaaagtcgtccataaccttcgctacaatagtccaacaataggtattgtcaacaaccgtatagagcatttcaactacaagtattatagaactagagtgagttctgaagatgttacaaaattgctatgttttgacttcttttttcagcccttgattaaagctaatttttttttacagttatacttccatatgcaaaatccgattaagcaccctttgatcaatgttgcttaggtatgaccatacttactacttccatatccaaaatatatgatataccgttcgactttattaaaggacgataatcctaccatatgaattttatgttttgcaaactaaatattgatgaataatgttttaaaattttgacataataaagtcaacaacaccatatatttgaatacggaggaagtatttacaatgtcatatactcctatttatgaacgatgacagtatttttactacaaaaggagtgacatataacatattttcctctgtttcaattgacaagctggtgtgcaagttgcatagtgggagccaaaatatattcgcgtgtcccctgtgtgtagagatatggcatgaataatgagcgaaaggaatgtatatatagttggtggtacggtgtacgtaggtagggatcgatcgtgtccattgctggaatataatctcattatcaatcaactcgaggttcttcttcttcttttttttttacacatctcgatcccgattctgcggtgagctatatatattttttcacttgcgtggattacaaattattattcttccttcttcaattatccacggtccatgcgtgcgtacgtatacggccataattatgtactcccttcgtattttaatgtacgacgccgttgactattttaacaaacgtttgacctttcgttttattaaaaaaaaattatgtaattatatttattttattgtgacttgatttatcatgaaatgttctttacgcatgacataagtatttttatatttatataaaatttttgaataagacgagtggtcaaacgttggttaaaaagtcaacggcgtcatatattaaaatatggagggagtatcagctaagtacatataattaattaattagtacgtatatttgtacctatgtgtttgacttattagactggcttggtagagtatagtgcgcaagtttggcgaggaaattttcctggttattaattaggggaaccaaacctattcccttggccctaattggacctactagctagcaaacatatccgcgtacaaattaaatatccgagagaatggtttttttttctctctctcccgatatgtcagtgtcaagagaagagttatagacgtacaaagcatctaattaatttcccgataaatgttaaggggaaattaacaaaagccgcaccattgatcttgagcagtgttgtctttatcaagagagatacacacaagtacgtcaagctagcaaagatacctaattgagaaatgccatacggccataccgtaccattgatcctgagagttctgtcttcatccctaaatatttgacaccattagtttttttaaacatgtttgaccattcgtcttattccaaaacttttgtgaatatatattattaaaaacttgagtagtgtagtatatttaataataaattaaatgataggaaagaaaattaataattacttaaattttttaaataagatgaatgattaaatatgtttaaaaatttcaacgacgttaaatatttagagacggagggagtacgcagcgaagatcttgaatagtcctaattaactagtcactttcattgcagaattaacggaagggaaaggatatgcggaactgcagacagagaattttacacaaaacacctttttctgaaattgtatcgatagagatgctcatatacacgtgcaagcactataattatctgtcaatgtatacccgctagcttatcctaaatatacacctttaaaaatcttattcgtccaacatattttgagatcgatggaattattacaaattgccttggcttgtacttgaagtgattaggtaaactttttgtccaaaacaacaacaataattagagaactagctagtacacccatccaaaaggagagcgacactattattgcccatgaacacaaaatgaatatatggacgatgtcattttccaaagttgtgagttttttccatggcatatattgaagcgatgtcccatcgtctcgtggtggtattttaatttcaagctcgatgagatatattattggattaatgcgattattacatccacttttttctcctaaaaagggcaaatctttttgaaagatttaaagcaaacatatatattgaagttgattaatttcgtacagctagtctagctaagcatctgctatatatcattttgtcctaacaagcgaataactgaagagatgtgctagtgcactatacatatgatgtccttttctattctgtacaagattctgtttctaccttgggctttctctaaaaagccggatcaaagaaatgatatactccaagggtattgctagctctgtattgagagattatattgctcatgtaaatatatcctcgtgttgtttttctctttttcttacagctatttttctgccttgtaactccaatgattggatctaaggccttgtttagttaggaaaaattttagagtttcgttgtcacatcggatatacggatacacatttaaagtattaaatatagtctaataacaaaataaattacagattccgtcaggaaactactagacgaatgtattaagcctaattaatatgtcattagcaaatatttactgtaacaccacattgtcaaatcatggcgcaattaattttagaagatttgtctcgcaatttacatgcaaatttatgtaagtgggttttttcctacatttaataccctatacatgtgtccaaacattcgatacgtcagcgtgaattttttttaactaaacagggcctaataaaaaacagaaaaaaaaagggaggaaaaaaaaacaaaaccgttgcatcaagagtgaagagccctatagtgctagttgtggatggagtcgacagagtacactagcggtagttggctttgttggctccatttactacaactagtcttccaataggccaatgtatatatgcagacaaaagaagctgtggtgggccggctagctactcatcatcatagacaacacatccataaataagctacagtagtgcgttatggtctccacctgtgactgatttgagaaagatgctacaaacaacaataataatttcaattaagttaggagtagctagcaaacccgtgcattattattaattcatgcatgtccaagtccaaccatggagtagaaccaagggaaatgtggtgacacgtttcactacttttggcaaataattatatttctagcatgaactagcactagcggtatatatgtatgtagctgtcatgcattgccatgaaaaatacatgcatatttatatggaggactactatacaaataagtatatcatatttccaaagagaatctatatggatcggcccaataaaggatagaagaaatccaggcccacacacagctagagcctagcatgcaatggccaatcgctgtcttttcctcctcctcgttgcccatcagattcccaagaattttcagattgtcctgttctatattttcccaaataagtttaagaaagatcgctccagacatgcagcaacaaatggagttatgaagtggttggattgggagaatagcactctagaaatacttatatttacaggataattttcaaatgctagaaatgcttacatagtttcaacttattgcacttatgtaatggaatctttacatatttcagttaaaaataaaaagaagctacaaaagctaactgctctcctttcaccagcttgaccatttagctgctccgactgtcccatacctgcacagtcctacgtcatcttgctcctagttttttccccttattatgctaacttacagcttttaattatctactctggttggttagcaataacctctttctaaatggaacttagcaataacattgtgcacgatgagcctcattttctttttgaaaaaagaagaagagagaattaactaccgtgcaccgtaatatcggatctatatatcctgctctagctcttattgttagcttagtgatgctacacatctatcgtccttaattgtttttttttctccatttcgttcactctaactccctaaggagtgggtatatatgtatggtgatggtggctagaagggctcaagggctgagaatggcggtaaatgtgacctgacgactatgccaatatacttcaatttagggctttctttgaaataaacactactgaaaaactgatctttcctgggtcgacccaaatataatctttagtcctggtttatcccctgtcagtagcctgtcaggagccgaggatcgggactaaagatcactactttagtgatcttgattatctttagtccaattgaatgcatggtatataatccctctcccttaccctctccaccacaaccggtcccctcacacttatcctctcctccacaaccggcctctcctctcctcagatcgatcccttcctcctcccctcccctatcctccgcccccctcctccccttcctcctcccatccccggctttctccccctccacccctcccatccggtgccagtagccggcggggccgcgcccgtggtgagtggcgagaggtggcaggtggcagccgctaccaacatcctttctctttttcttttgttttttttttacaatttgtgatttacttagatgtatagttttgtgattcgttgtatggatctgagatatataatctgtgatgtatttgatttgtgtgtaatttttttaagatttgtgatgtatttgatttgtgtgtataagtaacttaagatttgtgatgtgaatgttttgggatgttactttgatttgggatttggggtttgatttggggatatgcatcccactcgatttgggagaaaatacagggattaaactcctaaagaaacaatgaaaaaaaaaagaaaaaagagacttactgggactgtcgctaccctctttttagtcccggttggtactaaagatacattctctctagtcgcggcaaccgggattaaagatggatctttagtcccggttatttcaaccaggactaaagatgagcatctttagtcccggattcctagtcccggttgaaaaatcgggactaaaggggttaccaactgggactataaacggtttctccaccagtaaaaggaaattcataggaaattttgagggatcaaattctttgaaaaaaaattcctatagtatcctttggaacaaaggaacatgattgcaaaattcctatggattacttccctacacccacattccatagaaaatttaacatgagctgcatacagcatacctcatgttttattttcctataagtccccactgtaaattctatcttcctctctcttctctctctctcctccacaaagaatttcctgtaaaattcctgtgttacaattcccatgcaccatccaaagacatcacttatatttttaccctgttttaaaatcctagagcattgcgtagcatgtgacaaactatttttacattttaaaaatcatgtgttccaaaggagctagcacttatattttcctttgatggacggatatggctattgtaggcttctaaaatatattactactccctctattcatgattatatgcttgttttaatttaaataaacattaagactaaacttttaccattaacttctcctacaatatatttatagtatctacaaaattataaaactaatattgtacgaaattaccttaattaggtatgaatctaatggcacaaatcatatatatatatacaataatgcgcacttgaaatgctaaacagtgtatttttttctaaaactttctatatcaaagctattcttttaaatcaaataaaatcaattctttcaagtatatagtagttaatacttaattaataatgtgctaattatctatagtgttttccgagctggtgagtagctaaaccaatcagctccatagaactcacctaaatatacttacatgttacttcctctcttttatactattataagtcattttgacttttttctagttgattttttttaggtttgactaaatttaaagaaaaaaatagcaacatttccagcaccaaattagtttcactaaatatagcattgaatatattttaataatgtgttttttgaaaaatattgctatatttttctataaaaagtttgactagaaaaaaaatcaaaacgacttataataagaaatagagggagtaactagctaattattggtcaaaatctttcaagtatggctttctagaatcaaaatatatacaattccttccgtcctataatattgcaacatacgatcggataggacacattctagttcttcgaatctggacatttgattttatgttgctacattgtgggaccgagagagtgtgtacgcggtaaaagtgaacggagagagtatctcttgtgccgttaacgttgtgcgatattttttaagcatcactagcaagctactgaagtcctgaagctagctactctctagctgctaatggcagtagcaatatatagctggttagacatcactagcaagcgtcatgtcgcctcttgacagctttattttatcaattgacagctttattttctttgcttgatctcatcatattattgatgaaataaactaattaatgctattaatttcgtctttcaagtcaacatcaaaattaagaatccttcggaaagatcaccacacgggaaaagccatgcagtgcacattttgctctccgtccatataaaccaatagtatctacatatccttggaaatttctatagaataaaactaaacatgttgacttttcacttatttttcaacaataatatatttccccttccactatggtcgtcgcttgtacgtgactataataggtcctgttagaaacgctagaaatgttgagaagcaaatgatgaatagccaactggtgagaatctagaaaagtgtgtttttacttataactttatagagtagaaaaaatgcccgtgcattgcaacagtaaaaatatttttttatcctatacattatactcccttggttttggaccaaatgcttccttggttttggactgaacgctcattccttcttcattttcagctctagtcatagcccagtccgctgcctccctctgctcaacctacctctctttggctcagcgcgcccacaagtagagctgtaagcccaactcgaatagtcccgtgcctgtaccatgacggagcctatcctctcatcaaatccgataatccagtcgagctcgcatagtcctgtgcccgtaccatggcggagcctatccttccatcaattctgataatccgatcgagctagtcctgtgcccgtaccatgacggagccgatcctctccattcaaagggaatatgatgagagagtagtggggaatcggtttttgcaatcaattagaggaggaaacgcatggagagacaaatcgacgtggcggtggcgctagggttcagcccgacgaaaaaaccacgaaaaaaatagagacaaaagaaagaaacccgaaaaccggtgaaagaaaaaaaagagggaacagtgaaaagaaaagaaaaaaaaggaaaacggtgaaaaataaaataaaacggaaaaagatgggaaaaaagaaaaacaggcgaaaattataggtggaagcatatgtattttttattaggtatagatttctagattctatagcttttgatccttgtaatctagatgaaaagcttacgggcctctttgatttagaggataaacataggaattttggagaattttaatcctatataaaaaaattatataaatacatttgaaacaaaagattgaatcctatcatatcctatcctattaaagtcctatggaatgaacaattctacagagattttggcggaaatttagcaagagcttcaacctcttggaaattttcctttgagtctatctctcttatccgattcgtactttttcctatggtttaatcaaatggttatttctaagatttcctgtgttttacaatcctctgttatgcacgaactccaagaagttatgtgttataaggttcacatcctctgttagtagttgactgtactattaaactataccattaatagcatagccaactattaacttcacatcatctatcaaaaactctctaaaagacagggccacatactcagggggtgtttagatccaggggtgtaaagttttggcgtgtcatatcggatattatatagggtgtcgcatggggtgtttgacactaataaaaaaactaattacagaatccgtcagtaaaccgcgagacaaatttattaagcctaattaatcagtcattagcaaaggtttactgtagtaccacattgtcaaatcatgtagcaattaggcttaaaagatttgtctcgcaaattagtcgcaatctgtgcaattagttattttttagcctatgtttaatacctcatgcatgtgttcgatatgacggggtgtaaaattttgggtgggatctaaacatggcctcattaaaaccaaccattgacaaggtctagtgtggatgtaaagtgtgtaaactagagtgctctgtatgtaaagatgactaattttatactccctccgttccaaaataagtgcagttttagcattgttcatgtccaacgtttgactgtttgtcttatttgaaatttttttataattactacttttattgttattagatgataaaacatgaatagtactttatgtgtgactaattttttttaatatttttcataattttttcaaataagacgggtggtcaaaacaatgaacacggatatctatggctgaacttattttgagacggaggtagtacaattattgtattgggtatatatatcatttgtgcaactactagtatacatacgtagtactccctccgtcccatagtgttgcaaccta

SEQ ID NO: 23575 - DNA, 24176 bp, Oryza sativa
agtcctatatatgtagcccatgctctcggggagagagagagacacagatagagagagagagagagagaggggccaattggtgttgcgatcgaggctaggtcaggtcatgacgcaatgcaaatgttatatggaatggatcagagtgatagaggagagagctgtcgagctgggattgcagcatctccagcgccaggagcaccagttgccgtaaacaacaccacacagtttttcccaccaaatataaaagatctttcttggcacagtgcgttcaacagttgcaagcaataatattattggctaattagtactgacttttattaatattcgcctattatacaattgataccacctccgatccattcctaaatatactgaccaatgtcatatgaaaaaagaatagagagagtagtaattaatgaactatatcagtgaacattgacagacaaaaataaaatcatactagccatactgtgcaaaaagcaccatatataatttgaaaacgaccggtatagtttacactcatatatactactccatccgtttcagtttataatgcattttgactttagtcaaagttaaactgttttaagtttaactaagtttgtagacaaatataataatatttataatactaaattaattagagtcatcaaattaacaattgaatatattttcataataaatttatcttggattgaaaagtcaaaacgtaatttgactttgaccaaagtcaaaacgtcttattataatggagtaactttgtaaatcacacttgagtgtattgcgtgatttcttaggatgctacgctatctcacaagcgacttacgtactataaattaatgcagtgaacatacttagagagttgaattttaccacgatttaatttcgatggactaattaaagaaaatctcaaggtttcgaaaacgacatggtacgtcgtgcgcgtatatgtaactatggaccatgtattcatatgcacgaattggtacaaaagggtgcacaaattctgcaataactgttggaaatgtatatatattcatacatatgtgtgtacactgctctctccatctctaaaataccttatactccctccatttcatattgtaagactttctagcattgtttatatttatatagatgttaatgaatttagacacacacacacacacacacacatatatatatatatatatatatatatatatatatatatattcattaacatatatatgaatgtggccaatgctaaaaattcttacattgtgaaacggatgaagtagtatttagctggtctcagatatattagtatggttgtgaaaagacgaatatgcacttcattaagattatatgcttctattatactacatgtttagctagacttttggcatgcccaagctctaacaaatgatttttgcacctaaatcgatttcaattaggtgggcgagagtggggtttaaccaatagagataaaataaggacaataaaaacagctagtggaccacatatctccacacgtctcttaaaaaaagatttattttacaactgaatttgaagataaggtattttgtaattgagaaagtaaataccaatatactccctccggttatttatatttatatttagcgttagaaaagttaaacttagttttcccatctttaaatatatatagtgaatggatcgtatcgtaaaaaaaaagacaaccggattatagttaaataattggccatgtattgatatggtgcaaattaacaaaatttcgcagtaatgattggccatgtattcatgtgtacatttatcaatatatcaataaaaaagacaagaggataataatagtaataataaagaaatggagaaaaggagtcgaggggttgggagttcgaccgtacgaggaggtagcatagcagcagaatcgaccccaagctttccttctcacgtaacatgccgttattatattatatatattaaaataattaatccaattattttttaccagattaatattaatgtaatccgtgtgtcagcaggcttgagaggctgcaggtgggccccatgattccgggaccaatcacagctcgacagcatactgacacccgtccccaaaagcaaagaggcctctctctctctctctcgccgatccctctcctcctcctcttcttcttcttccactagctagttcgtcttcctccttcagctagcttgtagcagctaaggttaggtcggatcgagatcgggatcggccgccggcgagcggcgagcggcgaggatggggcgggggaaggtgcagctgaagcggatagagaacaagatcaacaggcaggtgacgttctccaagaggaggaatggattgctgaagaaggcgcacgagatctccgtcctctgcgacgccgaggtcgccgccatcgtcttctcccccaagggcaagctctacgagtacgccactgactccaggtacacctatagcctgatcgattccttgccatttctggagcacctgagcccgcctgagatggatgaactcaataattctcctagctttttgccgtttctggccggccgcttccatggatttcagctgctgctctctgaatttgccatgtttggtttgtgcatctggttgcatgtgtgctacagctgatgattttatgcttcactagtgctgcaacacatgcaacacagtccaatccaagctagctcagctactccaggaggaggagtcagctgcatgcctcctcatttcgggaaatcatctctctctctttctattttttccctttcctttcttgtttcccctttttctttcctgctagcttgcttctctctctacaccctgcataccctttttgggattgatggccggttttaattaatttcccctcctttctttagttaattactaccctactactaattcatctcctcccgatcctctcaatttctcatcatatggagtactactaaaatatatatatgtagtacgcacttggtgtggccggtctttgttaacatcatgtgcttgcttaaattcaaggggattatatatataagaggatctactactaagtgtactttgtgattacatcagctatctatgtagctgatgatcttgctttggtcttttgctgatccattgagctagtgctaattctcatcacccttccatttgatgtactgcaaatagttttttattcattcgcttcttctccctcttccccatgtgatttgattgctagctccttcctgacttttatttgggttgatttcgtcacatcttcctctcaaattaatctcatgcgcgtgcctttgttctccacctgtcaagaaattaattaaagaatatatcacacgaattacgaggagtccaccaccagtgtcatgcactcctccctattgttcacagtcacagctgatgcatgcaaaacatcttctgtttctcaagtaattaattcccctcttcttgtgaggcttggcttaaaattactcaaacagctgtttttcttgcttatgcatcatcttcctcagataccaaaacgttggagatggacagatctggcctttcctcttcccttctctctcatcctcttctatgtttctgcctcttcttatgatgaatctttatttggtattattcacgttaagcatctctttaaagagccctagatcaaatttgatctatctcttttggtttaacttcatggccagttgcttgtgtgttttggtctagaacgaccacgtacgcgagatatttccttttctgctcagctgattaattaataatgatgggataattcactaattattctggagttagatcaagagatgtacttaaacatcctgtgacacgatgacttcaaaaaataatcttgctctctgtaaaatcacataatagctagccatcgcgcgtgtttcagaaaaataatttatcttgcttgctagcttttgctcaaaatgcgtttctgacgtctaggtaaagaggacttttacggtcgtctgtgttgtactggaacagtgccctgcacactccccagcgtcaagatcagtctaaggcgcttcatttctagctcagaaatcttcacttatttgatcttaattatagatcttcctgagatagatctaagggtgttccagtaaaacagaagaagtcaagttcttcaggatcctcgtgatataattaaactgtagtctcacaatcttactgatcatcaaggagtctgtaaacacctatacgtacggctataggattatggggaggttggtctaaaataaaggtgttaaattacttgcaattatcaagatgtgcaaatcatcacccagtaattcaatggtgctattatatatagtctgttttgaacagttccactggttttgttagggtccttgctgatggctgtttaacggtgctgttatatataatcttgattattttttttgctaaattttcctaagcaacccacttcaaattttggaatgggtgaattcttatgttcacaccctcatatcacatgtgtcatgaggagcttttttttcgtcacacagtcccatacaacgtccctgttttcttgaagataagataattcatgcatgcacttgaatataaccgagtgttttcatgtgcatgctttttatttggctgtgtcgagtgtttagacagcaaaagagctcttgtgcatacaaatgccgatatctatatattagtagtcttaatccacatttcagctttaattgcttggaatagtttggtaggcattcctagcttcagaccatttaaatatacttcctaaacgttgtcatgagaatgctgaatgcaaagtatttacatatatagtggactaatttcagattctgctcatgatggttttccctgcaggatggacaaaatccttgaacgttatgagcgctattcatatgctgaaaaggctcttatttcagctgaatccgagagtgaggtaaaacacagtaggttgtatgatatataacttttacatgaagggaatattattgttccttttctattgcattagcatttcaatcatatcatttccttgtggccttttaaatcacatgttaacaaagcagtttttctgaattctatcgttctacttgccaaaactagatgttggtaaccttctgttttatactttttaacttcaaacctcgtgtcttttgcactctggcatatttcttaaaatttctacttattgggatatcatgcaggagagtcctcattcccttcatttaatcccctcaaattttatttattatggtcatacaattaatgggccacatgcatggaagtcgatcgccagcttgcgatcagcatcctatcattaatgttatgatctatactaattcttctgtaaataaattaaaattgcactagtttttaactaaatgctactattctatttttttatccatactccgtttgagtggtttcttttgtgtttcatgaagcaatataatatgcttaagaaaacatagaaacatgcacaatacaataatagcgctggtagaatccggttggagaccaaatgtttcgatattctaagtgcatatttatatatactaagtaaaactgtaatcataaacatgcatatggactgtgatcgatgaaatgtttcttcattttttttttcaagataactcttccccagttgacaacatgcactgcatccagaagtactcatggtatttgttttcagtactgtttgatgagtaaaactttggtaagtgttaaaaaatgatgataagtgcaaatatttgttcctttaccacttccaccttcttggagtaaagaaaaaaatgtgtgtggtttggcaaagttgttgcatatatcacggcattagtgtgcggataatgcgaataaatgcatcaataagcactaggagtaagttaattagttctctaccttaattgaaaagttcatgtacatttaaaaaaattaaacatgcctctttttatcatttgttgaatttctacatttatcaagacagcaaaggagttctcatctactaataaattaatttaaggagctataactcccttaattttatcaaatattcacatacacggttgcatttgaggattttctatatactccactaaatgaggatgcatttaggttctttataatattttatttccatcgtttcatcatctgtttatgtttacagtaatttagtaatagttctctaattttgacagtaatggttggctcacagaaaacatcaaccaaccatatatattggtttatactgacaaagagtttttttttgtacagggaaattggtgccatgaatacaggaaacttaaggcaaagattgagaccatacaaaaatgtcacaagtaatcgatatatatatccaatttctataataatgttaaataaatttcgaactaattgcactaattattatttttaaaccaatttaaaagagaacttccggtattgactgctgaagatgacgtgaaactaacttatgtatcttgtgtagacacctcatgggagaggatctagaatccctgaatctcaaagaactccaacagctagagcagcagctggagagttcattgaagcacataatatcaagaaaggtagtatttttttggatagtggaatctttttatttgaactcccgacctctacacaccaaatgtacagaaaaaaaggagcaaattattaaaagaaacgtagtaatatatttagcatgttctgtttcaaactggactgaattgaaataattcatgcatgcgcatgcctgagttacataaatatatatccaaatgtcttgttgtcactgctactttgaaacaaatgttcttttttttttcctttttgagaaaatatatgagtaaatattttcagcacattctggaggaacaattaccaaatataaactttttagcacattctggagtacaattaccaaatatgacggactaactagaacaatatgtttgtgtttgcagagccaccttatgcttgagtccatttccgagctgcagaaaaaggtgaccaattgaactgcactactgtgtatgcatgtatatatgaatcgtgcatgcaaaccgttgttagctagtagttagttatagtttactcttggttagtctcaactgatagtgcagttttcttgcatgagtgcaggagaggtcactgcaggaggagaacaaggctctgcagaaggaagtaagttgtcgaaaatatagtatttactgctgcttatattaattaattcattctgcttgactagccaatggaggcactaaacataattaattcatgcgcattggttttgatcaattgatttatcttgttgacaattttccaatctatccatgggtttaattactagttttgtcaatggaggcattagagataattaattcatatgcgcactcgaaagtttgaaattgctgtagtttacttgttgggtggatcatatcgccaataattttttcccccacagttgaccgcaaatgagaagtaattttctttgccttctagacttgacggctatttttttagcgtgttggcaattgaacatatgaccttgggttaaaaccacacatcttttatcattgcgctatcaaatacatctcgataaatttgtcccttactagcggtttatgtggtttccttggtggtcggtttgtgcctcttagaaaaaaatcgtgatgtttgtagtgtgcgcatgcagctggtggagaggcagaagaatgtgaggggccagcagcaagtagggcagtgggaccaaacccaggtccaggcccaggcccaagcccaaccccaagcccagacaagctcctcctcctcctccatgctgagggatcagcaggcacttcttccaccacaaaatatctggtacgtatatgtctgcattcatgtctcatcagttgctattcagttataaattaatctgttactgcactaattaagatcgatcacacccttgttaagttctaagtctctaattaattaactgcatgtatataattatgcacatctgtgcatagtagctacccgccggtgatgatgggcgagagaaatgatgcggcggcggcggcggcggtggcggcgcagggccaggtgcaactccgcatcggaggtcttccgccatggatgctgagccacctcaatgcttaagatgatcatcgtcgtcgtcgtcggccaaacagctgccgtatgcaccgtgaatcatgggagcaaccttgaatgaattgaagtcattggtatcgatcctagcgataatatatatgattctcctaaaatgaaattgatctcaaaaaaacaaacctagcgattaagctattcttatatatgtgtttgcctgctgccccctaccctacaggctacatatgatttgcaagaaattaattatgagcaaggatcaggatgtgtctttgtgtaatcatcagcacgtacctagtgcttcctactgatatatatgcatgcaattgtgtgcatataaatatatttgcatgccatgctcccgtgatggttaattaatttatgattgtgtttatacgctaattaactgcagatgcaaactaatcaatcgaattatatatcttttgtgattggatatatggcaggggattacatttggtggtttctcaattaattcattattatggaaatttaagagttcaagataatttatatgataataggtgtatatagataatcgttagtatttattagtgactacaaatgaatagatatgtactactggttaattagaactgcaagttatgcatgtatatatattgtctccatatatttattaattaacacgactcattatgaaagagaagaactattccatggtaattgtaccatcaggtatgtgctaaaaattgtttctcttttgatgggatcgagatattcacattgaaacataaatgagtgaactgatcatccttctctttctagctgattgaacttttcattgaattgtctagtccacagcagaacatcacgttgaaatatataagtgaattatatgttttcttgggttacatgtaattaatacgcacacacatcgtactcacacccacatatacaccctccaaatatacttaaaagtgacgaaggccagcgacatttaatttacaggacttcattggagggagcttctagctgttacagtttctcgcagaatcagaagctccccaaatagtctagcttttggtttagattctaataagttgtagtggtagaattcagaaaatgaactagaagccaaaagctggcaaacctagttttttcaaattctcagaagctggctaccaatcagttacttttcaaaatcttaagctcctccaaacaagctctaaaattacgttgaaagtgttgcttgtcgtaatagtgctgagggtagatgggctgtacaccccgaaaaagttttgcgcaaaacaaaacatactgtataaatgaaacaatttatattcgacaaaggaaacctagctattcaagggaataaatctataccgtacgagccaatttgataatctgttggtaaatgtcactactatatctaatttatcttgccatttaagtcaaagttccatcgttgctaggattctagcagatgaagtcgtgtatccagaatactaccatcacattaccagtgttattcgaaattgtctattcttttttgcttgaccaccgtaaacttttacaccaaattggttaacatattaaaaaaaattattgtaaacggtgcaaccatgcatatgacaccatgtcatacgaagggaaagaaaatactgctacacatacttaaaaaattcttacataattattagatggagattacaaatatctagatttacttatagcatgccacatttaataaaaaaaatgtacttacatccttttccgaggaaaaaataatcacgatatgctttggtatgtggtagtgagaaaatcagcattgatattgccggactaaactgcaaatcaaagaaaatctttaatgttgttacagccccaattttcatttatttatatgcttatctaaatcatgtatatagcaaacaaaaagttatctgtgagtaaaatttttatatgcgtgtctttaatggttcaaaagcaaatactgtaaataaactacgataaaaaatttaaaattagatttaaaaattaaattttaacctataaatataagcataagccaaactacgaggacgggcttcctgtgtcgctctcacacaaaagaaccagggtttcgacagaaaagagaaaaagaaaggaaataatgggattggatggatgggtgtggtgtcttgtaatgccactgggccgacatgattgagaaggccagccaataagatttagggcccattaacaaaaatgatctggtgtaccagggtttgccacgtccacattgctccatctctggacagttccacacacatacacacacactctctctttctgtctgattgcctttgccttttctttcatctgcagccatttgtgtccctcggataataatcattcacttgctttgtgcaaccttttgcccctttttctacttcctcttgaagactgtgcaaccttttttgttcagataaagctgcaatttgaacaccacacatctgtcccccattttagtgtaaattaagtaattacttttgaaggttttggtgtaagttaaatactactttcgcaggttttcgtgtactagagcttaaggtgctttggggcaaatcttaaatactactgcattgcatctgtctcatattacttatcgttttgacttttttcttacaacgtttgaattagttattttatttaaaaaattagtataaatataaaaaataataagtcaaacttaaaaaacttttgataataaaacaagtcacaaacaaaataaataataattccaaatttttttaataagataaataattaaacattataaataaaaacttaaagcgagtacggaggtagtacatcactaactttatattttggaatagaagaaacatgtaacacaaaaatttcacattagtggagtaatttttacatgctactatatcagtttagtatagtactcctaacaagtcctactcctacctagtaaaaaaaaaaggcaaaataggttatacatataattttagacaaagaaaatgttatacaggcttcaatttggacaactactaatttcaattgagtaatttacatcagtaaatgtacagtaggactaactcttggaggagtatttccaagaaagaaagaaagaaaaatggcggtgaaatgaaatgtctaacgcagggaaggcggcgggtccggagtaggctgggcggcggcgaggtcggcgggggagagggtgccggagtgatcggcgtcgaggttgtcgaactcgtcgaggaactccgatatgtcctcctggctgatcttgccgagctccttgagcttgtacagcacgaagtcggcggccccgacgcggtggtcgccgtcgaggtccgccgcctccaggtccatgttggtggtccggcgccgcagcacccacctcgccagctccctctgccgccgctccgtgtacagctccgccgcgtacaggaagaagagcgccaccaccaccgtgctcaccgtgatccacgccaccgcgaacgcgcgccccccctccgacgagaagctccggtcgccgtaccccagcgtcgtcaccgtcgcgcacacgcagtagaacgcgtccaccgcccgcatcccctccaccttccacagcaccaccgtccctgacgccaccgccgccaccagcagcagccccgccgtgtagagcttgtacctcaccttgttcatctccatggcgcgcaccatcgtgtgcgagtgcagcgcgcggaagaggagcgcctcctgcttctcgacgaggtagtcggcggccttgctgaggaaggtgccgacgacggcgacgccggcgaagacgaaggcgcaggcgaggagcttggcggcgtcgctggcggggacgaggtcgccgtagccgacggtggtcatggtgacgacgcagaagtagagggcgtcgagggcgcgggtggtgcgggtgccggacatgtggtccatggcgaggtagaaggcaatggtgccgaggaggaggtacgcgacgaggaggaggccgacgagccggaagctggggcggccgccgccggtgaagagcgtcttgggaggcgcgtcggccgccgaggagttgtccttgtccgtgggcggaggctcggaggagggcgccgtcctgcatcgccggaaccttcttgccgctccttccggcggcggcttctggtcgccgccgtcgtgaagcagcggttgttggtcgagggccgccattgatttggtgataattgaggtggaatttgagctaagattcagaggtgcagcgatcgatcgatcatcgatgtgtgtgaaatagaaattgggaacagaaacaaaggagatagaggtgtgtctgtgttggattggtttcagcatcagacagcaggcaggaagttaatggatggggtggtaattaatttaatcagtcactaagagcaattttaataatataccccactgtttagccctcacattttagcctcaaattagccctcaagaatccaaacagatgggctaattttgagctaatgtgaattagcccccctcaaaacattagcccctcccagggatgctaatggggctaattttatatggggaccatcaaaaagctaggccaatatttagcctaccaattcatgactaaacattagctcttaaaattagccctgggctaatcttccaaatatggcatcaatctaataactcattcatataatagttagctgtagaaatacactacatcattaatacataatctacccatctttctcacatggtttattagagctcgtgctgcagctggctacagatctgtagcccgcttttattctctctctcctccacacaagcaaaaatctgacatggcaacttgtatagcccgcttatgtcaactctctctaagagcaagtttaatagtatagtcaacctgtatagctccaaatcatctataatcaatctaatagtcagttcatacaataattacctttaaacatatactacacaattaatacatggtcccacttgtcatacacacatatatcttggagttcatgctgtagccggctacaaatttatagccccgctgatcttctcccttatcttttatcttctcgaaataagtttatagctggcttatagtctgctatggtgtagtactgctctaagtaggtgattactccgcagcatccggattggataggttttgcttaggtgtgataaatgaatgggtgtgacgtgtctgttgtgatgccgatgccggcggggaggtggctggttgctgtgtcggtacggacctattcttttcttcacatgtgcgaatatattggttactgctccagctgtgaaggcaaagctgagttgtaaacagctacccggttcattttcgttaagcacatttttcgatccaaatgctacacggtgtgtctcgtaaaatatatatataaaaatttctttaaaaattaaacaaatatattttgtaaataaaaaaatgcttactaattgattagtcgtgcaactaattatctatatcatttatgtgtgcctgattagcttagctaataaaccttaccaaacacagtataaatgatactctcttttaggagtacataggatacatttttcttttctaaaaaattctaaataaaatataaaaataaaaatttccaaatttaaattccttggaaaaaaaataacacgagtaaattttatactcctaaattaatcccttttatttaattatgcatgccacctatatgatcaggggtggaccgggcctcaagccactgggccatgaccctgatgcctcctggactgcaagcccactgtgctgagtatgcaacttcttaccatgcaaacctcgagaacttcaaaccagaactcgatgcagttgatgggagcatggattctaatttagctatggcgaataacaattcagcgtcgttatctttgaatactttttagtcagaaatcatcataagcaattcttttacttgtaagtaataagtcaatgaaagcctttattcattggatatacgtgttacatgtactatatatgaatcaaggccatgcatatccatgatccatatggagagctcgatcgagccaccaattaattaattaacggtatttagaaacataactaaatcagttaattaatccaataaagggattaataacaatgtcgacaacgttatttattcattaattaactaattcttctgtatgcgatcgagctgcagccatagacgtcgacgtatttcttcttctttttcgtcgtcgtcaagctaggagcagcttgtccttcttcttcctaggcagagacgacagggtaggacggcgccatggcgacaccgcacgcgccctggctgccgacgtccttctccagcttcatgtatccgccgtccccccaggttgttccccacgagttcttgatgatccagtagccgccgccgccgctcccgtccgcctccgcgccgtaccccaccaccgccaccgcgtggtccagcttcgtcccgcagctgtccgccgtgaacaccccgctgccgtagtgccggaacatggcgccgctcccctcgatggccaccgacaccggctggctcgccacggcggcggccagcgacccctcgtcgttggggttcacgcgctggtagccgctgatggtggcggcgacgcccgacgccgacgacgaggcgtcgaactggcacgccccctgcgcgccctggtaggcgtaggccgcctcggtggtgacgccgccgctgttggccatgtactggaacgcattgtcgaggctaccgccggtgcagccgccgttgtcggcgcagtcgagcagctgctgctccgacagggacaccagctcgccggtggtgatctggtggatgccctccacggcggccaccgtcgagaaggcccagcagcaccgcaggatcgttggttcttgacgccggtgacggcgccttgctgccgccagtcaacctcggccggctgctggtcatcctccgacgagaggcgggtggtggcgttagctgcggcgtacatggtattggccgggttgtagccggtgtacatggcggcgaactcggcgtcggtgaggtcggtgaagcggttggtggcgaggcggtagcgcttgttgccggcggcgttggagcggtcgatgaggtccacgttggccttgaacacccggaaccggcgagccttctcggcggcgtccttgtacgtgcgcccgtgctccgccatccacttgtcgtgcctcgcctccatcgtgccggcgcggctggccatagtcaccttcgccattgtcgacaggccgccggcgacgacgagcagcagcgaggctgccatgacctgcagcttactactagtacgagccatatgatgattaatcaacgacttaattagttacctagtgtaactaattaatgtagctagctagcttattactcgaagctattagaggtgtgtgtgctgtgcgcggtgtggtttggtttggttttggaggaggggctagggtttatatagattgcatgatcgatcaagtacgtacactacacatgcatgggagtaagctgaaaacatcacctgtaatcctgcattatttatgttttctcaagtcctccccctgccacattaatgtagaaacttaccaggtttgatcaattccatagcagatcattaactagctagtaatttcaaccaaagtaattgagctaactcatctagctagctggcataatggagtggagtatatcttacgatgtgcctcgaactagatgatctcgcgcgcagtcctgaatgtggatggtggactttctagattataattccattaattccgagccgtcccctccccgcccgagcggatcatttcctgcctaatcaatttgaccggaaaattaatgtaagctcatatatgtttcaactttgaccactaacttattaataacttttagattatatatatatatatatatatacactcgtgctccatggagtatgggctctaatagaatccaccgtatacgtgctttgagatccgtgctacataaaccggagtattatacatcttaacgggttaaacccaattagatctttccatcagcaataggcatgcatgatttgcatgcatgcatgtactgacgtgattgagtttccatttatacgttcactcctattgtttccatataaactttcatgcacatactttccatttgaaatattaatatgattgcgtgataattgattatcgaaatttaaaatgactttccatatttgaaatattaacattatcacgctaatatttatttccaaaaatctgagattgcactaaatcgaatccactaatttttgatttttttttgcttatttccatcaatacgagtagacatgtcatttcattctaatacacactccactttgggctccacgctgttacaccgccgcacgtcggcgaacttcttcatcgccgagtcgttgtgctaccagacgtgcctgagcatcttcgtcgtgggctgctgattgttcgtgagagtcttggacgtacgcagccggttatccacaatcttcgtcgccaatcagttgcgccgccgaacatccacgagcttcttctttgcgcccgctcgtcgttcgcgacaatcgcagcagtcgcttgttgttcgcgactccatcccaagctcgctcctcgccccacgacgtaattttcggcttccagttcctccgcttgaatcttatcagcgaaccacgttcaggtatgtgctccatccatccatcttttctggtttatgtttcatgtggctgaggcactactcaatatattcaatgttttattccaatatattcatgcatcatgatcagtacctattgttatttttcaacgtccagtgtaatcatttcccattgtttgttttttataggagacatatgcagatatcctcgctgatgtcaagattggagttgatcctcccaagttgctcgttcgtcatgatagggatcaatttgaagatcaggcaaaaccagcgaccctgaaagcgtgcgtggattgcaacccatctgacaacaaataataatctatgttgctcctttgtattaagaatcatatattgtaataatcacctcgtggcacctactccctccgtcccaaaaaaatgcaaaccgtgggttcccgtgccaacgtttgactgtccgtcttatatgaaatttttttataattagtatttttattattgttagatgataaaacatgattaatactttatgcatgatttatctttttaattttttccataattttttcaaataagacagatggtcaaatgttaggcacggaaaccagggtttgtctttttttgggacggaggaagtagctttgaacaatgttaattttactttagttgctggacaatttttcttattgtattattccaatcgaaatagtataactgtttgcccaaatttcgtgtctgttatccataaattagctaaactttcatatttgtattctgggtcatattccgggtcatagtatacctaagttttagatcgcatacccagatttctgtacacacatagggtatgtacgtatatttgggtctgtattttaatcttgttcccattaactgaatacccggtatatttggggacatacttatatttgggtctatattttaaacttgttttcctaaactgagtacccggcatatttggttatatacgtctgtttgtgtctatattttcaacttctcccaaactgaaaacttggtatatttgggtatatattttcaactcttgcgtatatacacgtcgtacgtcatataagtatagctaattttacttcgaatacccaaattttttatcataaacttaatacataataacatgaaaatttgatcatggtctgtgatttttttcccttacatacacaatctttgagtatatgcccatgacacatgtttgtactcataaccttatataacaaaccacaatttttgcataaaccgaataaacaatacacatgtcttttgttttaaattttaaatagaactatttggatagatgtcatattgaattttaaacccaaccttttggcaaatagaaaatgcgagaaattcaatatgacaaccatatatgaagatacatttttcatgccgtgcgaatttatttcaggcccattaagaactaatatccgcgttcatacctaatatttgggtatatttggttccagtaatcaaaaatcaagtgtgtatattctatgtataaatatggaaatatagccatagtgcatattttgtacgtctaatagctaaattaatgacgccataaatggaagtatataggtatggatatattaccatatacccagccgtaatatatttccaaatacctagtttcctttttccaaaatgccgctgatcagtatttccatatacttagttcccgtgttgccaaataccgaggatcagtttctagaattagatacttagtttaggataattccttttgtttttccatataattagtttcaattttccaattttcgcactttccatgattcgtacatatattaccatttattcaaaccccaacttcgggcaagtgattttccatattttcgtgatactattcctaattgtatggcattaaaagtttccattttgaactttacacgcaattatggaaattctatcatccgaattgcatgcatgcattgaaacgtattaattcagtgtatttactatctataactacgttcaaatatatggaattcattcactgttaatagctatattcttaacgggtgtataaccattaagctaatataccaaaatgactgcaccgatcatccacgatcctacggctcccgacattggagcccatacttcatggtgccccatccgggcgtcctatatatatatatatatatatatatatatatatatatatatatatatatatatatatatatatatatatatatatatagagagagagagagagagagagagagagagagagagagagagagagagagagagagagagagagagagagagagagagagagagagagagagagagagagagagagagagagagagagagagagagagagagattaatgcttgtataatcactagtattgtacaccatgacattagagaaaaatttgtgcattccactaattcgtgacatgcatctatctgcatctgggattttctgaaaatagcacgctagacatataataaatcctccaaatgtgccaaacaacaggagccatgcatgagaccttcaacgcaagttccaaaagaaaatggtctactcctctaataattaatatgaggtcacaatctcttaaacatttctggccgctaacaaaaatgggaaacacgcatgaatggtaactgatcgatgctaaatttcaataagacgaacaacggacagtgggttctttcttttttctctgcattttaataaaggcaaggaagagcaggacaaggaggaaattaaagatgtctgatcttccagggttcctgagcgtgagagtgctgcgaggggtaaaccttgttagtcgtgatgccggcggcagtgatccctatgttgtgcttcacctggacaatcaggtagcctgcctcttcttttctttagctatatattaatcgttaaaatctattaattctccgatttgttcataatttttgagatccacaagcacaaggacttgaacattgacattatatatactgttttggatgtgctgctatatttttaagtagttaactgtagatgcactttaatgttttatactattgcaaattaattttaactgtggggacaggacagtaaacaaagcccatgtttagttcgtgtgccaattttttttaaagtatacggatacacatttaaagtattaaatgtagactaataacaaaacaaattacagattccgcttctaaactatgagatgaatttattaagcctaattaatccgtcattagcaaatgtttactatagcatcacattgttaaatcatggcgtaattaggctcaaaaaattcgtctcgcaatttacatgtaaactgtacaattggtttttttcgtccacatttaatgctctatgtatgtgttcaaacatttgatgtgacgaaatttttggaagtttgaaggaaactaaacactgtcaaagtacaacaacgttcacctttcttttttttttttacaactatcgaaaacagaaaagtaatggtaatgtgcacaaggaatccatttatttctttacctgattatccaatagtactggtatgcccagtaaagaagacttaaattacagatagactaaataagataacgagttgatgagatgtgatgtgctaacctatttgacaacaacagttctttaattatagcgtcaagtttcttcatcaacattttgtatcaactctaatttgtcattttatttgcctacacagaaattaaagacaggtgtggtaaagaagacaacaaacccagtttggaacgaagagctgactttagctgtcaggaatccagaaacacctatccagctagtaagcatctgtatctctatacttatatcaaatgctcaaacactaaactaagtagacagttcttaccactcttactgaatttttttttcaaaaagacaggaaacttacgatataggctgcctctttttctcaaacaggaggtatttgacaaggacacattcagtaaagatgaccagatgggtgacgcagagttcgacattgaggcgctgatgcaaatcgtgaggatggatctgcaggacatccgcagtggcaccgtcgtacgcaccgtgcgacccggcagacagtgctgcctagcagacgagagtcacattgtgtgggagaatggtcagattgtgcaagacatgcttctcaagttgagaaatgttgagaccggcgtggtgcacctgcagctgaaatgggtgaacattccaggtatgtactctgcacaattataaggctggggtgctggattcggactcatgatacgtcaacatttagcataatagcactagatggtcaagtacaaaagatttggcataaagagatcaaaagattagaacagattgtccactgtttactattattaccggattcatgctagaaatgatgcattcagattagcaaaacaccattattattaatcatgttgaaaccagtagcaggtttaatttgtttaacatttttattttatgatttatcttgttgaaccaatagcagtaatggtagaggatttgtatcaataacaacctgcatgacatagtgttccaacttgaatcttcagagagtaagcctgttgcaattgaatcaagagtatttggacatcgatcttacgagaaaaagaaaagagtatcggacatccagtcttgtccattgttcattgctattgcctaaaatcctagcatctttcagactaacttttttttaaagataataacggattaaacaatccagcctacacagccagtctttcagactaagtagtaattaggatgattttatatgctatctcttgcaagctgcagcagttggcaaaggtaatctaacgaattttctttcacattaggctgaagaagaatctgaatttcggtacattcatgcaaaggtaaaatgttatagagtaaatgtaatattggctttattaagttttcctcctctagacctgttgatcattcatcggcacatcggaaactaatctaacataagcaatttgatggtgcagatattggttcctcaaattggtgaagaaaccggtgttgttttgtttcagcattttgccatacacattaattgttgtgttgttcttcagactgtatgtagctgcctgtatatgtatgtaatttctgtgacaatgttgatcagacttcagagtatatgcattttgccatacacattgctgtgctgttgttgttgttgttcaagactatatatatgtacttcagctgcgtgcatatgtaatttctatgacaatgatgggaattccaaatgcaagtcttgtttgaaacaaagatacatactgtggttgatatgaatggatcgataaaaatgaatgcattttactggagcagagctgaagatgaacacgtacgtactttccgtcggagtcgcctagaaccgcttgcttcctactgtcgcggcggaggggacgtcaccagccggagctcaggagtggagccactcaagggattgaaagaatcgcccaattcgaggaccggagcggcaaatcctggagaaactgatgaagtcaccatatgtgtctcaccgtcgatgggtacgtcgcctaccactgaaagcacaacgtcgttaaatcctagaaaattcgctcccatggggagtcgaacccaggacctcaggtgctactgaggctcttgtaactactaggctacaggccctttcgcaagaatcgcccaattttcctaagccgatcaagtggtcccgatcgagagtgagggatggggaataatcccttcggcacggaaaacgaagcagaccattcgagatttctaattcacacgtacgcgccccgggcgcgcacttctggcccacggcccacgcgtgtcgcggtgccgtcgacgctatgaatcgcgatgccgttgatgctctaaagatcagtttttttctggtgctttttttaaagtaacgtaactaactatattagttaaggataataatagtagttaaggaaatattttttttctttttgggagattttttttactaatagattgaaaatttttaagttacatttgaaaacttttgacttaagatttaaactttgaagttaaattttaaaaactttcaactaaggtttgaaaactttcaactcgagatttgaaaactttcaactttcatctcaaatttgaaaaactttcaacccagatttgaaaacttttaactcgagatttgaaaactttcaacttttatctcaaatttgaaaaactttcaacctagatttgaaaactttcaacccagatttgaaaactttcaactcgagatttgaaaacttgcaaatcagattaaaaaattttaagttaagatttaaaaatttttaagtcaagattttaaaactttcaactcaaaacattcaaaaaaatatgtgtgctaaaaagatttaaaaaagtaattagaaaaaaggacaaaaaaaggaaaataatcattgtaaaaacgaataaaatggcatgggggagccgggacgcgccagcaactttgctggcgcgcacgcgcgaattagcaacacctcagaccattagcacgtgattaattaagtattagctaaatttttttcgtaaaatagatcaatatgaatttttaagcaacttttatatataaactttttttttaaaaaaaaatacacagtttaacagcttgggaagcgtacgcgcgaaaaaggaggtggcgggaagcagcgcacccaaagacgtaccaactggaggaaaaaatacacccaaggtccctcaacttgtcatcgagttacaatatcgtccttgaaccgcaaaaccggatatgacgcatcccccaagttacaaaaccagtgcaaactatgtccctgggcggttttgactccggttttgtcctatgtagcagctgactcagcgtgggacccatgtgggccccatgcgtcagccacttcttccctcccctctccacctctctttctccctctcctctctttcccaatctgcacgggcggcgcgtgaggagcagctgcacgggcggcggccggcgggcgcaggcggcttggggaggagctgcgcgcgggcggcgagcgacggaggctgggcgggcgggcgacgtccggcgggggaggagctaggcggcggtgcacgagctcctcgccggacgaacgctagaccggctccgccatgtcggccgcgaggaggtggcgcgcctcgtcggctcgctcagccggagtgccgccgacgacgtttacgcaaatgacctgagaatttgagatcattgccatcttgctgttctcttcaagccctatcaacaagattgacacgattaagcactggatcgagatatgatcgatcgagcagcaccgacgaactagccgccgatcata

SEQ ID NO: 23576 - DNA, 7207 bp, Oryza sativa
ggttcaaggacaatattgtaactcgacaacaagttgagggaccttgggtgtactttttccccaattggaccacaaattctttctttctgttacgtgcggcccatatttgttgggccgtaacggaatttggaatttatgcggcccaagaacgggactgggatttgttgggccctcccgcaggtgcgctcagactcgccgtcgctcccccaatcggccgccgcctccgccgcgtctcgtccacttgaagagcaacatctctttcactcctcgaaccctagcacctccaaatcaatcattctcgatctccgcgcgagaatgagatcctcctccacctccagcctccaggtacgcccccgactccattgctctcatttgtgagggttgtatgacatccatctgcggcggggcggggcgggtggagacgccgcccatttcttctcaacacggctagcatgcgacagaggaagccctcaaactgatgggctaggatgcttggcttcgattcgatgttggtgctatatgattatcacaagacttcgtgttaatctttctaatcattacccatcaccaactgctacttcattttacacttgctgctttaatttatttaccttacattttgctactcacataaactttgttccagaaacattgtttgaaaatatggtgatttttttaactattgttgataaaaacttggtgctgttatggacctggcctgatctgtggtggcgaatgagtgaggggatggcatcactctatatatgcgaaaagccgaaaacagccatgtgttctgctctttgttcctttttgtttaagttttgttgctgggataacactttgtagcctgcctctcatgaatcatgatggaaatggaaggggtctccctcttctggctataatacatttgcttctcaaatattacagtacatttctaaaggaaagaaaaaaaaagatatggtaaattgaaacttccatgcctttttccatatctatttataggttttgcacgtgttgtccaaatgtgatcctttatagaggtcacacctttatccaggtttcttatccgagctaatcgaaatccaagaacaaaaatactactgtggcaaaaaagaataaggaagaacataaggaactcccacatgtccaaaaatggaagcaattagtttggtttcaatacaggccacaaaagaaatggtcagctcaactcctacggttgaggctcacacctcattcaccctgtcctgagcaatcctttttaggctccttcctgcaaggctgcaactatataggccgatgaggacagaagggggaaaaaacacaggcgcattctaccgagaggcacaggggttgcaagaagtcgcctaattctcctattgaattaggcacatcttcgcccccacattgcctctcattgtaaaatagtatcaactgataatccacaggaactaaacaacaattaaatccaattatggacggattggtaggcctcttgaaaatacgggtggtgcgtgggattaaccttgcctaccgcgacacaagaggcagtgatccatatgtcgtccttcgcctcggcaagcaagtatgattacttttttgtttttatatctctagcgatttgcctcatctccatctcttttgtttgagtatatattgttctcagtgtcttaccgagttttgtgttttgatcatattacagaaagtgaagactagtgtaaagaagaaatctgtgaatcctatttggcatgaagagctaactttgtcgatcatgaaccctattgcaccgattaagcttgtgagtggatgttgttttcttacaagcatgtgtactaactgattatgatatttcatgttcaaccctgtttttttttaatgaatgctcacattgcggattttcttcttctgttgaaataaacagggggtgtttgacaaagacactttcagtagagacgacccaatgggagatgcagaaatagacctggagcccttcatggaagttctgaacatggacccggagaacattcggaatggttccatcataaaaacaattcgaccatccaaccagaactgccttgctgatgagagtcacctattctggaggaatggtaaatttgtccaggacattattctccgacttagaaacgtcgagagtggtgagctgcaagtgcaactgcaatgggtgaaaattcctggcaggcactaagtgtctcatggccattgggagatcttggctactgagatatcattgacatttccgaatgccaaaacatatattgtgcgaaatggatcatgtcaaccattggggctgtaaatactgtgcaaaaaatgaatcatgtcaagcacgttttgatgtggaggttgtgaccagcaaagggttcatcaggttagtcaatgtctgtaggaaaggaaaatgatgttaaaatgttgttgccgaaatgtattgggagcatgatcagtaaagcttgggatgacataatcaaatagtacaaacgataggaccatgtttgcctgtgcttttgcaacaaatcaatcacaaatactgtttctcatgtggaattcttcttcagtgtcgtggcaatcactatctgaacttttgcctgaacctcaacttttatcatcttaaacagtattatatcctgttatcttgagaattgcttgctgcttaacgtggctcgatgcagtcaagtgggcgaattcatttttgcgattctgaaagtgaaccccttctctagtagcagtaacattttttttgcctgaatttctacggagatgagagtaagggacaagttcaactgaaagggagaggcaaagaagacgatgatgcctttgttcgtcgtcgtcgtcggcgatggctgtggaccgcaggcgaggtgataacccaaccagtggccattgatcctcttatcctcccgcggcgacgacgagcggatgccatctcctcctccccgcattatccgcagttgcagcgcacggggcgcaacaggacaataggataaattccacaattccagtagcctacaaattctcacctgctcccctgtttcttggttccccttcctctctcatcagcacacactgtcaccacaacagccaccaactcctctcaacttcttgatccggcggcggcggcaagatgttcggcggcggcggcggcggcgggaggaagccgctggactacgaggagctgaacgagaacgtgaagaaggtgcagtacgcggtgcggggggagctgtacctgcgcgcctccgagctccagaaggagggcaagaagatcatcttcaccaacgtcggcaacccacacgcgctcggccagaagccgctcaccttcccccgccaggtcactactcctctttctttcttcttcctctactactagtagattcgatcgattgatttctccctattctgttgtgttgtgcaggttgtggcgctgtgccaggcccccttcctgctcgatgatcccaacgtcggccttatcttccccgccgacgccatcgcgcgggccaagcactacctcgccatggcacccggtggactaggtatcacagtcacacacaactctagtgttcttggcaaacctatcatgtatcctttcctcaatcgaaatgctcccataagttgtcaactttagcttccttgcaaaagcctttttagttgtgtatgtagttcttctctcgtagcccatacacgcgagctcgttgactcaggttttatgtaatcaggtgcttacagtgattcccgaggtatccctggtattaggaaggaagtcgccgagttcatcgagaggcgtgatggttatccaaggtcagaatgatcaagagtactcatgacaagtctcaactggtggtgttcttttacatcatagctttcttgggccatattctcacacctgtatcctatacctattgcagtgatccagaacttatttacctcacagatggtgccagcaaaggtgtgatgcaaatgctgaataccattatcagaaatgagagagatggggtatgttattattccttaaaagctatatttgccctgattaattcagtgctatttctactgaagactaatttcaccccatctgattcaaccgagatgtgtaccttccttcgcagattctggttcctgttccacaatacccgctttattctgctgccatttccctctttggtggttctctcgtgccatactacttagaagaagaggctaactggggacttgacttcgtcaatctccgacagactgtggcgtcagcgcggtcaaagggaatcactgtgagtgttttacagaaatttgggagtcacggtatcttattcagtcattcatgcaattactgtaaatgagttcattaccatgttcctgcatacaaaaaacaataccccaagtaaaatagcaatatcaatgtaatattgatgagttcaagtctctctaagtggaaaatggtcactggaatcaacctcctcaccaccggccatcggcgtgttctcttgatcagttcaaatctttgagtcatttctataaggctttgttcaataattcatcaaaaatagaaaggcttatatgaagttctaaagcatgtatgattgaaacatgtcccttggagaggaaccaccgaaccacactcattctgtaatgttatactcctgtgtaagcagtaaggggtacatattgtttttgcatctggtggaaagctatccttttcttaaccagttccgataatcatatcctcatgttatcttcactggctcacctaaaacctctgctagctcttggacagaaacgctagccgttaggttggaggaacactttgctagtcattatctagcatgcaaaaagatgcccacttgatgatttatgtccatcagtacactttgttttggttcctcttttccatgcttatatttcttcccctttcttttattttcaatcatgctgtttgcataaaaatgtagcatttatactatctgtattcagctttgatgttattttttcttccataggttcgagcaatggtgattatcaacccaggaaaccctactggccaatgccttagtgaaggaaacataaaggaacttctcaaattctgcttccatgagaacttagttctgcttgcagatgaagtctatcaacagaacatttatcaagatgagcgcccatttataagtgctagaaaggtaacttttgatttctgacccgtgatgctttatcatgaatacaacatttcccaaccttttactttcatgtggtataccaaaaattaaaatgaacataataagttgccttcaagtaccagatggaaccaagttaattaatagctgctccttttgatgtggaaatttaatagtttttttcacttataaataactaatacatgagtttatgccctaatattgattactttgatcaattgtaaactattctgattgctgatgttaacatggactttctcaatttcttcaggttctgtttgacatgggtcctcctatgagcagggaagttcagctggtttctttccatactgtgtcaaaaggatattggggggagtgtggacaacgtggagggtattttgaaatgacaaatcttcctcccaaggtgatgccattatagaatatgtgattgatctcaaaagatcgtgattcaaatttctagtctttactatatagatttatagaatgcagctacacaaaaatgtagatgcagatactagaaaagatgttacattcttcatgccatgttgcaaagtctaatagagaatatgctagtttcttgttgttatatttggtccacagtaaaatagtgtatatgttgaactatgtaatataatccagtagcccatcctgctaactaggttggtgtagttacatttgttgcaccgaaatattcccttactagagtggtctttgtcagtctcagaaacttgagtatgaacaacgtaaactggagtttgcaagtttgcaactcttaggtttgtccaatttccaaactgtaaacttaatgtttgacaaattttgaagagcctttggcagttgaaatattaagcttttagataagattaagcactcgcacaagattggttatagatcatgtaatgtaagattttactttgaagtttggatagtagcacagataccatttttctgtttgcttgtgatctaattacgttcctcatttcatatgacagacagtagacgagatctacaaggttgcatcaatcgcactcagtccaaatgttcctgggcagatctttgtaagtcaaacaatattcattgtttttgtgcaattatctaaaacagctttccgttcttccagtggccaaaccacaagctttaaaactggaaatatgatatccttaatttatccatggagcattactcaaaatttcggtgccctgagatgcccaaaaatatccagattttttttccatggattgcaacaataatagatgagagcatctaaataatcccttatttggtcagtccatatgttggtgatgagcacaatggcttactttattagcatataatgctgcaccttgaaaatatgtctctgtgggctacagccttacaaggaatagcaaacatgcatttctttttgtgttagagttattcaatgtggtcttagttcctgaaacagtttagttgcaactgtactaattttcttgaagttatgttactttgctttaacaagttaataaaaatggttttaatgtcatttacagatgggtttaatggttaaccctcctaagcctggagatatctcttatctgaagttttctgctgaaaggtatatactttcccttctcatcattttaatccatgtctgcattttcaaggaaaagaagacctacacgggtattcagttattcagtatttatttcctctggtagtaatttcgagtgttctatgtataatgtgcctcctgatgatgttgcagcaagtctatcctcgagtctttgaggaggagagcacgcctgatgacagatggtttcaatagttgccgaaatgttgtctgcaatttcacagaaggtgacattaacatatgagccccttcctttatggcaataggagaaaatgaagcagcttctctaataatgctcttccaattatgttgttgcaggagctatgtactctttcccccaaatacgcttaccaccaaaagctatagatgcagccaaaagggctggcaaagcggccgatgttttctactgcct

SEQ ID NO: 23577 - DNA, 802 bp, Oryza sativa
aggaaatgtggaccgtggtcgccgagacggcggaccgcaccagcacgttaaacctgcagggcgaggtcatcgtaatacttgttgtacccgttgagcagccgggcgaggtcgtcgtagtggtcggcgccgccctggtcaatgaagaagtcgatgccgtccaccgccgcgtcgtcgccgaaggggcggtgcacgccggcgcggtggccgcctaggtaggcgttccagatcaggttgtcggcgacgtcagcggcggaggccttggtggggagggagtagccgccgccctggccgccgatggagaggagcacggtgatgcccctggactggcagtgcttgatgtcggcaccgacggcggcgagcgggtggccggagatgtcgagcgagtagcggccgtagccgaagacgttgtagaaggtgatgatgacggtgttgtagcggccggtgtcgcaggcctctctcagggagccttcctccttgtggcggccccagtagacggcgaggcccgggtcgtcggccgtcgctggcggcggcgtagcgtgctgctcctgctaaggggaggagtgcgtgcacgaggcccatgtgtaagttgctgtgtgctagctaggttgatggttttgccatgtatttatagagagatttgcaggtgaagcttcatgtcctcttgtgttgtggtgttcgtgcgtgatgtgcatgcgtacaagtttaatggattgattcgtccacgtggattgaagcttttgagatgtgagcatttgactctatgatcggcggctagttcgtcggtgctgctcgatcgaatcat

SEQ ID NO: 23578 - DNA, 20315 bp, Oryza sativa
tgccaagattacacgcggtggacaagaatgaccgatttgcgaccggtctgacactgaccatatcgtcagcgcacagccatgctcccacgacgcgctcacccccggcggaagtggaggtaggtgtgggctgtcccatcggagcgtcattcggacagcaaccgtgctgatctccgcccattcaagagaaaaagaacagtccagtttggaaagagaagggtgcatgtggtatccccttgaagtataaaaggaggaccttgcccatagagagggggttggttgattctttcccagattatgagcttagaacgggggagaagtcagctgacacttgtagctcattcatacacagatccaccaaaacacaggagtagggtattacgcttctcagcggcccgaacctgtatagatcgtcggtgtctcgtgttttctggctggcagacgatatttccacatacagagagagcgagagcttgagatttcaccctaagcccccggccgaactggcaaaggggggcctgcgcggtctcccggtgaggagccacgagctccgtcatctggcgcgccaggtagggggctcagcgtgtgctttcagagctctcagactcttccgtgtgccccaagtttttcttgttcagcctaatggccgagcaaggaaaaacgcacgacctctcgccgagtgtgagcggcgacgacggggagccgaatccacgccgtcgagctcgtactcctccacctcctccgcgccaaagccctaagcagggggaggcgcttgagagggtcgacaagtccgcggcgtcaccggccgcaggtgatgcaggagaacggcgagacggggagcgtcgcctcctcgtctacggcgacggcagcacgcctcagggtgcgcttcaagctgctggcgcgctcctacgacacccgcctgtcgtccatgacccggagtctccagcccaacgatggctggaagacgtggccaacttggtcatgacggcacagcagcgcctgggtgctggtggacggtccgccaccaccaccaagacctccggcgccgctaccaccggctccgtgtcatcaaggcggagggcgcggcgagcggcggcggctgcacgtcattcggctgccactccctcgtctacaccgtcgactcgggaggatcagcatggggagccggatgcccgcctcaacatcgggcgccggtgtaatagccggcgtactccccgtgcaacggagggagcctcctcgtccagagtgtcacctcgacatggacgtgaagatcagccctccgtgcccccggccggtggtgttggctgtagagcctttgtggcgagtcttcggaatgtccgttggcccccaaggttccggcccaccatcaccgagaagtacgatgggagcgtcaaccccaccgagtttctccaggtctatacgaccgggattgaggccgctgggggtgacgacagggtcatggcgaacttctttcccatggccctaaaaggacaggcgcggggttggctaatgaacctgccacccgcgtcggtccactcctgggaagatttgtgccaacagttcaccatgaacttccaaggcacatatccgcgcccaggcgaagaagcggacttgcatgcagtacagcgaggcgatgatgagtcgcttcgctcgtacattcagcggttttgccaagtccgcaacactataccatgcatccctgcacacgcggtgatctacgcgttcagggggggcgtgcggcacaaccgcatgctcgaaaagatcgcttccaaagagccccagactaccgcggagctttttcagctcgcggaccgagtggctcgtaaggaggaagcgtggacctggaactcctccggttccggagtggcagcttcggccgcccccggatccgccgctcagacagggcggcgtgataggaggaggaagaagaggtcggaccgttccggcgacgagggtcatgtcctcgccgtcgagggcgctccgcgggccacccgaaaggggaggcctgcgagcgacaaaaagaaagaggctggtactcccggcagggagcgccccgccggcaggtggtgctccgtccacaacacctccctccacgatctcgcggactgtcgtgcagtcaaaaacttggctgagcgaacgaggaagtgggaggaggacaggaggcaggaacgccgtgacggcaagtccccggcggttccttccgacaaacggcgaagtgaggccaagaagaaggcccccgctgttgacattgatgatggtgatgatgatctaggtttccaagaacctggagccaccattgccaccgtcgatggaggagcatgtgctcacgtctctcgccggagcttcaaggctatgaagcgagagcttctgaccatggcccctacccatgaggcgatgcgtcgggcgcggtggtcggaggttgctctcactttcgaccagaccgaccacccaccgtgcattgcccggggagggcaggttgcgatggtggtttcccccaccatctgcaacgtgaagttgggacgtgtcctcatagatggaggagcggctctcaacatcctttcccccgcggcctttgatgctatcaaggccccggggatggtgctccagccgtcacaaccgatcatcggtgtgacgccggggcacacgtggccgttaggtcacatcgacctaccggtcaccttcggtggacccgccaacttccgcacggagcgggtgagcttcgatgtggtggacctcagtctgccctacaacgcggtcctggggagacccgcgttggtgaagttcatggcggcggtccactacgcctacctccagatgaagatgccgggccccggtggccccatctctgtccgtggcgaccttaaagtcgcgcttgcttgcatggagcagcgcgcggaccgcctcgctgctgcgtccaagcccgagggtggtgacgagaggcttggcccctctgcccccaccgccccgaggcagcggatggccacttgcgacgaggtcccggtcaaggaggttgccttgggcgacggcccatccaagaccacacggatcggtggttttctggatggcaaataggaagacgcgctcgtctccttcctgcgggcaaacgctgacgtcttcgcatggagaccagcggacatgcccggggtccccagggaggtgattgagcaccgtctcgccgtgcggccgggcgcaaggccggtccggcagaaagtgcggcggcaagccccggaacgtcaagccttcatccgcgaggaggtggctagacttttggaggccgggttcattcgtgaggtcatccacccggagtggctggcgaacccggtggtcgttcccaaggcgaacggcaagcttcggatgtgcatcgactacaccgaccttaacaaggcatgtcctaaggatccttaccccctgcctcgcatagatcagatcgtcgactccactgcggagtgcgaccttttgtgttttctagatgcatactctggttaccatcagattcgcatggctagggaggatgaggaaaaaactgcgttcattacccccgtaggaacctattgttatacataaatgcccttcgggttaaagaatgcaggtcctacttttcagcgtactactcgaatttctttgggtagtcaaataggacgtaatgttgaggcgtatgtcgatgacttggttgtaaaaacgcgcaaccaagagaccttactttcagatctagcggaaacttttgagaatctccgctccgcccgcataaaactgaaccccgataagtgtgtgtttggtgtacctgcgggtaagcttctcgggttcttggtctctgcccgaggcattgaggccaaccccgagaagattcgagctatcgagcggatgcgcccccccagcaaacttagggacgtgcaatgcgtcaccggttgcatggccgccctaagtcgtttcatatcaaggctgggagagaaggcgctacccttgtttaagctcctcaagcgctcagggccgttcacttggacggaggaagctgaaaatgccctcgcccagttgaaggcgtatctcagctctcctccggttctagtcgccccggagccaaatgagtccctgctactttacttagcggcgaccccccaagtagttagtgcagcgttggttgtggagcgcgatgaggacaatcctcattctgcgcacccccgctctgtgccgacttggcccgggagcaggcagggaggagaggcccccgagtcgaacggtggcctaaggcccccgacgaccggagtcggccctccacccgcttgtcaaacggtgctgggtgcccccgaccctcaggaaggccccaaggccactgagggaaggctgcacttaaagccctttggccccgaggctaaccctgtgctgactcgacccaggaaagagcagggagaagaggcccccgagccgaacggaggccagaggcccctgacgaccggagttggccctttgcccgcttgtccgacgatgccaggagtccccgacccccaggacggccccgaggccactgtgggagggccgctcctgtcatcctccgaccccgaggtcatcagcgcagaagacgagttcgccccgaggggccacttggacgaagaacgccccgggggtacggcccctaacgaggaggatcggccccgccgaaaggtgcagcggcctgtctactttgttagtgaggccctccgggacgccaagacccgatacccacaggcccagaaaatgctttacgctgttctgatggcctcaaggaaactgcgccattatttccaggcgcatcgggtcactgtggttacgtcttaccccctcggtcaaatcttgcataatcgggagggtactggacgggtggtgaaatgggcaatcaaactttctgagtttgatttgcactttgaaccacgccacgctatcaagagccaggccctcgccgactttgtggcagaatggaccccggctcccgagctcgtctcggtccccgaagccggctcgggtccctcgcagctgcctcacaccgcccactgggtgatgcagttcgacggctccctgtctcttcagggcgccggtgcgggggtcacgttgacctctccgagtggagacgtcctcaaatacttggtccgcctcgactttcgagcgaccaataatatggcagagtatgagggactccttgccggactcagagtggcagctggactggggatccgccgcctcctggtgttaggcgactcccagctggtcgtcaaccaagtctgcaaggagtaccggtgctctgacccgcagatggacgcctacgtgcgccaagtacggcgtatggagcgccattttgacgggattgagcttcggcacgttcccagacgggataacatgatggccgacgagctctcacggctcgcgtcctcgcgagcccagaccccaccgggcgcctttgaagaaaggcttgcccagccgtcggcgcgacccgaccccttaggggagacggatgcgcctgaccggcccccgaggcccgtcggagtccaggcctcgggacccaaggggagtgctcccagctcccttagattgattacttggatcgccgagatccaagcatatctcacagataagactctacccgaggaccgcgaagggagtgaacgcgtccgtcgcatctccaaacgctacgtgctggtagaagggaccctctatcggcgcgcggctaatggaatcctcctgaagtgcattcctcgggaacaaggcgttgtgcttcttgccgatatccatgaaggcgaatgcggagcccactccgcctcgcgcaccttggttggtaaagcttttcgccaaggtttctattggccgacagctctcaatgatgcggtcgacctggtccgccgatgtagagcatgtcaattccacgccaagcaaatccatcagccggcccaggccctgcagaccataccactttcgtggccatttgctgtctggggactcgatatcctgggaccgtttaggcgggccccgggcgggtttgagtatctgtatgtcgcgatcgacaagttcactaagtggcccgaggcttatccggtcgtcaagatcgataagcactccgcacttaaattcattaagggcatcacggcccggtttggagtgcctaaccgtattattacggataatggcacccaattcactagtgaactcttcggcgactactgcgaagacatgggcatcaagctctgcttcgcctcacctgcccaccccgaaagcaatggccaagtggagcgcgccaatgcggaaatcctcaaaggccttaaaaccaagaccttcaacatactcaagaagcacggcgattcatggatcgaggagttgccagcggtgctctgggcaaaccgaactacaccaagccgagcaaccggggaaacacctttcttcctcgtctacggcgcggaagcggttctcccatctgagctcaccctgaagtctcctcgggccaccatgtactgcgaggctgatcaagatcagcttcgcagagatgacctcgactacttggaagagcgaaggcggcgcgcggccctccgagccgcgcgctaccagcagagcctgcggcgctaccatcagcgtcacgtccgggcccgatcactctgcgtcgacgatctcgtcctacgccgcgtccaaacgcgagctggattgagcaagctctcaccaatgtgggagggtccgtatcgagtggtcggcgtcccccggccgggctccatacggctggacacgggcgacggcactgagctgcctaacccgtggaacatcgaacaccttcgtcgcttctacccctgaggggggggggtcgggtgtcaggtttcgggctcgggccaaccccgcaccccctcgggcgtgcagggttggccgggggctgccacacatgcactttcttatttctcttttttcagaatttcaataaaagcagtttcaatttcctaaaggttgtatctgtgctgttttttccttttgaagaatcttgacttgaaataggtcactcgcgctcaatcctgccctcgggggctcgggtcggctaaaatcgccaaacggggcccagaaccgagccgtgccccggggcgtggtgaactccgggggggaatcggcaaaaacccacaatcgggtcacccataaccctcggtcaccacgttcccggcctggccagtctcgacatgtggatctccccaggcactagccccgacccgcgccttttgaggaccagaacctgggcacgagcccttattcaagctaaggcacaaaaggactatggcacagatcatcctcatctcatactcacagcaagatgaaattgacacaaaaatttcttcattttttgattacagattaagttgatctatacaaagcccgaaggccttagaagaaagaaaagaagaaaaaactgaagaatggcgggggtctgggggctcatcccgatgcgcccggatcgccggcctcgacgtcactgtcgtctacaccaccggcattgccctcatcgtcggagttgggggcaaacgcaagccgaggggccgagccctcgaagctgtcgacgatatagtcggcggcgtcccggacttgcgcgcgcgcgcggttctcagtcccaggagggaactcatccagcgccatccatggagagaagttggggtccctggcctggtaactcgccaggacgagctccaccgctccttgggcgaggtccctcgaggatgacttaattgtcttctcgagctcctcggggagccgttggagagccccggccatcttcgagaggtgctgggcgaggcctccctggttgtcggcgtactttacggtccgccctctccagaggcccacttgccgaccggcgcgatctaggcgggagacggcgtcccaaagcatgccgggcccgacctcgcctgccaagcggagggcttcaacctccccggcggacgagtccagcgcgccctgcagaacggcgatggtgtgttcggcatctgcgaggcgggcggctaagtcgctttcgcccgcggccgccccgccgctgagcgccctcgcttccagctccttcgcccgcgcttcgagctcagcggcccgttggttcagtgcggccctctcggcgcgggcaccctccagattgcggcgcgcctgctcctcctgcgctgcctcgcggagggacaggctgtccgccagctgttgcgccgcggcctcggctccctcgagagctcgctcccgctcgatgagcgcgtcctcgcggaggcggagcgcgagctcttcttcggcgcaggcagcgtcgtgcgccgccagcgttgcttcccggatggtaacggcggcctcgcggtccgccagatccctctccacgacgcaggcgcgctcttccagcgccatggcgcgcgcctcaagggcctcttcgcgccgccgggacgtcgcttcggtctccgccgcccgctgttctcgggcagcggcagcgtcaagcaccccctgggcggcgtcgagcttcttccttagctccgcctcccagctcccgtattgaaggcggagggtgtcctgcgcctcgttcatcacggtggtggcgatgagggcagccccccgctccttctccacttccttggcgatctccgccagcaccttcttgcgggtttcaagctccgagacatgccggcggtgagccttacggcccacctccaccatggcctccaccgagcgtcgcccctcttcgacacgcgcccacgcggcgtcgagctccgcccgctctgcctgcagggcctccacctgggcacttaacccgtccaacaccgtggtgtttgcggcggccaaggcttgcagaaggggctctgcgctcagtagggcagcagaaggcgtggggaaaagccgcctcggagaagatgccacgcggctcggcccgccgatggaagtgccggactcggggatgtctcccggacccgtttggtcctgagcgtcgcccgagggagtgggcccaagcgacgcgcccgccgcctcgtcgccagctgccccggaagttgtcgcctgagcgtcgcccgagggagtgggcccaagcgacgcgcccgcagcctcgtcgccagctgccccgggagttgtcgcctgagcgtcgcccgagggagtgggcccgagcgacgcgcccgcggcctcgtcgcgggctgcctcggaagtcgccatcgtctcgtcctggcgaaatccggcttcctcccgagcagcttcctcggcctggtgggctcgggcggcctcatcccgagcagtttcctcggcctggcgggcccgggcggctccctcccgagcgatttcctcggcctggcgagcccgggcggcctcatgggcggcctcctcggcttcccgtaggcgatccgcggcgtcgcgccggtcagcttcccgcctacgggcctctgcggccgccggatcctcggcctcagactggccggacttggaatggcgggagggacgcgacgggatctcgctgaacaaaagaaaagaccagaagacgaacaagatgggtgagtgaaaactcgcgttgagagaatgaatacagccacgatgggtgagagacgaacctgcgagggggtcggttaaacgaccactttggaggggaaatgaggtttccccgagatggttctgtctcctccatcttgcggggccgcttcttcttgcgctccccctcgggctgcgatgctggcgcggccccctccgggcgcttgctgctggcacgcgccgccccgccccctcggggaggagatgggggaggtgttcctccctgcttcctcttcccccgggcgtcggcagggcggctgctccccgggcccctgccacgggacccagaagcacgaccccctctcggggtagattgttccccccggcggctcccgcctgcgccgtcgtggccctttggagctcgctcctctgaggccccgaccgccatcataatggtcaagatggaggcgcggtctggatcgctgcagagggggaggattccttggggaatgagggccgcctccacggagttgagattcagcacccgttggaccaatatcttgaagtcctcaggagcccagtcccatctcactccctggtgggtcctcatgaagtcttcggacccggtgtactcccaggcgccccgagcgcgccgctggagcggcgcaatccgacggcggaggtagtcgccatacaccatggtccctgtgagcccctgggatcgcaggcccgccaggcggtcgaggacggcgtcatagccatcccccagatctaccggcgcccgccagctggaggcctgcgccgggggctggctcggaagtcggaggcgcgcttcgtcggcgaggggagtgtagaaccagtcgctcttccagtcgtcccacttcttgcggagggcgcaggggatgtagcggttcagcgccggcccccgtggctggaagtagcagccgccgactaccgatggcggcgacaccggctgcacggtgaagaaccaccggaacagccgaagagatgggcgcaccccaatgaacatctcgcacagatgcgcgaagatggccaatgacatcaccgcgttgggggtgaggtgcgccatctggagatcgtagaactccagaacatccatgaagaaagaagaaaatggcggaaccagccctgccattgcaaaggggagaaagaagacggaccgccccgggtagtctggcgccgggcgtccctcgcccagcgtaactatctgtcacaccccgaagttttcctccctagtcaaaattgcaatttataattgaccccaagaaaatgcagaggaaatcaggataaaaccctaagaaaataatgcaaataataatcagatttgacatgtggaatttttcttgaattctacatgtcgaaattcattaacaggatttttagtggaattttcagagctctagaaataattttaaccaaataaaaatcactaaagtgcaattgttaattccagggaaaatcctttttctttttctttttcctttttccccttttttccctcctttttgtccaatgggccgtcggcccatttctctttttcctccccctcctctctgttgggccggcgcaggccaaggcccagcccgacagccggccgcccgcccgcctcctctcggggtcgccgacaggtggggcccacctgtcggacccgtctccctcctcccgccgatcccgctcgtgccgccgccgccgcaaccgacgccgcgcccacgtctccgccttccccgggccacgtcgaccacgcccgcgcgtgcgccgcattccccgcgcccgttcccctctctctcccactcgcgcccgcgcccgagatggccgggattcgaaaaccgaatcccgcctctctctcctccccactcccccacgtcggccgtcgaatcccgccgctcccggccacgtccggttcccccatcccctatttaagcatcgccggcaccccctctcgctttttccccattgcgccgacctctcccgagccccccaacgcctccgcgccgtgcaaccacccgccgccgccgcttttgctactccggccgccgctagccgccgctaggctcgccgccgtctcacgccgtcgccgccgttagcttcgcgcggccgaggtccacctcgtccacccctcctccgtcgaggttcgtcgccggaaccccctccccacgtgcacgggtgagcgtcacctctaccgccgccttcggccatggatcccgatcgccatggtccatctctctctctctaatccctctcttctccttccttagggcacgccggagctcgtccgctatccgacgccgtcctcccgtgacttgccgtcgccgtccgccatcgccttcctccgcgccggccaccctcggtgaggcatcccctcccttcttttcccccttcctctcctcctagagccgctaaccgccgctctccgccgccggacgatcgccgtcggtcgttgctttgcgccgctgccgcatgcgcgccgccgccgtgtgagcgccgcgccgccggcgccatggtcgccgctgtctcgcgccgcgcccgcgcgccccggccgcgaggtcccgcgccgccgtccgagggtagatcggggccgtcggttcggccgccacgtggcgccgccgcccctcctttccccgtgccgctgaccggtgggcccgcgcgccgccacccccttcctctctctcccggtcgctgaccggtgggccccgcctgtcggcgccgagccgcgccccctcgctgacgtcagccctggttaatattgcgcaataaatgatttaaggtttttcttttatagtaataaacacagtgaatcttctaaaattcataactaattcatccgagctccgtttaagcccattcaagtctcagtaaatcaaggaaaatgtgtagaatccattaaaaatggttttgttctctgtttcagtagtcttatagcctgtttgcaatgtttgctttgtatgtcgttagattccgatccctccgacgctccggtgtacttcgagatagtcgccgaggtccctccagcagcagagcaaggcaagtcatgcttgtcacttgatcatattgatcctatattgcaaatgtcctaatgttttctttcaaatatcgcatttgttttgcaattatactatgggagggttacctattgttacagctatgccttttgataccatgctcctttgttagcttgggttataacatgattagattttggactaggaattgcttagccatgcttagttcaactagcacacattggggatcttatttaaaacctagactataggtttatatgataatgttggtttaataccaccgctctggtgttggttaaataaaatgaaccacatggtgggctgtgggtgcatggttttgctagtcgcacccatggcagttaaggaccggttcgcgggatgccctggaagaatttatcgtacttaccacaagccagcgtgggcaacggctgggcttgtagtgtagctttcctctagtcgacgcatccaggcaagggtgggcgtgatggagcggggcgggccctgcgacggcctctgtcgcttccggattcacctaggcacgagaggggactgcccgtcgcccgctggggacgggggtgaaacctgaggtgtggtgtgcttggctagagggggttatgcgaagggtcctgtcacggcctctttccggtatgtcgtggtgacatgtcggcgcacggaaacgtgtcgtggggctgtgtcttgtgggtacagttgtacacctctgatcagagtaaaactattcgaatagccgtgcccgcggttatgggcggtcaaccagattcaccgtgattagtctcaccctagtgtaatctgttgaacttggatagttcaggtggatggctgggcctgtcgcaacgtgggttagcgttggacagcggatgtttaatactgcttaattattacaactgttttcgcattaaattcctgtttataaatgccagtatttatgcaaatgaaccactctagctcttctttgttaattccctgcatcatacccccattccggtatgacttgctgagtacagtgggtagtactcagtcttgctctatttttcccaaccccagaggacgggtatgtgtcagatgaaggtttccccgaggagtaggcttcgtccgtgccgtcgaggatgcctgtggagtggtgttcccgctgcggtttagtcaaggcttaagctccagtttcttttgttttccgctgcatttttgtaagacctttataatgtttgtaagacgtggatctgtatgtcaacattgtcgtttgtgtaccccggctggtcctggacgggggttttaatacacattctgcttggaattctattcgggaatttctgggcgcgacaagttggtatcagagccgaccttgaccgtaggacaagccaaatggaaagacctaagagccctctgaatccttttcattgcatatcttctttgcaattggattttgtcccgggaaaatggggatctgttcttgtggttcaagggaaaaatcttgtcgcttgtttaagtgagatttttcaaaacgagtcagtctagggttttagtaaaattattgggagtttttcggcagtcagttgggatgtgatgggtgaaatgcattaggtcctagctcggtatcatgggttgcaaggtgtttatacttcgtttgttattattaatatgtatctaatttctcattattttatcgttatgtgagtctgtcttatttattcgctctcatgtaaaatgatctatgcataaaattttgctcttatttgattcctttatttgagtctttattgctttatttaaatttggatttgagcatgcattgatcctactcctttgtcttctctagatggccggtcacccacccaaccaccgcggtgaaggcatgatcgactttgtggcagagctggcacgcatgacactggtagtgggctaccccgacgcgccggagtacacgacgattccgccgctcagtggcgagcttcctcaccgtgtccgcttggaggtccatggttacgtggggacttgcctcgctaacatggcggtcgaggcgtcaggaggcacagcagatcacgcttgtcaggaggcagcctacctgatgatggccagactacgggagcgccacaactacattttccacggcacggcgtaccgctaccaccccagtcgagcccacggtgatggcgtcagctccttccgtccaacagctggcgagaacgacaccacctttggccacatgtgtgcggtgatgaggggtttggacaggatgcactcggatctgcacaaggcgaccaaggccttgaatgatgggaagctcatgaggatcgtcgctctgaaggacgagatagcgcgtctgaagaaggagaacgctcagctgaagggtctcccagcgccaggaggagtccggatccgcactacgccccgtaagaggacgactgcacctgtgcgcatccagcttgcgcccaggaacccacctccaccagcagcccccgcagcagctccagctccgcccgcagttcctgcagctccagctccagctcccgcgttcactctctccttcgctccagcatcagccgccagaggttcagccagtggtaccggaggttggctgtctgctactcccagtggcagcggcgagactgatccgtcagactccaggagtcgctcagagggaccgggtgacgagcaggaggacgccttcgactccaccgaccgcaggagccgttccgagcattaggctcgtttttccactagttcatcgactgtctagtttttgtttgttagtttgtgtgtttaggttgcttgtttggggtcagtcgacggtcgatatcatgtgcctatgatatggctgtcttaataaggatgtttgcttgctcttttaagtgtttttaattcagatcagaacaattgcagttttaattcctatataataaagcttagttcttgagcatctgtttttcttcttttccccgtctgttcttccctccagatggtctacaccaggactggtaaccgcacgacaggcgagggcagcaacggtgaagaacgcgttgatggtgtgcatcccaacggcgatcccggcaacggtccgccaccacctcccgagaatccgaccctggcccaagttatggcgcatcagactcagatgatggcagccatgatgcagcagatgcagcagcagcaccagcagatgcaccagaggatgatgcagtacgctgaacagcagcaccagcagtttggtccccctcccccgcaatccaagttgcctgagttcctgcgagtcaggccacccaccttctccagcaccaccaaccccatggaggcaaacgactggctccatgcaatagagaagaagctgaatctcctgcagtgcaatgatcaggagaaggtcgctttcgccacacaccagcttcagggtcctgcgtccgcttggtgggacaaccacatggccacccgcccaccgggtactgaagtcacatgggcagagttctgccgtagcttcaggaaggcacaggtgccagatggggtcgtggcacaaaagaagagggaatttcgtgcactccatcagggcaacaggacggtgacagagtacctccacgagttcaatcgcctcgcgcgatatgcaccggaggatgtccgcactgacgccgagaaacaagaaaagtttatggcaggcctggatgacgagctgaccaaccaactgatatccggggactacgctgactttgaaaggctggttgacaaggcaatccgtcaggaggatcagcgcaacaaaatggacaggaaaagaaaggcggcgcagttccggtccaaccaaggtagtcagcaccgaccgcgcttcactcctggacagcagggtggacctaccaccatgatcgtccgtcagcaccgcccgttccactctggcaacttccaccagggcgctagcggcagtcagaaccaccagggaggccagcccaaccgcggtgcagctccacgcccaccaatggcaccagcacagtcagcccagcccgcgcaagccaagaaggagacgggagcaaaaccagggtcctgcttcaactgtggcgagcttggccacttcgctgacaaatgcccgaagcccaggcgtgccggaccaaggtttatccaggctcgtgtcaaccacgcatctgcggaggaggcacaagcagcaccagaggtcgtactgggtacgtttcctgttaactcaatccctgcaacagtactttttgattctggtgcaacgcattctttcatctccaagaaatttgtcggggtgcatgggttaataagagaggaacttagcacaccgatgcgggttcataccccagggaatagctcctcttcggttcaattcagcccttctataacaatagaaattcaagggtcaccgtttctagccaacctcatccttctcgaatccaaagacctagatgtcattcttgggatggattggctgaccaagtttaagggagtcatcgattgtgcgaatcgcacagtcaccctgaccaatgagaaaggagaaaccgtggtgtacaaatctctagtctcgccaaagaaaggagcctcgttgaatcagattgagacggaaatcccagtggacaccgaagagaagaacttgagaaaattggaggacatacccatagtctgcgagtatccagaggtgttccccgaagacctcaccaccatgccacccaagagggagattgaattccggattgatttggcaccaggaaccgctccaatctataagagaccgtacagaatggcggccaacgaattagcagaggtcaagaagcaagttgacgaacagctgcagaaagggtacattcgaccaagcacttcaccttggggcgctccggtcatttttgtggagaaaaaggataagacaaagaggatgtgcgtcgattatcgcgcacttaacgaggtcacaatcaagaataaatatcctttgccgcgaatcgacgatttatttgatcaactgaaaggagctaaagtgttctctaagatagacctgcgatcaggctaccaccagttgagaatccgggaagaggatattccgaagacggccttcaccactcggtacgggctatatgagtgcacggttatgtccttcggacttactaacgcacccgcattcttcatgaatctgatgaacaaagtgttcatggaatttttggacaagtttgttgtggtattcatcgacgacattcttatctattcaaagtccgaagaggaacatgaacaacatctccgtctggtactcgagaagttgaaggagcaccagctatacgccaagttcagcaagtgtgacttctggttgacggaagtcaaatttctgggtcatgtcattacagctcagggtgtagcagttgatccatcgaacgtggagtcagttaccaagtggaccccaccgaagacagtgtcgcagattcgaagttttctaggactggctggttattaccgtcgtttcatcgaaaacttctcaagaatcgcccgacccatgactcagttgcttaagaaagacgagaagtttaaatggacagctgagtgcgacaagagctttgaggagctcaaaaggaaattagtatccgcaccggttttgatcctgcccgaccagacgaaagacttccaagtctattgcgatgcatcccgtcacggacttggatgcgtcctaatgcaagagggcagagtggttgcatacgcctcgcggcagttgcgtccacacgaaggaaactatccaactcatgacttggaattggcagcagtggtccatgccctgaagatctggaggcactatctgatcggcaaccgctgcgaagtatatacggaccataaaagtctgaaatacatcttcacccaaccggacctaaaccttcgacaacgaagatggttggaactaatcaaagactacgacatgagtatccactaccacccgggtaaagccaatgtggtggcagacgctttaagccggaaaagttactgcactgctctatgcatcgagggcatgtgtgaggaattgagacaggagcttgaacatctcaacatgggaattgttgaacacgggttcgtagccgctctggaggcacggcctacgctcgtggatcaagttagagccgctcaagtaaatgatccggaaatagcagaactgaaaaagaacatgagagtcggaaaggctcgggatttccttgaggatgagcatggcacaatctggatgggagaaagattgtgtgtaccggacgacaaggaattgaaggatctgatactcaccgaagctcatcagacccagtactccattcatccaggcagcactaaaatgtaccaagaccttaaagaaaaattttggtgggtcagcatgagaagggaaatagctgagttcgtcgcactctgcgatgtttgccaacgagtgaaagcagagcaccaaagaccagcaggtttactccaacctcttcaaatcccggaatggaaatgggaggagattggaatggactttataacgggactgccccggacatcatcgggacatgattcaatttgggtagtcgtggatcgactcaccaaggtggctcactttataccagtacataccacctatacgggaaagagattggcagaattgtacctcgcaaggatcatgtgtttgcatggggtacccaagaagatagtatccgaccgaggtagtcagttcacctcaaagttctggcagaagctgcaggaagaattggggacccgtttaaacttcagcacggcctatcacccgcaaactgatggtcagaccgagcgtgtcaatcaaatcttggaggatatgttgagagcttgcgctcttgattttggtggagcttgggacaaaagcttaccatatgcggaattctcgtacaacaacagctactaggccagtctacagatggcaccgtttgaagctctatacggccggaagtgccgcacaccgcttttctgggatcagacaggcgaacgtcaactgttcggaacagaagtattagcggaagcagaagagaaagtcagaatcatcagggaaaggttgaggattgctcagtctcgacagaagagctacgcggataaccgccgaagggagctcacttttgaggcaggagattacgtgtatcttcgtgtcaccccgctccggggagtacaccgctttcagacaaaaggcaagttggcaccacgcttcgtgggaccatacaaaattttggaacgaagaggagaagttgcctatcaactagaacttccgtccaacatgatcggcatccatgacgtgttccacgtatcccaattaaagaagtgtttaagggtacctgaagaacaggctgattcggaacacattgatatccaggaggacctaacatatgtggagaagccggttcgtatacttgacactagcgaaaggagaaccagaaataaggtcaccaggttttgccgtgttcagtggagccatcattcagaagaggaagcaacctgggaaagggaagatgagttgaaagccgcccatccgtacctcttcaccagctcctccgaatctcggggccgagattccgtttaaggggggtaggtttgtcacaccccgaagttttcctccctagtcaaaattgcaatttataattgaccccaagaaaatgcagaggaaatcaggataaaaccctaagaaaataatgcaaataataatcggatttgacatgtggaatttttcttgaattctacatgtcgaaattcattaacaggatttttagtggaattttcagagctctagaaataattttaaccaaataaaaatcactaaagtgcaattgttaattccagggaaaatcctttttctttttctttttc

SEQ ID NO: 23579 - DNA, 1671 bp, Oryza sativa
ttggatagttcaggtggatggctgggcctgtcgcaacgtgggttagcgttggacagcggatgtttaatactgcttaattattacaactgttttcgcattaaattcctgtttataaatgccagtatttatgcaaatgaaccactctagctcttctttgttaattccctgcatcatacccccattccggtatgacttgctgagtacagtgggtagtactcagtcttgctctatttttcccaaccccagaggacgggtatgtgtcagatgaaggtttccccgaggagtaggcttcgtccgtgccgtcgaggatgcctgtggagtggtgttcccgctgcggtttagtcaaggcttaagctccagtttcttttgttttccgctgcatttttgtaagacctttataatgtttgtaagacgtggatctgtatgtcaacattgtcgtttgtgtaccccggctggtcctggacgggggttttaatacacattctgcttggaattctattcgggaatttctgggcgcgacactatctcccggccggtggcagattccggcatgaagcggcgcggcagcccagcctgcctctcgctcacgatgcgggagggcggcagcacgctaccatcgagcagagcggagccccgtgccatggcgccggaaggaagagaagattaagagcgagcacgagtggcgaaggtagggcgcaggaaagaaggagttagggcgcaagcggcgaagacaaggggaataatggcgaagggaaggaaacaaatcccttcctcagtgcctttatacccttgcccggctcctcgcttctcgcgcccactatttcgccccctcgtttctcgcgcccacgcttccactaatcccattcgcccgcttgcggcgcatgaggtggatatgcggttgtggcagtcgaggtagatcatatcgtgcgcgcgttaattacgctcgccaaccgaagcgacattaccatatctccagatgaaatgaatcgccatgtccagattcgtgtgctactcgagtaatgtggcagtcttgaagagaccgctcattattgacagccgagttactattgccgatgtgcgtgatttttgaccattgggtttctgcccaatggtggagaccggtcccacctgtcaccaggccttaggagtggcgtcacgcccgaccgcttcccttgaggagggcgatcgccctggcataacgccgggggctactgtcggtgacatgggatcgggagtatcatgactagaggcttgaggcagacacaatcgcccacgtggcctggcacccccgggggacgtcgggctcgagggtgatgtgttcgccctcctcttagtccccccgagggggtcgggctgcacccccctcggccccgagggtcgaggcgccccgacccctcgtgggttttcgctccgcgcgtatgagttaggtgagcacagtggggctcacctaaccacatttattgcggattggctgagtgtgtcacgacgcatgcaacgtagtgcattgcactcatttatccggtctgtgaccagtcacagaccggtcagatcgcgggttaggtggcgacaggcggtctgacgcacgcctcgccccatcccgtcaggacgagggcttctaggcgctcgtccccagctggagctagcgtgttacctcccagagatggcacgtta

SEQ ID NO: 23580 - DNA, 3430 bp, Oryza sativa
agggccaacgtgcagattgctaagctgacgcgtggtggacaagaatgaccgatttgtgaccagtctgacaccggtcatgtcgccagcagaccgccatgattccgcgtcgcgcctgctcccggcgaaagtggaggtagttgtgggccgtcccatcagaaggcgactcggacggcaacgatgcaaatctccgtccatttatgaaaaggtagagtaagtccccagggagagggggagaatggtgcatgtggtatccccttaagatatgaaaggaggaccttgcccactgaggagaaggagagattttcgagagctttttcttggactgaacctttccagattaggatcctagaacaaaggagaggctggctcatactttgtagctccttcacacacgaatccacctaaaacacaggagtagggtattacgcttctaagcggcccgaacctgtatacatcgccggcgtcttctgtgcttcctgtctggcgaaccttccacatacagattgggagcttagagtctcacctagggtccccggccgaaccggcaaaggggggccagcgcggtctcccggtgaggagccccacgctccgtcagggtcgatcaatagttgggccgatttggagaagcaattccacagctatttctacagtggggttcatgagatgaagttatctgacttgacggcgattaagcagcggcatgatgaacctgtgcacgagtatattcagagattcagggagatgaggaacaaatgcttcagcttgagtttaactgacgctcagttagccgatctggcctttcagggtatgattgctccgattagggagaaattctcatctgaagactttgatagcttgtcacatctgatacaaaaggtaaccttgcacgagcataggtctgcggaggctaggaaaagctctaagaaggttaatcatgtttgtccttacatgtatgggtcggatgacgatgaggatgactctgaaatagctgcagccgaatgggtgaggagtaaaaaggtcataccgtgccaatgggtaaagaattctggaaaggaagagaagtatgattttgatattactaaagctgacaagatttttgatctgctactccgagagtagcaaattcaactccctgctggtcatacaattccatcggttgaggaattaggcaaaaagagatattgcaaatggcataattctgggtcccattctactaacgattgtaaggtttttagacaacagattcaggtggccattgagggaggcaagattaagtttgatgattccaaaaagccgatgaggatcgatggtaactcatttcccgttaacatggtacacagagctgaccgaacagctgatacggggtgcatgaggggttatcaagtaagttcggctagaattataaacaaatattaaaggaaatacgacaagcaacaagaaaggcgtcatgaagaagataatggtggctttgatcctcattggggctgtgtgttcttcatgttctgttggaacgaaggtatgaggctaccatctatcgaggattgtcctggatgaagtgatgttgcagggggttcaagccgattgtacgatggaggcaatcggccaaaacaaacaagagtacctgttcatcaaagattgggcccagtaaaccaacgtggtgattcggaagacgacaaaaataggaagactcaatggtgtccttctggtatttttacgaagaatcagaaaagaagggttcaaagattgaggagtagggaacgcttccaggaggtcgagcaagaaattaatcatcggctaaagaaagaaaaaccgaggcaggagtggcgtgttaagaatcaggctcctgtagcccatgatgttgcagccgatgaggcaaagaggttggcaaaaggaaagagtgttgtgatggcaccagttaacatggtttttaccttgccatccgaattcgggatcgatcaagccgatgtcgatgaggtggaagaggaatcggcttagttggttctatcaccagaacaggcggtgttcgagaagcctgaggggacagagaatcggcttcataaaccattctgtataaatgctatgtcaatgggaatccgatatctaaaatgatggttgatggtggggccgcggtaaatttgatgccttatgctacgctcaggaagttgggtagaaatgccgaggatctcatgaagacaaatatggtgctcaaggactttggtggcaatccatcggaaaccaaaggtgttctaaatgtggagctgacagtcggcagtaagactattcctaccacattttttatcattgatgggaagggttcttacagcttgttgcttggaagggattggattcacgctaattgttgtattccttcaactatgcatcaatgcttgattcagtggcaaggcgacaatatagagatcgtaccagccgacaggtcagttaatgttgccagtgccgatttagctctttgggagatggatggccttgattgtttatctggaaaagtttggaatggagattttctaaaagtgtccgattctgatatacagccagttgaagatggagaacccaagctattattttgagggcgtcgtggagggttcaaatgtctacgctaaggatacggtagatgatctcgatgacaagcaaggtcaaggttttatgtcggccgatgatttggaagaaatagatataggttcaggcgatcggccaaggccaacatttattagtaagaatttgtctccagaatttagaaccaagctgatagagctcttaaaagagtttagagattgcttcgcttgggagtatcatgagatgcctggactcagccgatcaattgtagaacatcgactacctatcaaacacggggttaggccgcaccagcagcctccgaggagatgcaaagccgatatgctggaacctgtcaaggctgagattaagcatttatatgatgctggttttattcatccttgccgatatgctgagtgggtttctagcatagttcctgtcatcaagaagaacggcaaggtgagggtatgcattgattttagagatctgaataaagctacaccgaaagatgaatatccaatgccagtagccgatcagctagttgatgccgcgtcagggaacaaaattttgagttttatggatggaaatgcagggtataatcaaatttttatggctgaagaagatatccataagacagcttttagatgtcctggtgcaatcggcttatttgaatgagtgttatgactttcggcttgaagagtgctggagctacatatcaacgggccatgaattatatttatcatgatctaattggttggctggttgaggtttatattgatgatgtggttgttaaatttaaggaaataaaagaccacatagccgattaagaaaagttttcgagaggaccaggaaagggctgcag

SEQ ID NO: 23581 - DNA, 651 bp, Oryza sativa
catctcaatcggcttctaggaaattaagatataaggcgttgaagtacactcgattggatgatgagctttattatcggacgattgatggagtgttacttaagtgtttgagtgccgatcaggctaaagttgcaatcggcgaagttcatgaaggaatttgtggcactcaccaatcggcccataagatgaagtggttacttcggcgtgcagggtatttttggccgacaatgctggaggattgcttcagatattataaggggtgtcaagattgtcagaagtttggggcaattcaacgagcaccggcgtcggctatgaatcctattattaaaccgtggccattcagtggttggggaattgatatgatcggtatggtaaacccaccatcaagtaaagggcataagtttatattgatggcgactgattatttcaccaagtggtggaggccattcctttgaagaaagttaattctgagatgcaattcaatttgttcaagaacatataatctaccaatttggtattcctcaaactattacaactgatcaaggttcaatcttcgtatccgatgagtttgttcaatttgccgatagcgtgggtatcaaattcttgaattcttcaccatattatgcacaagctaatgggcaggccgaggcatct

SEQ ID NO: 23582 - DNA, 6525 bp, Oryza sativa
aaaattcacaaggtaaagctttcccttgagaacacacttaaagactaccgaggaatcattccttctatagacggtcacatcaacatcggtaaaaagacaattgtaacccatagaacataattgagaaacggacaaaagattgtagtttagagattttaccaagagaacgttggcaatagaaagatcattagagattgcaatcttacccaatcccataacgtttccctttccatcgtccccgaagactatgttatcttgtgaagtgccatttggatcaagagatgaaaacattgattcttctccggtcatgtgattggtgcatccactatcaatcacccaacttcttccaccagtgacatattcctacaagggatcaatttctagttttaggtacccatacttgcttgggtcctctcatgttagtaacaagtgccttaggcacccaaagaactctcttgatagaaatattcttgccccttgggcctacatacttagcaacaacacgaccactagcattcttcctaagaacataagatgcatcaaaagaacaatgtgaagcacaatcattaggaaggatacttttggccctaacaaagttgctaagaccttggggcctcttgatcatcacactcttgtccacctttccttttggtggaggaacatacccaagaccctcatggttgaagttgtccctttgatagcctaggtactcttttagggccttactacccatatggcacttaagtaggccattgtgaaggagtcccataagcttctcattttgcttttgcaaagcactcaaggaaatagagttagtagcacaagcttcaatatcaatatctttgcatcttgcacaaggttcattgcttggggcaattttggagcatgatgccttgctagggagagagacactattctttaaggtttcaaacttctcttcaagagagaggtaagctttatccaagccatccactctctcttgaagttgagcgtttgccacctcaagattagcatgagactctttggtttgcttgtaaagccgtaccaaagcctcatttttctctctccttagcaagttcgcacttgagttcatgagatcgctctttctcatgaatgagcaattcctcttgcctctcaagtgttgcatattgatcctcaattctcccaagcaactcactcaagtgtggtatggattctgtcacgcccggaaattcactagtaatttccgaacttatttgtgcataaaatcctcgtccaggaatcagccgaggtacacaaactgacaatttaatatacaaatccatcataataataacgttacacacttacaaaagaaaagaaaacagcagcggaattaacggtctagcgatggcttcagctccactcccacaggcagctcaactggggtataagccaaacgtcttctccttctggatcctttatcttcaactgaggttgattgattattgcaagaatgagcatatgacatactcaacaagccacacagcaaatatgcaagtgcacaaggataccaaaggatggcataatataggctcatttgcgaaagcagcatttagcaaagagttaagagtagtaaaacagtagagtaattaattaaaaattttaatcaacactgaacagcacacccatgctgtacaggcccaaccatcctgaacaaccatacccggctgtacagatctaactccaaaccaggagctaagcaaattattatcaggtattaacatccataattattgtgagaggtgtgagactaatcacgaaaaacattgctcaactcgcccataaccgcgggcacggctattcgaatagttttactctggccagaggtgtaccactgtacccacaagacacgattccacacatgttgccatgccccgaaataccaccacggcattgcaaagggggaaatcgtgacaatacccttcgcacaacacaactcaaaacagtgcaccgttcctggatcataatcacccccttataaacaaggcatggactccccagcgacccccatggacttctcgccacttctcagtctggcgcactataatgaatcatgctatacaaaagataaagccgttgcccatgctggcttgtggttggtacggttaatgtttcacaacagtagctcgcgaaccggtccttaattgtcaggagcacgactctcaaaaccatgtgctcacaacccaccattatgaagttttagttggcaagtaattaattaaccaatcacgattaaccatcgtgaactatcattaagccatccttaaataatagtgagtcataagttatcccaatagtgtgctaatgtttctaagcatggctaagcaatcataactaatatctagctgaaccaatatataaagcccaactagtcaagttataataacccaaggtatcaaggaataaagtaatcaatgcaaattggccataacaaaggaataagttcacaccacccggtgacattcgaaaataaatgcacagttgaaataaatagagaatttaaatataggatcaatatgctcaaaggattgtgtttaggatctgtgtgacttgccttgcaataatcggccttcaagtaatcttcttgatcacttccgacgcactcacgaaccttcgcaacgacggaaacgacaagctaacacgcaaaacgaagaaaaagactaataaaaaccaaataaacagtacatataaagtaaacaaacatgtagatcatgattttagatgaatttagcaacttgaaccactcaaaaccgagttacgatgatttagttatgaatttccgaagatttaatctattagaaaaacgggaaaaagaaaaaccgatgacgtcatgctgacgtcatcaatggcagccgactcggatggcaagctcgccggagatagagcgaccggctgcggatttggaggacatgaacacgtagaggacgacgagacgaacccaacgatactcaccctcgtgccaaacgacgaccgacgacggccggcgacgaggaggcgacggcggcggctcgggttgcacggggcggcggagctccgatgaccggcgacggaaaaggaagggtggccgagcttcccctcaccacggcgcacccaacggtggtgacggcgaccggcgacgacgatggagacggcggcgcggcggcactggagatggccggcggcggctgtttgcttggcggcggtggcgacggagctacggagcacggaagaggacgggagagggggcaaacgaaagaggaggactagggggtcctatttatagccttggattgaagagatcggactcctcccgcaagaaatcgatccgggaaatcaaaaactcggttttggagataaactcaaaaacgagttcgattcggataaaatactcaacggtttgctccgattcttgggggtaaagatagaggaggataagaggaatatttcccctcaacaaaattggagaaaaagagcaacggggaggcgagatttggaaggaagaggcggcggcactgtgcacggcacggctggctcgggctctgcctgagttggaagatgaacagtagcgcagggagggaaaatagacttttccggctaggctgagaggagaggaggcggctcaggttgggccggcggaagagagaggaaggaaaggaaggaatgggctgaaaatggcccaagctgaggaggaggattttattactttcccaattaaaataatcacttaaatgatctttaaattattaaaaatacttccaatgctcaaataatttcaagaaaaatcctgaaaatacttggacactcaaagtacttaaaaaaattacaattagaccatttaatgattaatttaatatgtgggtaattactgaaatgctctttgtatgattaaaaattaggaattgagctccgaaaaatctgagaaaattccagagagtataattaaccatgaagaatttaataaaaattaaatccatccatgctttatatttaggaaattttatttcccacatttaacttcacttgtaaattaatgaacatttaatataaattctgataataatttattaaataatttataaatcctgaaacaaaaatcagggtgtgacagattccttggttatggatttaagcaactcatcatccataacttcatcctcaacctcatcctcctcgtcactaataaaatcaacattaaatgacttgagaggagaaggtaccttaggctcctttgccatgaggcaaatgggagcatcctcatcactttagtagtcgaagagtcttggtggtgatgaaggcttgacggcgaacgtggcgactccttctccatcacttgagcttgactcggagtcggagctgaaaatcatcccaaggtgagcttggccataatgttcccgcttgctatgcttatacttctccttcttctcatccttcttcttatcttccttgatgtgggaaccatccttgaggtgagggcaatccgcaatgaagtgcccgggctctttgcacacgtagcacactcttgcggaatgtcttccacttgacttgctggagtgatgcttggaagaatttcccttgaagaagccgcttcgcctcatgaacttgccgaacttcttgacgaagagaaccatttcttcatcatcgatctcctccttgctcttgctcttgtggctctcttcttcttcttcctttgccttcaatgccaagtcttccttcttgatgcttgtcgttgagctttggttgatgtattggatgacctccttggactcttgcacaagaatgtcatgggcaagaatgcgtccgagcaaatcatgaggtgtgagagtcttatagtccggacgctcacgaatgatggtaaccaaggtagagttccttggagtgattgctcgaaccatcttcttgaccacaacctcatcggtcatgtccttggagccaagtcccttgatctcattgacgatcttgctcaaccggtcatacatgtcacttgggctctcaccatccaacatcacaaatctctcaaattgccccttgaagatctccaccttggactcacgaacactatccgtgccttcatgcaagttccgaagcgtgtcccaaatcactttggcactctcaatgccatccacacggttgaactcacttccactcaaggcactaagtattgcattggcggcttgagcgttcttgtgcttattctcgtcgtcctccttggtgggatcttcgggattctgcaaaacatagcctttttcgactattctccaaatagatgggttaatagacttcaaatgcatcttcatcttatgcttccaagcggcatagtccgtaccattgaagtacggagctttgctgctataggtactcacataagatgtggatgtagttggatagtgataaggaaacttagctcccttatcaccatctttgccttcccccatttggcccgacatgatccctccaagcggttagcctaatttggagattaggctctgataccaattgaaaaggtcaattaggcctagagggggggtgaataggctaatttaaaactttatgccgaagctaaaactgatagtctgatccacagtcagactatccgaaaatatcagatagtctgatgttggatcagactgtctgatccactaaaagaacactacaagtagatctagtgcacaaacaagagtatggcccaaacagcgactagatttatagcggcacaaaaaacaaagctaaataatggaagaagagatatcaccaacaatgaagttcaccgagttcttcccggagttcaaatccttgaggggattctactctccgttgaggagctcactaagagccgggtctttgctaacccttttctcaagaggttgcactaagcactcctccttccactaaggggtatctctttccttgtggaggcgagatccggccttcacaaacttctcccggccaaccacatgtagatcggtggctcgggagtgacacctagccgtctaggagtcctcaacctccaagagtaacaaacatcacacaactcttggtcaaccctagtgctcaagatcgagtgaaacacacactaggccctcaaaccccaaatccacaaccaccaagatccaccacacaaagaacaagaggggatttgagagagggagagagagctcaaagatccaaagcaccttagcaccaagctcaacccaaagtgaatgtgaatgaatgagttgggtaaccctagaaaagggttaggtggggggtattcatagaagcccccaaaatgtggccgttgggagagaatcttttcatcccacctcggaaagtccgaggtgacatcggatagtccgatgtttttgacccccaagcaggccagagacagagaacgaaattctagagaatttcggacaatccaatcgatcggatagtctgatgtcatatcggatattccgttatttttgaaccaagaatttcatcctctcacagagactcaagttccattgaatttcttagtctctggatcattagatactccgatcatat

SEQ ID NO: 23583 - DNA, 530 bp, Oryza sativa
gatccatgcttgaggtagagggaacgtcggcttgggttgatgtaggtggctccacttgtgttgaggaagaggcttggctccctaggacgcacgttcccaagagccaatcttttgattgcttcgcttggatcctcctcttcacctaacacatgtgagtcaacttgctctacttgagagccattagtttcgtcaaatgtcacatcacgcgcgatttcaacaataccggaggttttgttgaaaacacggtatgcgcattcatttgacccatacccaagcaagaatccctcatccactttgggagcgaacttagaggatctagccttcttattaagaatgtaacacttactaccgataacacgaaagtaagagacatttggtttattaccggtaagaagctcatagggagtcttcttaagaaggcggtgaagataaaggcggttgatggcgtggcatgcggtgttggcggcttggcccaaaaacggtccgatgtcttgtactcatccaacatggtcctcgccatctcaatgaga

SEQ ID NO: 23584 - DNA, 18508 bp, Oryza sativa
aagagggccaaaagacttgtgatgcaaaaggcatttgatgtgaccaagggccagtaccagaagctttacaattatcaacaagaactgcttaggaccaaccgtgggagcactgtggcgatcaacagagtgataggtattgaaccacctgtgttcaaaagaatttacatttgccttgatggatgcaagaaagggtttatggctggttgcaggaaggtaataggacttgatagttgcttttccaagggatctacaaatggagagctattgtgtgctatagggagggatgccaataatcagatgtacctaatagcttgggaagtggcctataaagagaacaatgaagaatgtgaatggttttgtgacttgctgtgtagtgatctgagggttggtgatggaagtggatgggtcttcatctctgaccaatagaaggtaatgctcctgatccactgtttgcttttatgttctgtcaattctgtcattacacaatgcatacctaatgtcttgtgcatgttactatcaaatgcagggaataattaatgctgtctctaagtgggctccagaagctgaacacaggaactgtgccaggcatatctatgccaattggaagaggcacttcaatgataaagtgtttcaaaaaaaattctggaagtgtgccaaagcatcatgcagaatgcttttcaacttgccaagagcaaagctggcccaactgacccctgctagagctcaagcaatattgaacacacacccagagcattggagtagggcttggttcaggttaggatttaattgtgactctgttgataacaacatttgtgaatctttcaacaaatggattcttgaggctagattctttcctatcataacaatgcttgaaaccattagaaggaaagtaatggttaggatccatgaccaaaaaaaatgttctaatagatggagtactgtcatttgccctggtatacttaagaaacttaatgtgtacattgctgaatctgcattctgccatgctatatgcaatggggctgacagttttgaagtcaagcataatgagcataggttcatagttaacctagatatgaaggagtgctcatgcagatattggcaattgtcaggtttgccatgtcctcatgcaattgcttgcatctactatagcaccaacacactagatgggtgggttgctccatgctattaagtggaatctttcaaaaaaaacctatgcccattgcctgcagccagtagagggcatgactagttggccagatgatcctagagagcctctcaatgccccaggatacatacagatgccagggaggcctaagactgaaaggagaagggagcctaatgagccagctaaacctaccaaagcttccaaatttggcacaattatgaggtgcagatcatgcaagcaacctggtcacaatagcaagggctgtcacatgcacagtggggcaggtggtagcacatctgcagctgcaacatctgctccaggaaatacagtcactgcaaataacaacttagtgttgtcaagcacacctagcagcattgcacaaagcaggaaaaggaaggcagctgagctcagtactagcacatctgcttgccacactaggaagagaacatctcctacaaaaaaggtatgtcagccagtcctcattcaattaaacttttgaaattaacattcatttgctaacaacacttgtttcttttccttccagtcagcaaacacaaacagttcacttgtgaaggttgcagccagtgctaggctggcaactgaaagaggtggttcaaccagtgtgaaacttcaggccatagtgccacactctcaatgttcttcttctgcttcaatgaggatcacttctgagaaagcaagtgtttatgtgcaagctcaagaaccagccactaccaagcccaagaaaacacctacaggtccactgatgctgattcccccatgggaaactgacaagctgtgatgccatattgtgctaactatgcaatgttatgtgctttttgtgtattttggcagactctaagccaactatgcctactgtgaactttatgtaatttggcagactcttagccaactttgcctatctgtttagtttctgtaatttggcaaactgcttgccaactatgctgtgatatgtgcttgttctggcagactgtaagccagctaagctatgtggattgtatcatctaaattgagtgactttgctcaaatgatgtgtcatagcctaatctgatatgagatggtatttactgagctgatctgatgtgatgaattgactcttatcaatttgttatgctaaaatttatgtgcaaagttacgaatactcagccactgcaaaagatgatattcagtcacaattcaaccaaccactgcaaagtcagctcaaatatatgcaatgtcagtgtcattactgaatatcaatcacaattcagccaaccacaaatccattcacttaacttagatagtcaaagagcacagctcagtttcttggcaaaatgcagcaaaatgctttcagctaccagcattttgacacatagattaacacattgcacctcacagctgaactaaaatcatagcaaacaacacaagcatgcatcccaacgacatcagtacaagccaaactctctgtttctctagcctactgttacttgctctcatagcagccatgttagcttcattctcagctgccacaatcctcaattgtgccacttcattcattgctacccctaattctaggcactgctcttctacctttggcctcagttcttcaacacaatgttgcagctcattcttctcccttcttagcgataacacggcttcatgaagatcgttcaacagctccctcaaaaaactacttgttgcaggctcataccagtcaaaaaaatcgcagccggcgccctgaaaacattacatcccaaatcacccaaccatactgccagctcaaacaaaaaccaagcaagcaaacgaaatcttcatcactcacccgattgcggcatcggtagtaccatcgaccagggttgtccacgctcccggaaatcccccgtgccgccttcgcaccacatcggcacatcaccgccggctgataatcatagggcccaactcgcgccgggatgggagcacgactgctgggatgcgacgaccccgacgaccggtcactgcaataactcgccatcgcctagcctcacctcctcttgtcgcccccgccgccgccgccgccgcttccgccgccgccgccgacctaagctagggtttcagctcgagaagaggaaaatgtcgcggcaacgcctggaaacagcgaggacagagcctttaaccccgtctattaactccccaatggtggactaaccagtgggtcccacagcgcgacacgtcaacaaaaccgggcaaaaactgagtcaatactgccgagggaccttctacggacggatttagtaattttaggggtacacatttctggtattctagtttagggaccttaaaaaatctcggatttagtaattttaggggtacacatttctggtattctagtttagggaccttaaaaaatctcggtgtcaatttgagggacctccggtgaacttattccatgtaaaaacacgaggcctgggagatctgcttaactccagtgtaagtccagaagcttgcctttaggtgtatgagcgtgccagttgatttgatcctgcaatcaacaagaaacaaagacaaagaaaccacggttaaatccataaacgatagccgatcggctaattgccgatgaagtatcatttatcttggagccgatgtcatatgtggatcgatcggcaatcatgaataagtaagaaagaactaattaaatctactcgatcagttgtagatattaacaatatataatccttatgtcgctatatacttaaatcaagtgattgggattgatctgtcgccatgacgagacagtataaatcacatagatcgaagtatatgttaacaacgagactatatatgttcatagcatagccgatcagatagatctagcatgtataggctaatactccgataccactctatatcaagatattaaggcaagtagaatacaccaaacaaaagcctaatatacttaagggcagatttaacatgtcaattaagcatatgagaaaatggtagttaaatcaggtaagatcggctgaaactctgacgctaccctaatcggcagccaaaggcagcctagagattgagattctaatcatcactcataagattaaactcaactgatgcagctataagtatgaaaagaaggacaatatctagacaatcaagtcgttggatgtttcatagagtggtagatatcctatataatctaagtcagcatcgatatttaacctaatcggctgccttctagtaacagacgttagccgattagaggttagatagcgatattgccagagattatataagatatatgaaaactcgacgaattacataaacaagattagtgtatcataaagatggaagcactaatcccgagaacgcaagccgccataacgagttttacctctagttgaagatcgaaaccgatgcagctcaacccgaaagcaagaactcgtcaaaacaaaatgaaagtaaaaagggtggcgatgcgccgagattgtagtgaacgtgtgttagttcgattatatggggctcgggtctatttatacccaaaaattacaaaatatgtccatatcggacacgtttcttatctctaacaaactctaagataccataagtctttgcagcagacttttgcccaaacatatctctaaggaaattacataaaatatcctacttaatagatacaattgccttcttaggactctatccatgtgtggcaatcatcatgaagcacgtcattctaacccgacaacatatgccgtgtcatattgtcggattcggctcaatcggctaaccctgtccgactaacacatgccccccaagtccagaattttggataatgtttcggatttgccatacgtcgactgcgagagaatattgcacttgccgttttccgaccgttattccaacgctttaaatactaaccgttgtccccgagaaatctcacaccgtttcctccgttttcaccgccgaagcaaactccgtcctctctctccgatgatcccctcggtgcacgaagcgattcccaggcgatttcctctccggccaactttctgcccacaacgatgtagacctccgccagtccatccgccgcatcttcaaccgagtacgcagaggtaagtttccattggctagatcctctcttttcgcatcagattagttttccctttccttatcttgttttcttcttctctgttcttttggatccgtagcaactttccaatctgatcgcagttccgagtttgtcgcataaaaaccactactttcttggtccaatcggcaatcccaatcccactgagtttatcattggtgaaaccaataggatccctttcagattagctaacccgaatctaggtcactggaagaatacttttaaatcttggccagccctcgagaaaacttcacccgagaaaagctggaccacatggtacaagcgtgtatcggctagcaagcaaacacactgggatgagattggaatcggtcaagcacttgcccttaccatagcgaattcggctaaggatgaacccctaatagctgccgccacctatttctcgtccaataccatcaacgcctttttgttgaaccaagggccgatgacaccaaccctgatagatatcaccatgatcactggtctagatgtgacctcatcggctaaccctacgagtctgaacaccaagaatcaatatgacttcaagaccaagagcataggcggttggtctggttacgtggcagcatatatgggccaaggatctgttactgctcaagaacacgtggcctttttgctcatgtggctagaaaagttccttttctgtggatccagttgtggtcctacaaccaactggcaatttgtagccgaggctctagaatcaaaaagacaatttcctctaggcaaaatcatcctcggctacctataccaaatgctgaacaatgcatcgactaagatagtcgtcggctcagtagttggagcaggtggaccatggtggctgctgcagacttggctgaatctggtagtcatgaaagctgtcaatcggccatccgtgatagaagccgaattcccaagactgcagccgattgtagaagatgatggagaagaaagcactcatcgtagatgcatgtcatatggagaatatgcattcacaccagccgatgctggagcgaagttatcagccgagctgctcaaagattggttctgcagcttctatgagggttttcaaaaagatgctcgagtttggtttccttatgaagattcagtgcatcttgatctcccatcagactttagattcgaagatatcaacaatgaaaaatctcaaaaatctaaagaagtcttctcagctgcgattagcccatgcattcttcctgtcggcatacatcaagggaggaacattcaggtttcctatgaattttatcactcgatgagctctgccagaccacttgggatgggtcaactaccaatcggcttgctctttgctgataaaattcaatgccgaggagaaatctcatcaaccttgatgatggatcggctgctgaatatccaaggacctcctttgggcagcattgaaaatatagagctggcaaggttcaggagcaagaactttgacagatggtggggtgaatggaagctgtatttgttccaccaaccggcctcaatatatgtgacagatctctttcctaatgttatccctcaggtaaaccttgacttcattaatttcttttgaacaattgtcagccgattcataacttgactaatcttctcttctgttttgcagacaacagaatcttctcctccacaccaaagcaatagtggcagagatatagagtatgccccaggcctcttgccaaatggtggttgaccaacccctccagttatcagctatcatgcccccaagaccgcaagtctgcttcaagggcagatgatagagccagccgataccggcaggaagaggaaacccagggcaccaacaatcgatccattagttctggctcctaagaagaagactaagaaacaaaaacccaaggtagctgatgatctgcctgccctagatccatccattgagcaagccttggatgaactagagattgaagaggatgttgacgaagctgcagccgaggtaagtgatacagaaagaactccatcggcttcacctaaacagactcctccgactccttctactccagctcacttctctagggtaaacagctctctttaattccttcttccaattgttttattcatagttgattactcataaatcttgtcttttgcagaagaagaagttcgctgtgaagaagaaatcggcagcaacccaatccaaaccaactctgccggtaagattcttctgaaaatatttcagttccaatcatactctatgtggactaacatctattttctttagcctcctcctcctccttcacctcctgtacagcatatgtcaagtgaatgaactccatttgctgtaggaagccacaatattgaggaagcagaacaaccagccgctcctactatcccagtaagtttccttttgacacaaggatttagatcggctatatctatttggcatctaattctctttgaattatttttgcaagccttagccgatctgttctcttttgatatcaaggactacttatagaagaggacaccacaaacaaacccttagctcccttatccgatgatgtgaagaagactcttgaagatatttctcatcagctagaggcatcttctctagacaccttggtggtagattgtggatcaattacgactcggctacacgaagttcaagctctgattcctgaagaactagccgatgtcctcactccagctgcttatcttgaaaagcatcaattcaaactggagaaatgacacgcccagaaatttagcccaaatttccagactattttgtgtattaaatccctgtccaggaccagccagggtacacaaaaagacaagtaatacacagttccaaacgtaaataaaagcgtaaatacttacagaagaggcacttagtcctcacaccgaaacgaaagcagcagcagcggaaaaaggctatcctagcggggcttcagctccactccacaggcaaaactcaactgaggtctgagccttggtcttctaacttcgtcttcagctcagaagcactacacttctgaaaaagggggaataatagcaaggctgagtacaaccaccgtactcagcaagccacaccaatgatgcagacgtgcaaggggaacacaaggacggtttgtggctatttgtataaaggcggttgtaaaacattttattgagcaaaacagtaaaactgttgagtaattaaggtaatattaaatctccactgatcaacgctacaccacgttgaacaggcccaaccaacccacctgaactacagtgcattgggttgatttattaaggtggaactaatcacggtgaatctggtcgaccgcccataaccgcaggcacggctattcgaatagttttactctgactagaggtgtacaactgtacccaaaagacacagccccacgacacgtttctgtgcgctgacatgccaccacgaaataccggaaagaggccgtgacaggacccttcgcataaccccctctaaccgattgcaccacaccttagggttcgcccccgtccacagcaagcaacgggtagcccccctctcgtgccgcggtgaatccggaagccaatcaaccggaaattttcccttaaaaaccattggccgagaatattttgcaatattctttgtgccctaaaatactctctgaaatttcccgtcaattttcggagctcaagagataatttcaaagtcacaaagatcatttaatcaatttaaataaaaagaaaaacaaaataaaacctcccttcctccttgggccattttcggcccaagtccctttcccctcccgcggcccgctcaccctatctccctctctcggccagccttcccttcctctcacgggccgtcgacccgtcttcctcaagactgctttgcgtccctgtgccagcctcctccctcctcccctcactgacaggtgggacccacggccccacccgtcaggcccatccccttcctccggctccaactgtcgccatggctgcccgagccaccccactccgccgccttttctgtaccaccccgccaccgccgcgatgccaccggaggaggacacgaggccggaggtcgctcagagcggcggcgagggatggccagaggcggtaaagatggttgcggctcgggttggcagtggaggtggaattccaacgatggaatggggaaacggagtggagaacgagcttgcccgcaaggcggcgaagccggcagtggaggcggcacagcacagcggcggcgggagcggcggtggcccgtggctggaggcgacgagaggctgttgtggctcgggtgcacggtgaaaccggtgcccgggtggtttattgcagaagcggagcggtggacggggtgcggcaatgcgtggcgaggccggcggcgcaaacggcgcggcgcggggacggcggcagcggccagctggagggtcgtcggcgagcggcggcacttgggatcacgtgggaagagcgggagagagcgcggggagtgcgggaaagttggggaaaagggagaggatggccgggggagtgattttataggctcgggagggagtggctcggccgggatgggcggcaacaggcatcgaagtgggaggcgacgtggagctcgtggggaggtcaaactggtgccgtttttttgggggaaagtgggggaggagagtggaggaggtggaggggatgcggtttctcttgattcggatgcggtttctcttgatacggtgtacctcttcgattatcctttgctaactcttcctgggttgacggactattaggccatgcaattgcttttccaaatatactgcaatctgaacgtctattggaaactgcctttgatgttgccgagaatttctgccctttgatcataacaacttcacatttgtatcttcggtaaagatgatccgtcgagaagaggttctctgccatacgccctgctgattacacctttcgggacttgattcttgtatgctgctgacccatgtatggaacaatttctaccaacttccgagaaacatcatgatgatttctagaatttatattagttgccttgaactaaggaaaaccatccatgattcataatcacaccactaaggtgtaattattgcatagttaatttctcaaaactgaactgaccgactctgcattggaacagacgcagcttgacaaagatttgtaacgccccgattttctttcgggattaaaaatcatttaataatgcattcctagaaattaaataaaatttaaatcaatttaatcaagtgaaataatgggagaattaaaatttcctttaaaaatcattggccgagaatattttgtaatattctttgtgccctaaatattctctgaaattttcccgtgaattttcggagctcaagaagtaattattataatacaaagttcatttaatcaatttaaataaaaagaaaagaaaataatcttccccttcctccctttcaggctcggcccaaattccttcccccttcccctccggcccggccgcccataaccgtctttgggccgctcggcctgctcgctcccctccccctccaagtccacttcgcctccctcccagccttccctctccctccggctgacaggtgggacccatgggctccgtctgtcatctcctacgtccagccaccccacagcaacttccatggccgctgaaaccatcccactccgccgcaaaatccgccatctcccgtcccccgtgctcgcgtctaaccccacttgcttccccacgtcggcatcccactccgccgccggttgccgcctctcccaggccgccccgttgccccgagccctataaaaaccatccccgtgccatcctctctcgtttcccctcctcacccaagctcgtcgcgctttctcccgcactctccacgccgcccccatctccgcggctctccggcgagctccagccgccgccctcgccgccgccacaccgcgccgaggccacctccggcttcgccacctcacgacgcacatcggtcgtcgctcattttccctaaacaatcactgttacaccgcttcccccgcaaggtcgagccatcgccgcctgtaccacctccagcagccgctcctcgccgctttaggcaccgccgagccgtgccgccgcaaccgccagcatctcccagccgagctccaccccggcccttactctttttcccctatccgcctacgaaacgccgccgccacgctcaccacctctcttcgtcgccattgccgactccaacggcgtcgcgccgcctctccggtcgacgccgacttgcgctgccacctccttcggcttcgcagggacgagggcaagcccggccaccactcttccgaaacccgccctcttcgctctaggtgagctcctcctcatgtgatcgtcgtcagccgccgttctcggtcaccctgcaccaattctccccttcctaaccctcctaccatctctcccaggccgcgctacactgtcacgcccagaaattcactagtaatttcagaacttatttgtgcataaaatcctcgtccaggaatcagccgaggtacacaaactgacaatttaatatacagattcatcaaaaaaaactaaagcaaataatacttactgaagaggcaattagtcctcacatcgaagaaaactacagcggaaaaaaaaatctagcgaagctcaggctccactcccacaggcaactcaactggggtataagccaaacgtcttctccttctggatcatttttcttcaactgaggtttgattgataattacaaggtgagcatatgacatactctgtaagccacacatcaactatgcaagtgcacaaggataccaaagtatggcataatataggctcgtttgcaaaagcagcatttagcaaacatttaagagtagtaaaacagtagagtaattaattatcaattttaatcaacactgcatagcaccccaatgctgcacaggcccaaccatcctgtacaaccatacccggctgtacagatctaactccaaacttggagctaagcaaattattaccagttatagcacccataattattgtgagaggtgtgagactaatcacgaaaaacattgctcaactcgcccatgaccgtgggcacggctattcgaatagttttactctggccagaggtgtaccactgtacccacaagacacagctccacgacatgttaccatgcgcctcaataccaccacagtacatcggaaaggaaatgtgacagtacccctcgcacaacacaactcaccacagttcaccaatcctggatcataatcacccctaaaaaaaaccagaggcatggactccccagcgaccccatggacttctcgccgcttctcagtctggtgccccgcaatgaaccacgctatacgaaaggtaaagccgctacccacgctgggttgaggttggcacggttaatgtctcacaacagtagctcgcgaaccggtccttaattgtcatgagcacgaccttcaaaaccatgtgctcacaacccaccattgtcaagttttaattatcaattaattatcataacacgattaaccatcgtgagctaccattaaatataaccataaataataatgtagtttgattcatcccattagtgagctaatgtttctaagcatggctaagcaattatgtatatagcaattagctgaaccaatccaatatataaggtccaagctaatcaatttattacccatatgaaaataaagtcatcttcggccataattaattgagaaaggctcaccacccgatgacattcgaaaataatgcataagttgaaataaaacaatagctttaagtaggttcaacatgctcaaagggttgtttgggatctgtgtgacttgccttgcaataatcggtcttcaattaatcttcttgaacacttccgacgcactcacgaaccttcgcaatgacggaaacgataagctaacacgtaaaacgaagaaaaagactaataaaaaaacaaataaacagtgcataaaaagtagacaaacatgtagatcatgattttagatgaatttagagacttgaaccacttaattccgacttcatatgaattagttatgaattttacaagattaattccaattaaacctattaaagaaaagactattccaaattaattaaacaatttacatataatttataactgagacataagcctaaaccatcctccggaaattattggaatgaatttagtagacgacatatagtaaaaagaactaatatgccattgaaaagggataacaggatttatattgattttggacggctgagatcaactttgacctagtcgaccaaaattggatggctcggattgatctgatctaaggttttagatggctgtcacgtgggatctgagagacggcgtgacacttagatggtagggacggcagctaacaaggcgatgacatggcaaccatgcgggatcgacgccggcggctctattcggtggtgaggacggcaaacggcggcacaacggcggaaaccgagagcacggggatgaagaggaggacacgacgatccttactaacacttacgcagcgatgaacagcaaaggagatggccggcgacgagaacgggagtgacgacggggtactgatcgatgatggcggcggagtttcagcgacaggagacgacaaccgaggggtgaacgggcttctcctcggtgctgcgaatccaatggaggcggcggcgaccgaaggcgacgacgaacggtgcgagtggagatcaaaccatggcaacaacccacgggttcacggtgacggcaaccttccggcgggatttggcgcaaaagaactggcggccgtggtagagatcaaccttgcggagcagagggaagtggcggcactgatcgggaacggccggcgcgacgggaaaaggcggctggagatggcggccggagttggagagagaaggcgagcgtggggaggcggctagggttagggaaaacttcgggaaacagagggaaaccgaagaggaggccgaggggctgctatttgtaggcaaaggtggaggagatcggctcgagaacggatgaattcggtgaaggaagttaagatttatcccgagttcacccggataaaaacgactgaaattcgtgagatagataacgaattttaagggagttcttggagataagatagaggagatagagaggaatccgtttttgcaatcaattttggaagggaagcaacggatgcatcgaatttgatggaggacacggcggctctcgggaagaacacggcctctggacggctggctggagcttgaagacgcactgtagcaggagggagggcaatacagactttcagctgggcttcattttccaaggcctgattgaaggagggacaagaaatggacttcggaaaagagagggagagggctgcaggctgagaggagactgggccgagagtgagaggacttttcctaattcggcccgaaaaggaaaaggggaatttaattacttttccaattaaattaatcaccaaaatgatctttgaattgttaaaaatacttccaatgctcaaataatttcaagaaaaatcctgaaactaattggacactcaaagtacttaacaacgttataatcagaccatttaatgattaatttattatttaaataattgctgaactgctctttgtattattaaaattaagaattgagctccgaaaaatccgagaaaatttcagagagtataattaaccatggagaatttaatgaaaactaaatccagccatgctttatatttaggaaattttatttcctacatttagcttcacttgaaaattaatgaacatttaatataaattctaaaaataatttattaaataatttatgaaacctaaagcgaaaatcaggatgtgacatgcacctcggctgcttctctgccttcgccggaaaccgtcgggccgccatccgtgccgcctccccgaggagcgccgtcgctaatcctcgtcgccgactgccttcccgtcctcgcctcatcgtcccgtccgctcggtgagcatccctccctctccctctatctccactttgccggccatcgccgtcagcgaccatccggccgcgcgccgccgcctctcggccggctggcgccgctccgccgcccgtggaccccctgtggtccgggtccacggcgtctcctgggccgcggtggacttggtccaccgtgtgccaacccttgtagccactgacgtctggggcccacatgtcggcgccggcctccccttcgatgacgtgagcgactaccttttccctttgaaaaataaatagtaattgcgtcataattcgataataattctagaaatccatttaaatggctcaaaacttctaaaatttatatctaattcattcgaactccaaattgggccattcaacttgcaaaattcatctaaaattaagatctacatgtttgtttactttttatgtactgttttcttggtttttattagagtttttccttgttttgcgtgccaacgtgtagaatccgtcgttttggaagtccacggtcgcgaggaaaagagttcggaagattgttttgaagaagcaaggtaagtcacacattccccttgagcatgttgatcccaatttataaatgttttaccgtttacaaataaacatgcatgtcttgctaattacatgggatccgggtactacctatctgcttgcttgtgctatgtttacttgatatctgtcttttgtcaaccttgggtaataaatcgactagctcatgttacttatgtgacctagctagaactatatgcttagccatgcttaattaccactagctcagttgatgggataattacagtattagacctttatagtatcagaatgagctgcgtgcttgagacatctggccatgctttatggtcgtaattatccaactaaaatgcgactgaatggtgggctgcgggtgcatggttttgctagttgcacccatggaaattaaggaccagttcgcgggaaaccctggaagaatttatcatgcttaccacaagccagcgtgggcaacggctgggcttgtagtgtagctttcgtctagccaatgtacccaggcgagggtgggcgtgatggagttgggtcggccggggtgtctggctgatcggcttccggattcactaaggcacgagaggggggcttcccgttgcctgctggggacgggggcgaaccttgaggtgtggtgcgatcggttagagggggttatgcgaatggtcctgtcacggcctctttccagtatgtcgtggtggcatgtcggcgcatggaaacgtgtcatggggctgtgtcttgtgggtacagttgtacacctctggccagagtaaaactattcgaatagccgtgccggcggttgtgggcggtcgaccagatccaccgtgattagtcccaccttaataaatcgacccaatgcactgtagttcaggtgggttggttgggcctgttcaacgtggtgtagcgttgatcagtggagatttaatattaccttaattactcaacagttttactgttttgctcaataaaatgttttacaaccgcctttatgcaaatagccacaaatcgtccttgtgttccccttgaacgtctgcatcgttggtgtggcttgctgagtatggtggttgtactcagccttgctattatgccccctttttcagaagtgtagtgcttctaagctgaagacgaagttagaagaccaaggctcagacctcagttgagttttgcctgtggagtggaactgaagctccactaggatcgcctttttccgctgctgctgctttcgttttggtgtgaggactaagtgcctcttctgtaactatttacgcttttatttacgtttggaactgtatattacttttcgttttgtgtaccctggctggtcttagacagggatttaatacacaaaatagtctggaaatttgggctaaatttatgggaatgacaagaaagccatgcaaagactagccaaacgccgagaacgcaaagagaatgaatctaccatctaggccaatcggcaactcgtgcatgaagaaaagtccaagcttgatcagctatgtgaggggccaatcaagtctaatattgatcggctcgaagctcgcaagattgaactcttggcacaatttcaagaatgcaacgccaagctggatctggaacacaaaaagttagccgatctcccacaagctgtcgaagaacagaaggcaaggctgtaatcagccatcaaaaatgttgctgatatgaccaagtccctaaaaatcatctctgggaccgatgctcaagatgcccaagccatagaagaagtagaacaaattagccaaagagctatatcggctatccagcgctacttgtctcagtgacatgttgtgtaatagactctatgaatttttgtaatcggctaagaaactctggatctttgtttaactagtcttaatgtgccgattaatataactccatgtttttgctcaaaaattttacaatttttgcacatatatgccccctaattttacaatgacgaagacattgctaaaattataagttgaactaagggcgatatcataatatcggccattgtacatcggtaaaccataaccgattacaatatgaaaaacatctaagggcgatagaacaatattggccatctcaaggcaatgtgaacacatcggctatcatgcatcggcaacaccagccgatcatgcattgacccaaacacttgggtaatatttcttcaagtatttgccatttagcgatcgtccataaacttctccatcgagttcttgcaacacataagctcccttagacaaaacctgatagattttaaatggtccttcccaattcagcgaccacttgccaaatttgttatctcgagtcccaatcgacaaaatcaatttccatacaagttctccttccgaaaaagacttgggcacaactttcttgttgtaatgtcgagcaactcgttccttatcctaggtaacttttgcaagggctcttaatcttgattaaaccaagtcttccctttcatcgtccatgagattataatactcatcggctatcaaatcattttgcaactccgttcttcttgagccaattctaacttcccatggtaaaacaacctcatgtccataaacaagcttataaggagggacttggatcgatctatgaaaagccatccgataagaccataacgcttcggccaatcgagtatgccattgccgaggataatcggaaatatttcgcttaatcaatttgatcaaactcttgttagatgcctcggtttgcccattagcctatgc

SEQ ID NO: 23585 - DNA, 2482 bp, Oryza sativa
ctttgctagctgaggacggcgatgctggtagtttctcagccatgagagaacgctgttgtgattctaacttctaatcggtcccaccgggcgtgccaaaagcgtgttgatgtaaaaacacaaggcctgggagatctgcttaactccagtgcaggtccagaagcttgcctttaggtgtatgagcgtgccagttgatttgatcctgcaatcaacaagaaacaaagataaagaaaccgcggttaaatccataaactaaatgccgatgacgtattatttatcttgaagctgatgtcatatgtggatcgatcggcaatcatgaataagtaagaaagaactaaatctactcgatcggctgtagatattaacaatatataatccttatgtcgatacatacttaaatcaagtgattgtgatagatcggtcgccatgccgagacaatataaatcacttagatcgaagtatatgttaacaatgagactatatatgttcatagcatagccgatcagatagatctagcatgtatcggtgtaacaccccagaaactacaatgacaccgggatgctactaaatagacatacatttaacaaagaggagaaatttcgactgcaactcctttaaaacataagcattgcggaagcgtcaaatataagtatagcattgcaagtagccatccacaaaaaaacaaggagaaaggaacattcagggatgaaataaactaatttcaactctcagattcatctagtgcaacttaacaagggtacagttcctttattatcaaaatcatgaacttgaaagattaaggtggcagtgtggaatgcagttgtgcttctactcctgtttcccccaagcgagcatatcactttaagcacctgaaaacactgtaggggtgtgagaataaatctcagcaagagaattgttttatcaagttatttaacctaccaaatcattaaaatatatttataagaaaacaaaggaacataacattaaatataaaggcaaacatctagtgttcataggttcaagagtaaggaggataaaccacatctgcaaagacttcaggagaaagaagccctctcatgaactcaatagagtatataacttccataccccaaaataccaaagtgcaatgcgatgcaaatgcaatgatattcctgccttcacacccaacaaggtgtgaagctgcatcgtgttacgacaatacacgatgctgtatcggtacggtcgcgaccataggttcacgacataacttcaaatgaaatgcatatgaaatgcaatgcaatacaataatagaggaaagataacacatccacaaatccttccaatgatatcacatataataattactctcactaaaagcataccacattaaccatagttagccgagcggagatagctcagagcaagatacataaaataatcatttgcacatatggaattatagtgattgtaggtattaaagtgtcaaggtggaggttggaaaaaataacatgataaaaccgtagcaaaccacagctacattcacttgcctccaatgaagggttggtatcatacacgatctgaaggaccaccacctaatcacaatcaaagcctcagcaaacactctcaaatatgaatatataacagtaaataacatgcatctacggcctcaagacctcaaaacgcaaaaacaagaaacgccgcttggactataaacaatactgttgcttcaaacctttatatctcgaaatataaaaattgtatgactgcaaataaatacattttggaaatctacagaatgagacctacaactttcgtgtagaacccatatttttattctgccatttagatggcctaaagctcaaatcaagacaagcttcagaatctgcccaagaattcagactgccacacttaaaacagccatatctggagttctactcgccaatcaaagtgtactttaccaatatggaaagctaaggaaaaactctacaacttcctagttataaactttcgcagcaaaatcattttgatcctctaattagcgaaatacagagacacaacaaagctgacagggcctagaaacactaatccaaaacacaacacctaatcccatcctctaaccttcgaataacgccgaattacaaccctaaaataacctacaacctctgcacaggagagttaagcctcacctagggtttggagaacttgagagaatatgatgggaaaaccaactcaccactcttcctgctcctctcctcttcctcgatccgtttttccaatcagattcttgattagggctatggttcttggagatccatggagtagggctaacaggggagaaaggaatatgtaagttccataggtgccgagggggaggtgtggcggcgtcggctgggaaggtgggagtcgcctctccctagggtattaggggggaggtgggctggactgctgcgacttggcccaaattgattcggcccaattccaaacatgttattttatttttaatttc

SEQ ID NO: 23586 - DNA, 3178 bp, Oryza sativa
aggtagttaaatcaagtaagatcggctgataccccgaagtaaccctaatcagcaccaaaggcaggctagagattgaaattctaatcatgactcataagatcaaactcaactgatacagctataagtatgacaagaaggacaatatctagacaatcaagccgttggatgtttcatagagtggtagatgtcctatacaatcaagtcagcgttgatatttaacctaatcggctgccttctagtaacagacgttagccgattagaggttagatagcgatattgccagagattatataagatatatgataactcgacgaattacagaaacaagattagagtatcataaagatggaatcactaatcccgagaacgcaagccgccgtaataagttttacctctagttgaagatcgaaaccgatgcagctcaacctgaaagcaagaacccgtcgaaacaaaacggaagtaaaaagggtagcaatgcgccgagattgtattgaacgagtgttagtttgattacatggggctcaggtctatttatacccaaaaattacaaaatatgtccatatcggacatgtttcttgtctctaacaaactctaagataccataagtctttgcggcagacttttgcccaaacaaatctctatggaaattacataaaatatcctacttaatagatacaattgccttcttacgactctatccatgtgtggcaatcatcatgaagcacgtcatcctaacccgacaacatatgccgtgtcatattgtcggattcgtctcaatcggctaaccctgtccgactcaaactctgccgatcttagtcgtagccgattcggactccagccgatcctcactctgtttccgggacagtctctatctcgaactccgtcttgaatcctccttcacatccgatccttggattaccaaatttggtcgttagcacatatctaccatctcttagagagtagctacttttgtctcatatgcttgattgttatgctaaatatgccctttatattaagatcttattgagttaaagtatattaggctttctgtttaatatatcttgtctgttctaatatcttaatatagagtggtatcggagtattagccgatacatgctagatctatctgatcggctatgctataaacgttcgtataatcattatctgaatgtatcttttcacttaagtgatttatactgtctcgacatactgttcaatctatcccaatcacaaaatttaaatatacattgagagaaggattaaatatgttgatatctacagccaatcgagtagatttagttttatattgctttattcttcattgctggtctaatgccaataacatcggctcaatgattgatcatatgtcatcggctcctagccgatcggctatcgtttatagatttaacctcctttttcttgtcttttcttcttgttgattgtaggatcaaatcaattggcacacctttgaacctaaaaacaagattttggacctgcacaggagttaagcagatcttccaggccagtgtgtgtttttcgcatcaacacgcttttggcacgcccggtaggaccgagttgtaacaattcttcaacatggtggatagcaagcaaacttctaaacccccgtcctctaaaccaccgccgacggcagaagtcatccctgagaacatcatcccaataacactagataagctgacgccagaacaagtggcagagtatgagcagatgattaacaatttgaagactcagtacttgcactcattcaagcagatgcattcaggcacagttatccagaggtacaaggtaaaggtggtttctgccgatgatccagaatcaagtacatccaaggatggcaaggtgataaaggtgacaaagatgatgaacctaaggatgatgaaactgggggagaagagcccttggagttcaataacttctaggaccaagtcgagtacactgttcatcaagctctaatcaaccaatcaggagtgcttgtcaatactttgaaaaatatgatcaagtttgtggttgatggcacaattgctgagcatcaggctaagggaccagtctttctgccagaaggcgtgtttccgcagtacaggaatttagtgaccggcaaccaacagcctgctaccaatgtacctccagggcagccgatggcgtcggcttcggcttctagaccaggtgtatcttcatcggcacaaaggccaccggttaatccttatttgctgaccagagaacaacctcaacacgctaggcagaacatcaatcggttgactcaggaacagattgcagcaatgttcaagccacctcaacctgttggagctcaatttatccctgaacaacaaatgcataatgtgcaacaaccgcctcagaactatcttggtggtaatttgaattttcagtatcggcctcattcacctcaggttcggtaccaactagggggatcacctcaacctcagcttctgcctcagttcaactagttcgatccaattcaacagcagatgcaaggagcgtctcaccaaaagccctgggctgacatgattgcatatgtgatgaaggagcagtttgggctaaaaccgaaggatactggaaatttgtatcggcacccctaacctgagtggtttgagagggttccattgccaaaccgatacaaagtcctagacttttcaaaattctcagggcaggacaatgtatcaacttatgagcatgtcagccgatttttggctcaatgtggtgaggcatcggctgttgatgctttatgggtcagattgtttcctttgacctagtctggatcgacatttcaatggttttcttcactgccttataattctgtttatagctgggccgatttagataaacagtttcatagttatttctatagtgggaatcatgagatgaagctttctgatttggcagcagttagacagaggcatgatgaaactatacagaattacattcagaggatcagagatatgaggaatagatgctatagtttggctttaaccgattctcagtttgccgatctcgctttccagggtttgatagctccgattaaggagaagttttcggctcaacactttgaaagcttgtctcaccttgcacagaaggtaactctacatgagcaaaggtttgaggacggtaagaagaattttaaaaaagtcaatcatgtctatcctta

SEQ ID NO: 23587 - DNA, 1897 bp, Oryza sativa
ggcagccgatgggggaaaccatcggagttcacagctaaattcggtaagatcattaacaagtaccaaagaaggcatgataagcaggaggaaaggtatcttgaagatgatggtggttttgatccacattgggattgtgtgtctttcaggttctgctggaatgaagggatgaggctgccatcaatagaagaatgccctagatgcagtgataatgcagggagctcgagccgatcctacaatagaggaaatcggctaaatcagaaaaaattgcctgttcatcagaggttgggtcctgtgcaccaagatcgttttcaggatgaggatgaaggcaggaactcacagtggtgtccttttggtttttttactaagaatcagaagtggagggtccaaaggatgaaaaacagggagcgttttaaggaggtacaacaagagatcaaccatcggttgaagaagacaaagcaagaatggcgtgttaagagtaaagttacaacagccgatgaagttgaagccaacaaggcgaagaggttgctcaaggccaaagctgttgcgtcttcatcagtaaacatggtttttatgctacctgcagaatatggagctaatcaagccgatgttgatgatgtagatgagacctctgctaagttgattttgtcatcggaacaagcaatttttgagaaactagaggggacagaaaatcggcatctcaagccattgtacattaatggatttgttaatgggaagccgatgtctaagatgacggttgatggtggggctgctgtgaatttgttgccatatactacattcaggaagctgggtaagaatgcagatgatatcatccagaccaatatggttcttaaagattttggtggcaacccttcagaaactaagggagtattgaatgtggagttgacaatcggcagcaaaactgttcctactatgttttttgtcatcgatgggaagggttcctatagcttgtcgcttggaagggattggattcatgcaattgttgtatcccttcaaccatgcaccagtgtttaattcaatggcaaggtgacaagattgagatcgtgccagccgacaggtcagtcaatgttgctggtgccgatttagctatttgggagatggatgggattgattgcctgtctggaaaagtttgggaagatgattatttaaaagtgttcaattgtgatatacagccaattgaagatggagagcccaaattattacattgagggcgccgtggagggttcaaatttctacaccaaggacacggtagatgatttcgatggcaagttaggacatggtttcatgttggctgatgatctggaagaagttgaatataggtctaggggatagaccaaggccaacatttgtcagtaagaatctatctgcagaattcagaaccaagttaatagagcttttgaaagaatatagagattgctttgcttgggagtattatgagatgccaggactgagccgatcgattgttgaacatcggcttcctattaaaccagggtataaaccacatcaacaaccgcctaggaggcgcaaagccgatatgtatgatgctatcaaggctgagatcactagattatatgatgctggttttattcggccatgccgatatgctgagtgggtttccaacatagttccagtcataaaaaaaaaggcaagcttagggtgtgcattgattttcgggatttaaataaagctacccctaaggatgaacacccgatgccgattgcggatcaatcgattgatgcagcttcaggacataagattataagttttatggatggcaacgctggttacaatcagatttttatgacagaagaggatattcataagactgctttcaggtgccctggtgcaatcggctgtatgagtgggtcgtaatgacttt

SEQ ID NO: 23588 - DNA, 506 bp, Oryza sativa
tttgcttaccggatttcgtatttacaggttcctttagaagataaaaaaaggttccggattgaaatgacatttagtcgtggtgctgatcttagtcctctaaaggtgatgtttgcaccttcttttgcaacgcaggacatgagctccggtgtgcttgctcgctactagatgcatttgagcaattgagacttactcatgtaatatatgttttggtccaggataaaaccagtgaaaatacttccttgctccaggagcacaccctgccgataatggggcctgagagactgcaggaagttggttcctgcctaacactggacaagtttgagaaaatggtgcgaccatttgcgatgcctcctgaagacttccctccagctgctgcgccacaagccttttctggctacttcaaaggctctggaatgcttgaaagactcgctagtctctggccttttcacaagggcgcgactaatgggaaataagtgaaaaagctacaaaatggtagaattgatcca

SEQ ID NO: 23589 - DNA, 1169 bp, Oryza sativa
agatgcaacttccattcaccccaccatctgtcaaagttcctgctcctgaatcctgctaactcaatattgtcgatactgcctaagggaggtccttggaggttaagcagtcgatccatcattagagttgaagaaatttctaccggcattggatcttgtcagcaaagaataagccgattgggagttggcctaatccaagttgtgtagctgaacttatagggtgacagaattcgtaggagacttggatatttcttccttggtgaatactgacaggtaggatgcatgggctgattgcagctgtaaagacttccctggacgtttgatatctttcatgattgatgtcttcaaatctgaagtctaatgggagctcaaggtctgctgagtcttcataaagaaaccaaccccgggcatctttctggaaaccttcataaaagctgcagaaccaatctttgagcatctcagccgatagttttgccttagcatcggctggtgtggatgcatattctccatatgatatgcatctgcgatgggtgcgttcttctccatcgtcttctacaattggctccaaccttgggaattcagcttctgttacagatggccgattgacaactttcatgactaccaggtttagctaggtctgtagtagccaccatggtccacctgctccaactattgagccgatggctatcttagccgatgcattgttcaacatttggtatagatagccgagaaggattttgcccaagggaaattgtttctttgatcctaaggcttcggctacaaattgccaattggttgtgggaccacagctggatccacagaagagaaacttttctagccacattagcaagaaagctacgtgctcccgaggagtgacaggccctttgcccatgtatgccgctacataaccagaccaccctcctatgcttttggtcttgaagtcaaattggttcttggtgttcatagtcatagggttagctgatgaagttacatctaatccagtaatcatgatgatgtcgatcaaagttggagtcatcggccgttggttaaataagaaggcattgatggtgttggaccagaaataggtggcggcagccatcagaggttcatccttagtagaattggctatggtgagagcaagcgcttggccgatccaatctcatcccagtggg

SEQ ID NO: 23590 - DNA, 21450 bp, Oryza sativa
catatcatgatagtatgaagtaacagttctggtatcttgttttaaacattgcagtttgttgaacaaaatgtcagcataatacatgggaacataaacatctctgaaatatcgtttcaggtctttccaagattgtggtattttgttatgcctacaaagatgtttccaatcattagaagcatgtttaattaaaacactagaggcacacataaccttttgtttctccgacaagacatgcttttgaaattcactatcaaccgctagctcccaattaatgtaagcacgaggatcatagtctccctcgaaataaggcagtgcagatttgatcttacctagaacatcatcacttacctcataatggtcatgttgatccctcctcatgtctcgacgaagatgtcgatgttgagcgcagctatccccaattatcttgcgtatccctgccattgttagtagaaaacaagaaacatacacaaaaatatgcacgttcctattaactactaggtagtggcagctcaaaaatcgcacacactcaagcttttaaccaagctcttacaagatcttaccaatgcaagtggaatggtgacatacaccgactcaaccaagcaccccaatgaaggttggatgtatcgatgccttggcaaacacttgcggtacagctgtaatcaaatatgtggagctcgggtaggcttaaatatgtagcaaaggaatagcaaatgctcaaatcagataatgcaaagttgaataattgttcaaagtcaagtaccgtgctggtcctaggctagaacgtactagagacgcgagcctagacacaaacgataccacaagatagcactaggaacaactcatgcacaactctgatatatgaagttcagctcaaacataacagtattttctcttttctttctttcttctttcttcttttctttttttttctttccttttcttttctgttttttttttgtgcggctttttttttcttttttttttgcacctttcttcctttttttttcacttttttcttgatttttttaacaaaaactgactcaaggaccttaatgtaagattacagggactcaaacttaaatataaaatttacagggactcaaatgtaaaagtctaaaccccaaatttaaattatccaaaaaaatggaatgctgaatttatgccggttccgtttttccaaacagatctcgaaaccgacaccaaacaaaaattcgccaaggtgtttgacacaactcggaaccgtggaagagagggagggagtcggactcggccaaaggggcgagtgggactcggccaggaggtggagtggatggcagccgaatttggtgtatgggataaaaaggaaactgatttttaaccaatccaatctactatatctttccaaaacaatcttgactacttccaaaatcagatatggtaattcaccttcctcctctcgtgcacgacacaggcacggccaaaacaaacacacacaaggatcggcaaactctagatgcaactcaagaactccaaaactaaccgacagaaacttctgaaaactacaaaaatagaaccgtggcagcgagccgattccgttttcgtaggtcccgacaacaacagagacacggtggcagcaacgactgtggtacaaaacgtgaccagaacttgaaactctaaacgaactagacgctaagaccagcaacacgacgtgacgatgcaacacaaaattcaacaaagcaaaaactgaaaagaacaatgcaatggcacaatatggctaggtaaatgatacgaatttttttgtatggctattttctggttataggaagataaaaactcaccgagcaacgaaagctctgataccacctgatgaaccctgagttcctctcgacactcaaggttgttgttggcccgatctttcggtgagttgatgaaaactacgatttggaagaaacgttgacgacccgactacaaccgtacaagacgttgcgttgcgccttagcgatcgatacacctctccgtgggttgttgatcttgccggtgcaaatcaaccttattcctgcaagcaaatcgaagaaacaagcaagaacaagataaaagcaatctgaattgcaaataggagttaaatacgaatgataagttggggttccgaagaacaagcagacggacggtctagccgacacgcgcgctgcaagcaagtagcaatggctaaactttaatctaacaaaacccgagaaaccctgaaggggtaactagctatatataggggtgggaggacgacctaggggtgcctagggtcgtgctccaccagcttagggcgcaccccacatgggccccacctgggccggggtcccaaatgaagttacaagcccataggcccattataggtgatgcaacaccttgttcctgtgattctggccacacgagatagaattcagagaagaggctggatccgttagaaagagggctccgagagctttccatcaagtactcacgggccgaaaacggaggtcgtatgcagatttggtggccgtttgaagtcagcagtgtagtaggtggccgaatcggattccagcacttggagtacttgatctcgatatcttcttgttcatccatgatgtgagcaatggttgcatccgtggtagccatggtcacatcagactaggtaagccgatgcagccgattccgacagtataatttggtgtatgacatcgggttgaattgaggtgcttcaagatgattgccgcaaatggatagagtcctgagaaggcaattgtatctattaattaggatgttttatgtaacttccttagagatatgtttaggcaaaagtctgccgcaaagacttattgtatcttagagtttgttagagatagtggtcgtgtccggtatggacatatcttgtaattctcgggtataaatagaccccgagccctatgtaatttttaacacacacattcaatacaatttcggcacattgccacctttttgctttagttttgtttcgacgagttcttgctttcgggttgagctgcatcggtttcgatcttcaacaagaggtaaaacttgttatgacgacttgtgttctcgagattagtgtttccatctttatgacactcttatcttgtctatataattcgtcgagttatcatatatcttacataatctttggcaatatcatcatctaacctacaatcggctaacatctgttaatagaaggcagccgattaggttaaatagcgacgttgtcctagattatataagatatctaccactttatgaaacatccagcggcttgattgtctagatattgttcttcttttcatacttaatgctgcatcagttgagtttgatctattaagtcgtgcttagaatatcaatctctagcctgtcctctagttgccgattagggtagtatcggagtttcagccgatcttatttgatttaaccatattcgatctatatgcttcaatgacatgttaaatccgccctttatgtcaagatctcattgcatttaagtatattaagcttttgtttgctatattatacttgttttaatatctttatatagagtagtatcggagtattaaccgatacatgctagatctatctgattggctatgctataaacatatataatgttgttattaatatatatttcgatctaagtgatttatactgtctcggcatggtgaccgatctatcccaatcacttgatttaagtatatattaatataagaactatatatcgttaatatctacagccgatcgaatagatttagttccttactatctatttataaccgtcaatcgattcataaatgacatcggctcaaagataaatgatatgtcatcggcacctagctgatcggctatcatttatagatttaaccacgaattctttgtctttatttcttgttgattacacgatcaaatcaactggcacgcttatatatttcttcgaaggcgagctttggacctacactggagttaagcagatctcccaggcctcgtgttttctgtcaacacgcttttggtacgcccggtgggacagattagaagtcagcaagcaattcttcctcatggccgagaagccaccgctgtcgccatcctcgactagcccaagcactgttaaagaaaagatccagaagttggggttgactgacgtcaatgaaggaaacgtcgtgcccatcgatccagagaaattcacacctgagcagaagaaagattttgaagcaatgttgcagcaagcccgggatcagttcttgaactcattcatgcagacccacaagggaacattggtttagaagtataaagtaaaggtagttgccgatgatcctgggaccagttcttccaaaggtgaagacgggaaacaagctccagatggctctgctcaactgagtgacaaaggtgctaccgacagttctctaggaagtcaaggtgacaactctcaaggggtcgatggagttcaaggcgatggagtgcatggagttcaaggtgatggtgctcaggggttgcaagggggaaatcttaatcagaatagtgatgcggcacaagattttttctataatttccaagaccgggtcgactacgctgtgcaccatgctttgatcaatcagtctggggtgttagtcaattccttattaaacttgatgaagtcaatagccgatggattagtagttgagcatcaggctgcaggcccagtttatttgcaaggaggtgtctttccaaattatcgtcatttgatcactgatgcccagccatctattcaggcagttccccccatcgcaccatcagctcagccgacggcgccggcatcgactcccttacctgctccgtcagcattggcaccaggccagctggtgaaccctcagttgttaatgagagagcagccacagcatagtgggcaggttgcgaatcggctaacgcaagatcaggttgctgccatgtttctgccgtctccacctgctgttgatccaatacagcagcagccgattcaacagacactcccgattcagcaggttgtacaaccaatccagcaacaagttgtgcaaccagttcagcaaatgccaccaaggcaacagcctccgtggccgattcagcaaacgccgttaagacagcaaatctttcagccgattcagcaccaaggctcaatgagcgcatcggccgggtttgtgacgcctggtggacagcctgttcaacaatttttaaatcaagtcgtcccagaacacttggtacagccggatgggacagtaatgcctcaagttgttcccgagcatttggcacgtaatattcagtcgaaccttcataattaccagggggcaacttgaattatcaatatcagcctccttccccacaagcccaatatcagccagggggactggctcaacctcagtttgcgtctcagtacggtcagttcgagcctatgcaacaacagtcacagggagcagctcagcaacgaccatgggccgatgtgattgctgatgtaatgagggaacagtttgggcttaaaccaaaagagactgggagcttgtatcggcagccttaccctgagtggtttgagagagttcctccccccaatcggttcaaagttccggacttctccaaattttcgggacaagatggtgtgtcaacttatgagcacattagccgatttttagctcagtgtggtgaagcatcggctgtggatgctttgagggttaggttgttccggttatctttgtctggatcggcttttacttggttttcttctctgccgtatgggtctgtcggtgacatgggatcgggagtatcatgactagaggcttgaggcagacacaatcgcccacgtggcctggcacccccgggggacgtcgggcccgagggtgatgtgttcgccctcctcttagtccccccgagggggtcgggctgcacccccctcggccccgagggtcgaggcgccccgacccctcgtgggttttcgctccgcgcgtatgagttaggtgagcacagtggggctcacctaaccacatttattgcggattggctgagtgtgtcacgacgcatgcaacgcagtgcattgcactcatttatccggtctgtgaccagtcacagaccggtcagatcgcgggttaggtggcgacaggcggtctgacgcacgcctcgccccatcccgtcaggacgagggcttctaggcgctcgtccccagctggagctagcgtgttacctcccagagatggcacgttagtcctggtcagatatatgccaggcttcatcctaaccattacaggcaaaatgttgtgtgaagaagggccaacgtgcagattgctaagctgacgcgtggtggacaagaatgaccgatttgtgaccagtctaacaccggtcatgtcgccagcagaccgccatgattccgcgtcgcgcctgctcccggcgaaagtggaggtagttgtgggccgtcccatcagaaggcgactcggacggcaacgatgcaaatctccgtccatttatgaaaaggtagagtaagtccccagggagagggagagaatggtgcatgtggtatccccttaagatatgaaaggaggaccttgcccactgaggagaaggagagagattttcgagagctttttcttggactgaacctttccagattaggatcctagaacaaaggagaggctggctcatactttgtagctccttcacacacgaatccacctaaaacacaggagtagggtatgacgcttctaagcgtcccgaacctgtatacatcgccggcgtcttctgtgcttcctgtctggcgaaccttccacatacagattgggagcttagagtctcacctagggtccccggccgaaccggcaaaggggggccagcgcggtctcccggtgaggagccccacgctccatcatctggcgcgccaggtaggggactctgtgagtgatcttctgagctctcgcactccttcgggtgcgccaagcttttcctgttcggcctaatggccgagccagcaaaggcgcacgacctctccccgagtatgagcggtgacgacggggagccaaacccacgccgtcgagctcgtactccaccgccccctccacgccaaagtcctaggcgagaaaaggcgatcgagagggctgaaggatccgcgacttcgacatccacaggaggtggaaaggggcggcgagatggggagcgtcgcctcctcgtctatggtgacggcagcacgccccagggcgcgctccaagctgcgggcgcgctcctacgtcacccgcccgtcgcccatgacccggagtctccagcccaacgctggctggacgatgtggccaaattggtcatgactgcacggcagcgcctggatgctggtgggcggtcctccgccaccaaggcctctggtgctgctaccactggctccgcgtcatcaagacgaagggcgcggcgagcggcagctgccgttcgctattcggccgccactccttcgtcgactccttcgacccgggaagatctgcgtggggggccggacgcccgcaccagcatcgagcgccggcgtaatgaccgacgtgctgcccacgcaacggagggcgcttcctcgtccagagtgtcacctcaacacggacgcgggaatcagccctccgtgcccccggttggtggtgtcggctgtagagcctttgtggcgagtctttggaatgtccgttggcccccaaggttccggcccaccatcgccgaaaaatatgacgggagcgtcaaccccgccgagtttctccaggtctacacgaccgggatcgaggccgccgggggtgacgacagggtcatggcgaatttctttcccatggccctgaaaggacaggcgcggggctggctaatgaacttgccacccgcatctgtccattcttgggaggatttgtgccaacagttcaccatgaacttccaaggcacatatccgcgcccaggtgaggaagcggacttgcaagcagtacaacgaagggatgatgagtcacttcgctcgtacattcagcggttctgtcaagtccgcaacaccataccatgcatccctgcacacgcggtgatttacgcgttcagggggggtgtgcggcacaaccgcatgctcgaaaagatcgcctccaaggagccccagactaccgcggagctttttcagctcgcggaccgagtggctcgcaaggaggaggcctggacttggaacccctccggttccggtgtggcagcttcggccgcccccggatccaccgctcagacagggcggcgtgacaggaggaggaagaagaggtcagtccattccgacgacgagggtcatgtcctcgccgtcgagggcgcttcgcgggccacccaaaaggggaggcctgcgagcgacagaaagaaaaaggccggcgctcccagcagggagcgcccagccggcaagtggtgcaccgtccacaacacttcccttcacgacctcgcggactgccgtgcagtcaaaagtttggctgagcggacgaggaagtgggaggaggagaggaggcaggagcgccgagagggcaagtccccggcggttccttccggcaatcggcgaagtgaggccaagcagaaggcccccgccgaggacatcgatgacggcgatgatgacctaggtttccaagagcccggggccaccattgccactgtcgatgggggagcgtgtgctcacgtttctcgccggagcatcaaggccatgaagcgagagcttctggccgcggcccctactcatgaggcgacgcgccgggcgcggtggtcggaggttgccctcaccttcgaccagaccgaccacccaccgtgcgttgcccggggagggcagattgcgatggtggtttctcccaccgtttgcaacgtgaagttggggcgtgtcctcattgatggaggagcagccctcaacatcctttcccccgcagccgttgatgccatcaaggccccggggatgatgctccggccgtcccagccaatcatcggtgtgacgccggggcacacttggccgctaggtcatatcgacctcccggtcacattcggtggacccgccaacttccgcacggagcgggtgaactttgatgtggcggacctcagtctgccctacagcgcggtcttggggaggcccgcgttggtaaagttcatggcggcggtccactacgcctacctccagatgaagatgccgggccccgatggccccatctctgtccatggcgacctcaaagtcgcgctcgcttgtatggagcagcgcgcggaccgcctcgccgtcgtgtccaagcccgagggtggcgacgagaggcttggcacatccgcccccgccgccccgaggcagcggatagtcacgtgcgatgaagtcccggtcaagcaggttgccctgggcgacggcccgtccaagaccacacggattggtggtcttctggacggcaaataggaagacgcgctcgtctctttcctgcgggcaaacgctgacgtcttcgcatggagaccggcggatatgcccggggtccccagggaggtgattgagcaccgtctcgccgtacggccgggcgcaaggccggtccggcagaaagtgcggcgccaggccccggaacgtcaagccttcatccgcgaggaggtggcgcgacttctggaggccggattcatccgcgagttcatccatccggagtggctggcgaacccggtggtcgttcccaaggcgaacggcaagcttcggatgtgcatcgactacaccgaccttaacaaggcatgtcctaaggatccttaccccctgcctcgcatagatcagattgtcgactccacagcggggtgcgaccttttgtgttttctagatgcatactctggttaccatcagattcgcatggctagggaggatgaggaaaaaactgcgttcattacccccataggaacttattgttatacgacaatgcccttcgggttaaagaatgcaggtcctacttttcaacgtactactcgaatttctttgggtagccaattaggacgtaatgttgaggcttatgtcgatgacttagttgtaaagacgcgcaaccaggaaacgttactttcagatctagcggaaacttttgagagtctccgctccgcccgcataaaactgaaccccgataagtgtgtgtttggtgtacctgcgggcaagcttctcgggttcttggtctctgcccgaggcatcgaggccaaccccgagaagatacgagctatagagcggatgcgcccccccagcaagcttagggatgtgcaatgcgtcaccggttgcatggccgccctaagtcggttcatatcgaggctgggggagaaggcgctacccctatttaagctcctcaaacgctccgggccgtttacttggacggaggaagctgaacgtgccctcactcagttgaaggcgtatcttagctctcccccagttctggtcgctccggagccaaatgaacccttgctactctacttagcggcgaccccgcaagtggttagtgcggcgttggtcgtggagcgcgatgaggacaatcctcattccgcgcacccccaccttgtgcagacttggcccgggagagagcagggaggagaggcccccgagccgaacggcggcccaaggcccccgacgaccggagttggccctctacccgcttgtcaaacggtgctaggagcccccgacccccaggaaggccccgaggccactgcgggaaggccgcacctatcgccctctgaccccgaggctaaccctgtgccgattcgacccgggagagagcagggagaagaggcccccgagccgaacggtggcctaaggcccctgacgactggagttggccctttgcccgcttgtccgacgacgccaggagcccccgacccccaggacggccccgaggccactgtgggaaggccgcccctgtcgtcctccgaccgcgaggtcgtcggcacaggagacgagtgcgccccgcgaggccgctcgggtgaagagcgccccagggatgcggcccctagcgaagaggatcggccccaccgaaaggtgcagcggcccgtctactttgttagtgaggccctccgggatgccaagacccgataccctcaggcccagaaaatgctttacgctgttctgatggcctcgaggaaactgcgccattatttccaggcgcatcgggtcactgtggttacgtcttaccccctcggtcaaatcttgcataatcgagagggtacaggacgagtggtaaaatgggcaatcgagctttctgagttcgatctgcactttgaaccacgccacgctatcaagagccaggccctcgccgattttgtggcagagtggaccccggctccagagaccgtctcaatgcccgaggccagcacgaacccctcacagctgcctcacgccgcccactgggtgatgcaattcgacggttctctgtctcttcagggcgccggtgcaggggtcacgttgacctctccgaacggagacgtcctcagatatttggtccgtctcgactttcgagcgactaacaatatggcagagtacgagggactccttgccggactcagagtggcggctggactggggatccgccgcctcttggtattaggcgactcccagctagtcgttaaccaggtctgtaaggagtaccggtgctctgacccacagatggacgcctacgtacgccaagtacggcgtatggagcgccattttgacgggatagagcttcggcatgtgcccagacgggataatatgattgccgatgaactctcaaggctcgcgtcctcgcgagcccagaccccaccgggcgcctttgaagaaaggcttacccagccgtcggcgcgacccgaccccttaggggagacggatgcgcctgaccggcccccgaggcccgtcggagtccaggcctcgggacccgaagagagtgttccaagctcccttagattgattgcttggatctctgagatccaaacatacctcacagataagactctacctgaggaccgcgaagggagtgaacgcgtacaacgcatttccaaacgctatgtgctggtagaagggaccctctatcggcgcgcggctaacggaatcctcctgaagtgcattcctcaggaacaaggcgttgagcttcttgctgacatccatgagggcgagtgcggagcccattccgcctcgcgcaccctggttggcaaggcctttcgtcaaggattttattggccgacagctctcaatgacgcagtcgatctggtccggcgatgcagagcgtgtcagttccacgccaagcaaattcatcagccggcccaggccctgcagatcataccactgtcatggccatttgctgtctgggggcttgatatcctgggaccgttcaaacgggccccgggcgggtttgagtatctgtatgttgcgatcgacaagttcactaagtggcccgaggcttatccggttgtcaagatcgataagcactctgctcttaaatttattaagggcatcacggcccgttttggagtgcctaaccgtattattacggataatggcacccaattcactagtgagctcttcggcgactactgcgaagacatgggcatcaagctctgcttcgcctcacctgcccaccccagaagcaatggccaagtggagcgcgccaatgcagaaatcctcaaaggccttaaaaccaagaccttcaatattctcaagaagcacggcgattcatggatcgaggagttgccagcggtgctctgggcgaaccgaaccacaccaagccgagcgaccggggaaacgcctttcttcctcgtctacggcgcagaagcggttctcccatctgagctcaccctgaggtctcctcgggccaccatgtactgcgaggctgatcaagatcagcttcgtagagatgacctcgactacttggaagagcgaaggcggcgcgcggccctccgagctgcgcgctaccagcagagcctgcggcgctaccatcagcgccacgtccgggcccgatcactctgcgtcgacgacctcgtcctacgccgcgtccaaacgcgtgctggattgagcaaactctcaccaatgtgggagggtccgtatcgagtgatcggtgtcccccggccgggctcggtacggctggccacgggcgacggcacggagctgccaaacccgtggaacattgaacaccttcgtcgcttctacccctgaagggggggggtcgggtgtcaggttttggctcgggctaaccccgcaccccccctcgggtgtgcagggttagccgggggctaccacacatgcatatatattcctttcagcatttcaatagaagcagtttcaatttcctaaaggttgtgtctgtgccgttttttccttttgaagaatcttgacttgaaataatgtcactcgtgctcaaccttgccctcgggggctcggttcggtcagctaaaatcgccaaacggggcccagaaccgagccgtgccccggggcgtggtgaactccgggggggaatcggcaaaaacccacaatcgggtcacccatacccctcggtcaccacgttcccggcctggccagtctcgacatgcggatctccccaggcactagccccgacccgagccattcgaggaccgggacttgggcgcgagcccttatttcaagctaaggcgcaaaaggaccatggcacagatcatcctcaactcatatatatagcaaaataaaactaacacaaaaatttttcatcatttctcattgcagattaagttagattgtacaaaaaagaggcatgaaggccttagaagaaagaacaagaaaaaagataagagtggcgggggcctgggggctcattcatatgcgcccgggtcgccggcctcgtcgccaccgccgtcctcgctgctggcgtcgccctcctcgtcggagctgggggcgaacgcgagccgaggggccgagccctcgaagctgttgacgatgtggtcggcagcgtccccgacccgcgcgcgcgcgtcgtcctcggtcccgggagggaactcctccagcgccatccagggggagaagttgggatcccgggcctggtaactcgccagcacgagttcaaccgccccccgggcgaggtccctcgaggatgccttgatggtcttctcaagctcctcggggagtcgctcgagaacccaagccatcctgttgaggtgcggagcgaggccttccagattggtggggggcaccgacgtctggcctccccagaggcccgcttgccgaccggcgcgcttcatgcgggagaccgcatcccagagcatgtcgggcccgatctcgcccgccaagcgaagggcctcggcctccccggtggaggagtccagcgcgcgctgcatgtcagcgacggtgtgttcggcagccgcgaggcgagcggctaagtcgctttcgcccgcggccgccccgctgataggcgccctcgcgtctagctccttctcccgcgcctcgaggccagcagcccgctgctccagcgcggctctctcggcgcggacgctttcaaggttgcggcgcgcctgctcctcctgcgccgcctcgcggagggagaggctgtccgccagccgttgcgtcgtggcctcggcctcctcgagagcccgctcccgctcggcgagtgcatcctcgcgaaggcggagcgcggactcctcctcggcgcaggcggcctcgtgcgccgccagcgtcgcctcccggagagcagtggcggcctcgcggtccatcaagctcctctccacggcgccggcatgttcttccagcgccatggcacgggcctcgagggcctcctcgcgccgccgggacgccgcttcggcttccgttgcccgccgctctcgggcagcggcggagtcgagaaccccttgggcggcgtcgagcttgctcttcagctccgcctcccagcttgcgtgctgaagacggagggtgtcttgcgcctcgaccatcgcggtggtggcgacgagggcggcctctcgctcctcctccacctcccgggcgatctccgccagcgccgccttgcgggcttcgagctccgagatgtggcggcggtgggccttacggcccacctccaccatggcgtccaccgagcgccgcccctcctcgacacgcgcccatgcggcctcgagctccgctcgttccgcttgcaaggcctccacctgggcgctaaatccatctagcaccgcggtgtttgcggcggccaaggcctgcataatgggctcggcgctcactggggcgacgagagaagaggagaaaagccgccttggagaaaaggcgacgcggcttggccccccggaggatgcgctgggctcggggatgtcccccgggcccgtttggtcctgggcgtcgcccggtgaggtaggcccaggcgatgcgcccgcggcctcgtcgcgagccgcctcggaggatgtcgcctgagggccgcccgagggagtgggcccgagtgacgcgccagcagcagctgccgcctcagcctggcgagcccgggcggcctcctcctgggcagcttcttcggcttggcgagcccgggcggcctcctcccgagcagcctcctccgcttggcgaacccgggcggcctcccgggcggcctcttcagcttcccgaaggcgggctgcggcttcacgccggtcagactcccgcctccgctcctctgcggccgctggatcttcggcctcggactggccggacttggggcggcgggaggaatgcgacgggacatcgctgaagcagaagaaaaaaccaaaagacgaacaaaatgggtaagaaaaaacttctctttgggagaaaggtggtcgcaatgagaatgagacgaacctgcgagggggtcggttgaatgaccaccttggaggggaaattaggtttccccgggctggttccgtctcccccatcttgcggagccgcttcttcttgcgctccccctcgggctgtgacgtcggcgcagccccctccgggcgccgaccgctggtacgcactgccccgccccctcggggaggagatgggggaggtgttcctcccagcttcctcttccccggggcgtcggcagggcggctgctccccgagcccccgacgcggggcccagaagcacgaccccctcctggggcagattttttccccgggcgactctcgcccgcgccgtcgtggcccttaggggctctctcctctgaggccccgacccccagcataatggttagaatggagacgcggtcgggatcgatgcagagggggaggatctcctgaggaaggcgagacgcctccgcggagctaagattcagcaccctttggactacgatcttgaagtcctcaggagcccaatcccatctggctccctggtgggtccgcatgtagtcttcaggcccagtgtactcccaggcgctccgggcgcgccgttggagcggcgcaatccgccgacggaggtaatcgccgtacaccatggccccggtgagcccctgggatcgcaggcccgccaggcggtcgaggacggcgtcgtactcctcccccagatctaccggcgcccgccagctggagacctgcgccgggggctggctcggaagtcggaggcgcgcttcgtcggcgaggggggtgtagaaccagtcgctcttccagtcgtcccacttcttgcggaggacgcaggggatgtagcggttcaacaccggcccccgcggctggaagtagcagccgccaaccaccgatggcggtgacaccgactgcacggtgaagaaccaccggaacagctgaagagaggggcgcaccccaatgaacatctcgcacaggtgtgcgaagatggccaatgtcatcaccgcattgggggtgaggtgcgccatctggagatcgtagaactccaggacatccatgaagaaatgagaaaatggcgggaccagcccagccattgcgaaggggaggaagaagatggaccgccccgggtagtctggtgccgggcgcccctcgcccagcatcacaatctcccgaccggtggcggactccggcatgaagcggcgcggcagtccggcgtgcctctcattcacgatgcgggaaggcggcagtacactgccgtcgagcagagcagagccccgtgccatggcggtggaggaagagatgattgggaacgagcgcgtgtggcgaaagtagggcgtggtagagaaagagttagagctcaggcagcgaaggcaagaggaacaatggcgaaaggaagggagcaaatccttttctcgatgcttttatacccttgccatcgctgggcctggctcctcgtttctcgcgcccactacctcgctccctcgtatctcgctatcttgctccctcgtttcccgtgcccacgcttccactaatcccattcgcccgcttacggcgcttgaagtggatatgcggttgtggcaatcgaaacggattgtatcgtgcgcgcgttaattacgctcgccaaccgaagcggcgttaccgtatctccgggcgagacaaatctgctcacccagattcgcgcgctgctcaagtgatgtggcagtcttgaatagaccgcccattatggacaaccaaagttaccaataccaatgtgcatggactgggaccgttggggattttgcccaactatgcagaccggtcccacctgtcaccaggctttaggagtggcgtcacacctgaccgcttcccttgggaagggaaattgctctggcataacgccgggggctactgtcggtgatatgggaccgggagtatcatgactagaggcttgaggcagacacaatcgcccacgtggcctggcaccttcggggacgtcgggcccgagggtgaggtgtccgccctcctcctgatttcccccgagggggggtcgggttgcgcttgccctggccccgagggccggggcaccccgaccccctttaggaagtctgcgccacgtatatgggataagtgagcacagctgtgctcacctaacagcatttattgcagtctggtcaagcgtgtcacgctgcacgcagtgcagcacggcgcgtccctttatccggtctgtgaccagtcacagaccggtcagatcacgggttaggtggcgactggcggtctgacgcacgccatgccccatcccgtcaagacgaaagcctctaggcactcgtctcaagccggcgttaagcgtgttatctcttagagatgacacgttagccccgatcgatatatgccaggcttcatcctaaccattacaagcaaaatgttgtgtgaagaagggcaaacatgcacgttgccaagattacacgcggtggacaagaatgaccgatttgcgaccggtctgacactgaccatatcgtcagcgcacagccatgctcccacgacgcgctcacccccggcggaagtggaggtaggtgtgggctgtcccatcggagcgtcattcggacagcaaccgtgctgatctccgcccattcaagagaaaaagaacagtccagtttggaaagagaagggtgcatgtggtatccccttgaagtataaaaggaggaccttgcccatagagagggggttggttgattctttcccagattatgagcttagaacgggggagaagtcagctgacacttgtagctcattcatacacagatccaccaaaacacaggagtagggtattacgcttctcagcggcccgaacctgtatagatcgtcggtgtctcgtgttttctggctggcagacgatatttccacatacagagagagcgagagcttgagatttcaccctaagcccccggccgaactggcaaaggggggcctgcgcggtctcccggtgaggagccacgagctccgtcagcccccaagtaaacttttgatcagctttcaatcttaacaatggcataaaaggctctaatgttccagacaaattagaaataaatcttctagcgaaatttatcttgccgatcatctcctgtaactccgtcttgttctctggaggctgaattttcttgattgcaataacactcctttgagttatgtcaattcccctctcatgaacaagaaatcccaaaaactggccagccgatacaccgaaagcacactttgttgggttcatcttttggccatatttcctagttctctcgaaaaacttcctcaaattggctatgtggtcctctatctctttagacttaacaaccacatcgtcaatgtagacctcaaccaaccagccgatcaaatcatggtatatataattcatagcccgttgatatgtagctccagcacttttcaagccaaaagtcattacaacccactcaaacaagccgattgcaccatgacacctaaaagctgtctgatggatatcttcttcggccatgaagatctgattgtatcctgcatttccatccatgaaactcaatattttgtgccctgaagcagcgtcaaccaactgatcggctactggcattggatactcatcctttggggtagctttgtttaaatctctgaaatcaatgcacaccctaaccttgccatttttcttgataacaggaactatactagaaacccactcggcatatcggcaaggatgaataaaaccagcatcatataaacgtttaatctcagccttgacaggttcgagcatatcggctttgcatcttctcggaggttgctggtgtggtctaacccctggtttgataggtagccgatgttcaacaatcgatcggctgagtcctggcatcttataatactcccaagcaaagcaatctttgaattcctttaagagctctgtcaacttggttctaaattctggagataagttcttactgataaatgtcggccttggtcgatcacctggacctatgtcaatttcttccaaatcatcggccaacaagaaaccctgttcttacttgtcatcgagatgatctactgtatccttgttatagacgtttgaaccctccacgatgccctcaaaataataacttgggctctccatcttcaattggctgtatatcacaatcggatacttttagaaattctccatcccaaacttttccagataagcaatcgaaaccatccatctcccaaagagctaaatcggcactggcaacgttgactgacctgtcggctggcacgatttcaatcttgtcgccttgccattgaatcaagcattgatgcatggttgaaggaatacaacaattggcatcaatccaatcccttccaagcaacaagctgtaggaacccttcccatcgataacaaaaaatgttgtagggatagtcttgctgctgaccgttagctctacattcaaaactcctttggtttctgatggattgccaccatagtctttgagcaccatgtttgtcttgatgagatcctcagcattcctgcctagcttcctaaatgtagcataaggcatcaaattcactgcagccccaccatcgaccatcattttagacataggcttcccattgacatagccgtttacatacaatggcttaagatgccgattctctgtcccttccagtttctcaaagactgcttgttctggtgataaaatcaatctagccgattcttcctcaatttcatcaacatcggcttgcttgatcccaaattccgcaggtagtataaaatccatgttaaccgaggcagtcacaacactttttcctctagccaatctctttacttcatcggctgtaggaacttgtttcttaatgcgccattcctgcttcgaattcgttttcttcagccgatggttgatctcttgctcaacctcctaaaaacgttccctattcctcaacctttgaacccttctcttctgattatttgtaaaaataccagaaggacaccattgggtcttcctgtcttcactgtcctcttggtcacagtcttggttcactggactcaatctttgatgaacaggaactcttgtttgccttagccgattgcctctattatacgattggcttgaactttctgcaacattgctacacccaggacagtcttcaatagatggcagcctcataccttcattccagcaaaatctaaagaactcacaaccccaatgaggaccaaaaccgccatcatcttcttcataacgcctctcctgctgtcgcgtcccaaaacgactctaaaatacatcctcaaaactatgcatagaataagtaaaatccatgtgaaagcctccaacaattaaaatgtgcaaagttaaaagtcaaataaggcttggaggatttttgtatatttcctaaaagcctaaaatgcgtaaataaattttagtggaattttcagagcacaaataataattaagaagaaataaacaaagttaaaaaggttttataaaaaagaaaaaccctaaaaagtttcttttccctccccctctccctcttgggccggcgcggcccacctccctccctctctctcctctcccccgcggcccatccggccccctccccgcgcgcgcgtgccgctgacgggcggcccgcacgccaccctcgctgacgggtggggcccacccgtcatccccttcctcccgccgctcccgccgcctcgcccgtgccctagcgccgccgccgccgcgaatcccgccgcctcccgccgtccccgggcgcaataaagagggggaaatcactccccatgattccct

SEQ ID NO: 23591 - DNA, 2414 bp, Oryza sativa
agtgcctgtggtcgtcgccctagtcttccgttgtttctcgtttgtctttgtgtgtgctgggcccttcgctgcccatgtaataaatttaactatttacgcttccgcttgttaaactctgaattgtatcaacttttggtgtaccttgcctcctgggacaaggattaatgcacgcacgtaaggaacgcccgttgggttatttccggtcgtgacacctgctgcttgtcatatttcttctaatacttatcgataatgttagtcgaattcacttgaaaacatctagctcttcatgcatgggcagttagtccagcaatgtgtaccatattgatgggaaaaggattgcaatcgatcttcatcggcctcttggagtcatcaaacttgattttgcctcatataatagctgcttggatatgctatataaagacattacaatcattggtagaatgagacccagaagtatgccactagcaatacctcgtcttgcctaagtcctcagcagatgggattgtgtgcccagcaggaagttgaatctgtttctccagaagtagaaaatcaaagatcttatcagcctttgtgatatcaaagtcatatctttcttcttttccagaactcttcacccattggcatggtataaccttcttgcttctaacccattcggctgctgctatctcagaatcatcatcatcatcatcatcatcagatccatacatatagggacatacatgattgaccttcttaaagcttttcctggcttctgcaaacatctgctcatgcaaggttaccttctgtacaagatgtgacaaactatcaaagtccttggatgagaactttttcctgattggagctgccctgaaaagccaaatcggctaactgagcatcagttaagctcaagctgtagcacttattcctcatctttatgaacgtctgaatgtagtcctgcacaggctcatcatgcctttgccgaatcgctgttaaatcagacaatttcatctcatgaaccccactataaaaatagctatgaaaatgcttctccaaatcggcccaactgttgattgatccacatggcaaagaagaacaccaagtaaaagccgatccagacaaagacaatggaaacaacctaaccctcagagcatccacagccgatgcttcaccacactgagctaagaatcggctaacgtgctcataggttgaaacgctgtcctgtcctgagaattttgaaaaatatgaaaccttgaatcggttaggcaatggaaccctctcaaaccactcagcgtacggatgccgatacaggtttccagcatccttcggcttgagcccaaactgctctctcatcacatctgcaatcatatcggcccatggtctttgctgaggcactccctgcgcttgttgtggcattggctcgaattgattgtattgaggagcgaactggggctgagtcgaccccccttactgatattgaacttgtggtgatggaggctgatactgataattcaaattgcccccttgataattctgaaagtttagttgtatattacgcaccaaatgttcgggaataacttgaggtaccaccattttatctggttgcacattatgaaccaaatgctctgggacaacttgattcgcagcgtgctgtcttagctaattgtcaggtgttccgaacccagccgatgcattcaccaaaccttgatgctgaatcggctgaacaacctgttgcctcggtcttgtctgctgaatcggctacacaacctgctgtcttggtggcatctgctgaatcggttgttgctagattgtgtcaacagtaggctgagctggtaagaacatagcagcaacttggtcttgagttagccgattcacattttgtccattatgctatggctgttctctcaccaacaaccaaggattaattagttgacctggtgccgatgatggtgcagccggtgcaggagccgagactggtgctgtcggttgagccgatggtgcactgtgaggaattggctgaacagctggctgattattagtgaccaagggccgatagtttgggaaaacacctcctggcaaataaaccggtcctgtagcctgatactcagctatcgagcaatcaaccatcgacttcaccatgtttgacaaagtattgactaacacccaagattgattaattaaagcatgttgcacggcatagtcaatcctatcctggaagttgttaaattgtagctgtgccgtgttgccatcttgattatgattctctgaaagtgcatctaggacccctcatttattttggtgttaatgacaacacaattagagggtaactaatgctttttgttgagacgtatgcaaggataaaaagtagtggatgtccccacaataagtattgcggcatcttttgtggtaaatgttttttaatccaagcaaatcttgtg

SEQ ID NO: 23592 - DNA, 5457 bp, Oryza sativa
tgttttttgaatgtacaatgccaccttgctcattttctgctggtgatacatgacatgaaactaaagtttggactaatgtataagtatagagcataaaagacttcattttgtagtaagtatgagttcctatcaaaaatatgattgttaccatttatttagtcccaacatgcatgctaaattaaccactaattctacagttccctgacagagactacaagaatggatcagactaaaaaatacctccagaaaaaacaaaaaacttgatgctagcagctcaaccagtactgagatctacctctaggttaacagagctgacagcatccaactaaaagaactgcatctctaattaactgcaaaaaactgttactggtttgcagactaaaatttctcatatacctcactagttgaatgatcctcactgcatgtgtgataattcctcatttcttgggactggcacattgatctcatatatttagactgcactaagcatgataattacactgcagaaaaaaccagagcacaacctactccatcaaattagaacatcatcttaccaaaactcattcatgatctaaaacaagagcaccatacgcccacccatatccccttctgaatcgcttccataacaaaatgaaatgctactgcagggtacaatactacaatgtattagaaagaacaggagaacaaattacaactctcccaaaccaaatcaagaaacatgccatacatacaccaagaaaactaaagtactgaacgaacccccaagaatcaagcagcagctacaagggcacgcacaaacctagccgggcaaccgccggcgggcgtcgcgcagcgaggaggaggaggcggatctgcgcctcagcgcctcctctgccagtgagtcgcgccgccttggatcccccctgtccccgcctgcttggagccgtgtgcccgcgctgccggctcgccgcctcgtcgtcgttgcaccaactgccgcggtgccacccgccgcgcccacgcgttggtgcctgcgatgcaagcgctgagaccggagagcgagattgggagctaactagaggaggcggaaaccctagaggaggagaacggaaacccaggaggaggagaggaggggaataaggagaagagcttacccttctcgccggaggaggagtctcggcggtggcgcgtctcgccggagaaggaggcgtggcggcgcccgctgttgttcgcgcgagagagaagcgactccggttgcgcgagcgagaagcagcggcggatcgagagaggaaaaattcccgacctccggaggtcagggacctttccctagggtttccccgcggattgggccgggaaatccctgcctcgtgggcttccaaatggacatggaataaaacccgtgacaatttcccccgtgggcttttctcccagggaatgggctgggatcccggtgggatcccgggctgccaaaggagcctaagaagaggtatgggcagtattgtgattacgaaattcactgaaactttatgaaacatgacaaaggagtctaatcggtaatacagtaacacggagagtacaagagaagttacatacgacttgagcccttatttccaggtctttcggtgctgaaagtgaattgggagccaaaaattctaacgacaaaccgcgtgcaggaggctgctaagaaattattgcctagaattatttggttccaatgttgacagatgccaccaatggccaaataagttaaaacatctgtcgctgcaattccggagatactctgatagataatgacctagcttgactattctgatagatactccgaaaaagttgatgcatactcgcgcttaatttactgtttgtttttgtcgatttatgcaatgtaatatgctaataacgatagcacgatcgacgactagatttttatctaaggtgcatgtactgctaccggcataatctaaaattaatggacgctcttgattgctcgcagaggagaaaaaagaactgcttttttaattaaaagaatagtatattatatatttttactgtgaatatatgataggacgacacgcttaaatttttatctaggcctgccatctatcggtatgatctaaagctctgattccaagaggtatttcttccgcgtgcttttagcggttgcgttgcgttagccttcctgtgctattcatagcctagctactccgttagttcgggcaagcaaaagttgagttcactctactactccgagactcctgagtgtttctgcaaaaacttgaggagaggggagagggtgatatccatggagatggccgacccagctgagagaagacggacgatcctgcgtcgtcgtctcgtcgacgagaaaactccatagcgtttcatctccgcttggcgatcatgttggtgatgatgctgagaaagctattactaaataccttcgtttaccctatgcccgtaggcatttgggatgaacaatgccaggtacgtccaccggccagatgatgtacaacgcatgcatttcctgacgtggctgacaacgtgagttacaacgtaaaatccggctatgtcgatcatgaaactgatggatcaccttaattacttttgatgcatgcagctggtttataagacaattatggcggtactccatgcgctcaatccgatactacggccacgtacacttggtcacaactcaggaacgcgtcgtgatatcttcggctcatcgccaggaggaggagatgccggccggcacgttttggtcgatattctgtcccatatttgttttaaattattttatcgttcaagctatattctactcactccatcccaaaaaagaaacatatccggtgaaaacgagctaagagctgaaactcgtgaaaatcatacctcaaagttttataaatttataaaaaaaattactagaaataggtgtagatatcaaatacattctcaccaaatcttaagtttaaactcaactttgtttaggacttaaaaaaaaagaaagttcaggtaaatagtaacatgatactattcagccaaaatttgccccttttttctattaaacgaagttgagtttggagttaagaattggtgagaatatttttcatatctacacctatctctagtaattatttaatgaatttacagaacttttaggtatgattttcacgagtttccaacccttagctcgttttcactggatatatcctccaaaaaaaaagtcaacttatacaaggatgggacacttcctacatgttaagattcattatactatgaagtgtcccattcttatctaggttggttttttttgggacggggagagtatgttaaacatgtctgtttgattatgtatagagtgattttataatatttgagaaggtatatattgagagtataaattttgatggtatctctcaggaagtgtaaattaaaattccccttagaaataagtatagtttaacaaactgataccatggttgccagttcaacgtaaaattatggtcatgtgattgtttgtgtatttacaatatgatgaactcgaccgtcttacttttgctgcagttccgaagcgaggaatctatggccgtcagttgtcagcagaacgagatacgacttggccacagctcatcaggggaacgagtactacaccctttcgctagaggtggtgcaggtggcggcgctcctttcgctcatggggaggagcacattgccatcgatattgatctgctactgcaagccactcccaatatattttctgcgcgagaagctagtccaactcctgtaagttgtccctacgctgacagccaattattaatactatcattagctagttcgtgaattagttcttcacgggttgcaacttaactacgatttttttttctttttgcgaactagaacgtgctagtgcctaaacttattgttccaataacaatgccttttattaggacttctatatagggataatgcttctcaaccgacgcatcggacgccaccgtttgactgcataaatcagccaggcaaagatgctttatgtgcatagcctcatgtactaaggcagggtttagttcccaaattttttttttcaaaaacatcacattaaatctttggacacatgtatgtatggagcattaaatctctactattataaaaactacctgggtggcccgcataattacgcggctagtacccatataaaattatctatttttaatatggttttacttaaattttatttaaattttattaaatagttatcttgttgtcttaatattttgaaagaccaaagcttatcatctacatatttctaattttatagttttcaaaaatcatattagttatccttacttttttgtcacccttccttttttttttgctttctcgatctaccattgcttctattcattctcgttgaatcctttaaaaattagacattgtagtttttagattttattgtctcgttgggttttatttttataatttttagaagtcccatcaaacgatgccaccatactcctctaaggcccgtccagtgcctctttttttttactgtcattgggattttaaaagtcaaatataattatcttttgagtttattttttactttctagaagtcctaccaaaccatcactggctttgccactatattcctgtacagccctctcctttttttctttcaaattttaaaaatcgaacatgattatcataggggtttattttttagaagtcccgctaaccgccgtgatcgtgcatctgaacggtttgtctgtcgtccctccttttaatcattattgggattctatttgggttatgttaataatttttagatgtcacatcaatagttaccactctacttttttacaggagttttacttctcccctcttacttgtcatttgttatcatttgttaatgtttaaaagtcccgtcaaacgctgccaccatattcttctttgattcgtccactgcctgctctctttattgtcaatgggattttaaaaatcgaacataattatcgtttgggttcatcttttactttctagaagtcctaccaaactatcagtggctttgccactatacttctcaatggcttgcccactccctccctctttaatgtctttgagattttaagaatctgaacttgattatcatttttttttactttttagaagtcccgccaactgttgtgacagtgttgcttaacgacatgtccatcgtccctacttttaattgtcattgagattttattttgggttttgttaaaatattttagatgtccaatctaccaccaccactttactcctttaaaggcatgttgcttctcctctctttattgttatttgtcagcgtttgtattctagataaacttcttttttgtaaagtccatatttttcattccaatattttttatttataaattatattcctacttgaactcttacaagtatttttctattttttagaatttatttttaattattctcgtcata

SEQ ID NO: 23593 - DNA, 15997 bp, Oryza sativa
ttaaattgcttagtttttgctataaacagctcattgccatattcattaatttcgttagttttactattaagggtacaggggcttagttttactacaagcagtgagatgccgtattaatgggaatcacttcaagggggcttctcagtgtctgacatgttaattacaccatattaacatgtaaggtgcagccagcgctggcatcagtcggctctgttacatatctagtgttgttagagcgagtacaatagagtcagttgtaagcacacatgtaagagaaaagagaaaagagagaaggaaagtgggctacatagttgtagccagctgcaacacagactccaatacattgtgtgtacgaaaagtgggaccatatattaataatgtagtatatacttataggtaactattgtatgaatgagttattatgcttataggtaactattgtacgaatgagttattagattggctgtagataaactgaagctgtagttggctatactattaaacttgctcttaagggcagtagatggttacgattttccttctagattctagtaatgaaatagcatgccgccattaattataaaccaaacatgttattctagtcatgcaaaaacatttaagggcagtaggtggttacgattcttcttctagattctagtaatgaaaaagcgtgccaccattataaaccaaacatgttattctagtcatgcaaaaacagtctcaaatctataattttgtaataaattaatcaaaatacatgtaattttgtgaaattactttcattataaaccaaacacgtctaactttatagcgtgtttgattgaaaaaaataatatgatgtgctaaataatggatttcgtttctgttaatttcatttgttgcaggtgactccagatgaccgggtcgttgttgcacaaactttgcagacaatattagctagtattttacctttatgtgctgcatcgcggcctctttttaaggatggtcctgagtacgccaaggtcgtgacgtttggttttctgggtactatcgttcttgtcgcttatgctggggtgtttgccaaggcggccaacagcaaggccgcgttgaggctggtggtttctgcagctattgctgccatgacatttgccgtggcctctcagctatctggaatagggtacattgttaccgcttcacttactggtgccatcatggcggccttcataatgctggcagtataattcacgcccggcccccgctgctgtgaacggtaagagaattcatttagcggctagtagcagtagctaaagttttcactgtttcatttactccctatggggtgtatagtctcgtgcgttctattctatcccagtttaattatcacatagttcttgagttctttccaaaataatcatcatctaacaagtacatatttatttatttatttatttatgtaaagagaaaatgagtatcattgaacgctacacgcaaccaactaaaattaattcttataggtacaattacatgcaatatttaaaccttgatgcaatccacgggatacaaatcaacgtattaccttaacagatgagaattaattacagaataacgaaggtttagttgtcaatggtctctacgctatttgtttaggtgatgatcaaaatatagaatggagggattatcatattagaattagtactctaattcctgcacatatctaccattcatccatacagagcattttagaattaatcttaattagttcacacatatctaaccattcaacaaaatatatcgtatagtagagttgcagttttctatattgtttaagtttaagattaagattttacctcaatttccgttagcatgattttcaaactattatacggtgtgttccgtgtgaaaactttctatatagaaattactttaaaatatcaaatatatctatttctagagttgaacaaactattttatccatttatagaattatgtatgctttataaaagtacataagaacagtatctttcatgaatgcttgcttctgattattttatcttttcaacgtcagcagatggagcgggcgccggccacctgagttccaggagaaagaagcaatggaaaccaattgtatttgactgggtgattatgttgacaagatttttgctgtgtagtccttttcaaaatgtaaaaaatgtacgacgtcgttcattttttttaaacgtttgaccattcatcttattcaaaaattttagtataagtatataaaagtataagttaagattatattttatttaaaacaaatcaaaaaaaataaatagtatttttttaaaaaaataaataagataaatagtcaaacgttatgaaaaagtcaacgaaaccatacattttgaaattgaggaaacatcacagttacatacattttaaaattgaggaagtatcacagttgacatactaaacctcagcaatgtgttgctgtccgatcgatccgtgccataagggcatgcgagaacatttcgcagacactggttgcattatcaaataactcgaatcattggtgtgcagactttgacgtgttctgttgcatctttttgggttacttgtcatttgctatgcactctttgctataagatgacactttactcaggtagtgcacacattgcttaggtgatcatacaataatatgagcttcgttttgcgtgccggttcaacccctcctcccgaacacagcctaagtcgcccttcttaccgtttctgtcgaagttgtcgtcgccttagtcgccagagcaccataccacaccacccccaaccctattggccatcgtctgtccgttacgatttacacacccgttattttggttcagtcgtgtgacaacacactccgttgtgtactattcgaagcaatgacaaatgaagcaccaagagcaaggttaataggagagcccgttgttggttccaattagtagccatgtcatctatattaaatcttatagccaatctgtagtgcaaaagatgcattgtaacacgaatattttattaattttgtgggggccgccatcttccccaatctcttcctctcatctcttctctcccggttgtggatgcagggaatgacggtgtacctgcggcggctaaggcggaaaaagacgacggatgtggcagaggtggaaaagagcaacgtcagtggctactgtggacaatggccgcagcggcggcagatagacgcaacgagcgcggaggacgatctgcggggaaaaaccacaacaacggtggcaaaaacggatgtaggcgaccgaggcaggtggaatactggaatagaattgcaacgggggcggaagagggcgacggcaacggcgcgatggacgagggcagcggcgacgccgggcataatggacaagggtggcggatgcagttgacggcaacatcggtcatggcggacaaacacagcaggggcggacgtagtcatcaacgacagtgatagtggccacggcggacgttggcgacgccggcatacatgacgactgcgacctggttgagcgcgacggcgacgaaaacaggcaagagcagctcgcgcggtaacggtgtctgtgggcacggtgaatgcagacggaagcggcggcgcgagcgagagtggtgagacaggcacaggagatggcagcggccgcggtggacgaggatggccgccgcgggcgtggatggcgagacggacgtgggccactgccgcggaggacgaggacggtggcgaacatgaacggggacggacgcaaacgaggatggagcgatggcagccgtggcgggatgactgcaggcgaagacggtggccgcggaagacagcaatggcggcggccagggaggacgaggacgacagcatccacgaccgcgagtggggtgcgggacggcggcagccaaggccgcgggcgagggtgcgggcgacggcggcggcctcagaagacagcgacgacggcagccacgaccacgggcaagggtacgagcgggggtggcagcggcggcggcctcgaaagatagcgacggccgcaaccacgaccgtgggaaagggtgtgggacggcgtcggccacggaagaccgtgaacacaaaaggatgcgctgagccactgaggcacgggcgccgctagcgcgtgccatcgttgtgggccccacgcctcgggccacgcatatagccaggcaactaattagtcgcccgcctgttctctctcttcccctctcttctagctcaacaaaaatcctacgtggatctcttaccatccattattgtacttgctctaatgtgataatgaaaaatgatcataataaatcaacgggaaacataatatttcgtattgtggtaacataactctaattttaattcaacaataaacgtgtctaagtgagcgtagcttaactgattaggtttcttgtggtgcaaccaggttcaagtcccaaatttaacacggatgctcgtatttacaagtaatttttttagtggtagacgacatacccgtcgacaacaagatccattttcacaatgcttattatcagcaggttatggtctttgcagtttgcactgaactatctcagacccaccatggatcatccgagcatcatttggtacattacatgctgtacaagtcacagcaagaaaaccctgtaagttccatcttgtcccccagtgttctagtggagtaatttcctgccaacctcagtctacttccctacaagctaaagtgtcactgatcacgctgtccaagaaacaacatggaaaaaaactcgttgttctgtgtgtctaatctttgttctttctctctaaaccaagacaggccgctcttacaggccctcaatctcgagtgccttgcgcactatccaaaccaccctctctgcaacacaacagtaataaagcctaagtgacaaaaaggaaacagcagcaaactaaaataacatacttctgcgctgttttgtttttgtttatttcaatttaaatcataaattaagctaccacttacagttattaatggtgtgtttaagctatagctagaggaaaaactccaaataatgaacaaaagtgcccctaaaataatcttataggcattgttaatttcattctaacaattgcattaatagcagtaaatctagctacagcttaactgatagtgtaagcctctattaaaaacaaattcgacaagaaaacgaactaacctctctccaagcgtcgtgcatcctggatagccactgcagcatacacaggtaggatgacagctgcaaatagaaggggcagtaacgacaggctatcaagccaggtcttggaataggcagccataacatagccaataaaaagcgcaagcaaccctccagcgaagacaatggtacgctgcaaaacaagagaagcacaccaaaaaaggaagggaatcatatatccatgggaagtacaaagattacattgcattatcagaattagtcattaactgacgactccttctcatttcgattttcatacggagtctattagactcaaaactcaatcacacaaattatttcattatgtcaactcagaaagggtatcttttttaagcagtcttagttcccaacttaaccaaagacaaaaggtatcacatgttactaacttactatatctaacagttttgcatttcgttaactatatcatgtattttgtatttatatgattttgtttatcacaagtaaaaacttgcccatttttaaatgcaaacacaagaatgaaactcaccatgcagaagtaaaaaacccagttcctagtgatcgcgacaaccgcctctgccgctgcggtcgccggtgtaaaaaaagctgctatctccatggggctccgcctcctcctaacccctccagcttccatgctgataaggtgtttggtttagagcagggaaagcatcaacaagaaaaaacaacactatccaccagctaacaagtgtttacacatgcaaaagcaaggaatcatatagcaaagataaaggataatgtcagggaggtgaggcatcggacttgttcagtcaaacaaaatgctcatggtcactagtgcttaaatctggaagttcacactcctaaagacagtttcggttgtgaaaagtttccgtttttctcattgcataatagtaaccagccaagcaatcaactagacagtcattaccacacaaatgaaccagatttgaagtcaaatgtgtgggggaaattttagggcttgggaaaataataccttcggtcgtggttacccgccgtgcgccgccctctcagactccttcagccgcagccctccgccgcgccgccggccgtcgggttttgggaggagtgggggaagacacagggagggagggagggagggcgccgcctccgcctccgcctccgacgtgcgccgccgaccccgacgacgacgtgcgacttccctcccgccgcctctccttcctttctcctgcttcgaggggtagggcggaatggggtaatggggttgggagttgggacggaaggggtagggcggtggcaatttacccgtaatttggacgaaacttaatgggtagcggtgtcatcatgtcatccggttcaattcactctagttcaatttttagttggattttcccaaaccgccggggcgggatcaccgcgccctgacgataagcacgaaaccctgtaaaaattatcaaaattttaaattatattttaactttatttgaatttaaggaggttaccgtggtttttcttttactataccccgtggtaagggcggttaccggcggttttgcaaaccctggttggatccttttgggcggaggtgtcgtattctctaccagtgtcttctccctcctaatcatgagttcacgacatccggcggcaggcagatgaggctaagatttataaaaagaacatctagtttgatcgtcgatttttgagattttggaaagatgagtgctctagcttctgttttctagtttattttctggattctagaattacagtttctcataatctaaacgaaaagtttaactgtttggaggagcttctgattctgcggctgctagaaactccctaaacaaggctacacaatgttggtaactacgacataaggtattattactgactttaattttgttaatttatgtgggaacttcattgaaaaaattgaaacggaactatagtaataaaaatataaactagagagatggaacgtggtctatatcgctccacagtttcactcaagagatggctcttgtagttagttgtaggagttagagtcttatcaaaccaaacatgccctaatcgtgtggttgtgctctagctctaataaaaggtggatataggagctagagctctgaaaaaaccgttagtttcccacgacaccttgttgagtttatctactaacatatgctaacacaggatagggatcgtcgtgtaataacttgtcctccagaaccgcacaacacgacgcatccgacgagcgggtccgcttacacatatcacccgaaaagcgaggtgatatgtgtaagttggcccgcctgttggataggtgaggctacaagattagaaatctaagtgggcctttgtagaaaagtggttccttaataagagaagcttaccaaagtcatcgatgcaaatttctctgcaacaacgagcaccacatgtggctcaccacaaggtcgtcagtactgcaaaggagctcgttggacaagacgagcgcataagctcatcaccatcgtccttgattgcatagtgctcatgccccacggagagagctgacatcgacaatgacgcgaggcatctagtggaataaaagcatatgagagagaacaacgaggagggtggagaaatatccactaaatacgtatgtcttttcaaaatttggcatccaatccacgtatctttcaaattttgctatggggatgcgaattactaagttccatatcactccgttcgttatccatcatcgtagtccatctcgtctcactatatgtctgcctatataatacatatgagtaaacaccattgtcagatgactagaatagcataaactaaaaattcgtatatctgctgacatggattagatagcaaattccgaaggacatgcacatttatacatatccggtgccaaaacagtgaaatttcacgggaagagcgttcaatccaacggctcaaatcagccaccaactccccctgaaccaccatcgctagtcgctacagtgaattattgtctgtatttctttcagtagttgtatattccattttggcaacgccatcgccacgtcgcctcgccacccgaagcatcgaacccgaaacgctcaccccaaaattccccattccccaagccctaaccctagctttgatccgaccaccgcttcccctcccctcccatggacgacgacgccggcgacgcctcgccgccgccggccgccgcgggggttggcgccaccgccgcccagtcgcgggacatggcggcgtcgccgaccagctcccgctccgtgacggagacggtgaacggctcccaccgcttcgtgatccagggctactcgctcgccaaggggatgggcgtcgggaagcacatcgccagcgagaccttctccgtcggcggctaccagtgggcggtctacttctaccccgacgggaagaaccccgaggacaactccgcctacgtctccgtcttcatcgccctcgcctccgagggcaccgacgtccgcgccctcttcgagctcacgctgctcgaccagagcggcaagggcaagcacaaggtccactcccacttcgaccgctccctcgagtccggcccatacaccctcaagtaccgcggctccatgtggtaagcaaatcttctgcctcgatttggattcggtcgtgaggttggtgagttgcgttttatccattcgaatgtctagtttggatcggttagtgctgaattgcggatcgatgttggtagccaatgtgctatgtgtgattcagttgtgattgtcctgcaatggcgatttgagtattggcattatagttttcatgagattattgaggttcattcatgtgaataccatcatatcatatataatacttggcatttgcagctttacatttttagcagctcagaataccaatatatgtttctacaattatttgagttgggaggtgttagtgcccttgcaatagtttgttgtatgccatacagcttatatagtcacttttttagcggagttgatgcaaccatcagaactgcataatagaatttatagcccttgtgtttcagaagaaggaatcttaaaccttgtcttgaaactgtcaccttcttatgctttatattcattggttaggataagtttccttcttctattggactggccagtagccacccctaaaaatatttcatactgccaacatgcaatttgtgatttggttttgccgaattcatgcaaccactgtgttgtttgatttacctggctttcatgctttgggattgcttcattggaacattatgcattagctactgtcaagggattttggaatggttttaaacttttaatgcaatctgttgtcagcgattttttttgaactgttttgttagtttagatgcgtaccaatagcttattgttgtttcagattcgtacatttgaatctaactgaagtgacagataccattttactgaaatacggaaggtgagactcctattctgtactggtatgttagatataaatggcaaagacttctatctgacaatcgatatgcttaatgagtgtccattcttgtgttttgaaatatacagttaactatcttatcagtttctgataatcaattttattctcctttctttcaggggttacaaaaggttctttcggcgaaccgctcttgagacgtcggactttttgaaagatgattgcttgaagataaattgcactgtgggtgttgtggtgtcgactattgattactccagaccacactctatcctggttccagactctgatataggctatcattttggtacgcttttggacaatcatgaaggggtcgatgttgttcttagtgtgggaggagagagatttcatgcacataagttggtgttggctgcacgatctactgtatttagatcaaaatttttcgatgatgaggatggggagaagaatgagcctggtgagaatgatgatgtacaagagattgttattgatgatatggaaccaaaggttttcaaggtttgttccagcttcttattttgaatttattttatccttgtagctttagaagttcagaataagcacttactaatgcgaatttctttgcaggcaatgcttcattttatctacagagatacacttgttgatgataacgagttgggtgggtcaagctctgagggctctatcttcgatacattggcagcgaagttgttggctgcagcagacaagtatgacttagcaaggctaagattgctatgtgaatcttacttgtgcaaagccatttctgtggctacagttgcaagtactctagcattggctgatcgacaccatgctatggagcttaaagctgtttgcctaaagtttgctgcagaaaacctttcaggtgtgtaccttacattcacatcaattctggtttgcattcattgcgtcctatgggcccaattttggccctattttatgtcaatcaaaatgcttcagcatggagctgtgaatctgcaaaatatcttgatttggttcaataaataaattttagccctgtgtgcccagtgtgttcatttgtttggtcatgttgccatgggaaaagttccttgtactcatcattaaaacttaacaattgttcgttgtagacgcatccatgctttcagtatctgaaccaataacaaattctttagaccagcacagtttcatgttgtcaggtttgattttttttcttcggcagcttacagcatgttaaaaatgtgcactggctgcaaatttcttttaaagctctcaaaaattaaatgggaagtagcatgtgcatacttctggtatcttgttgcatttgttctattggtgatacagaacagaatacctgaaacgtgttaaggaagaagcgattataaaactatttatgttcttaaactggactggtacagcttgctagataaatagtggttaagtttgcaagtggagaataatattatgagatgagcggcatttactttttggtcagaattttagctctgttaaaattccattaacatatacaatttaattatttcagtaatttcatattttaaccattgtgcctggaaaattattgcttccacgtgtcatcgattgaaatctttaccttttggttgctttctggatgcaattatgtttatacggtttcataacattccagatacccttatgtctctgcagctgtaatccggaccgaaggattcgattacctcaaggacaactgcccatcacttcaatccgagatactgagaactctcgccggctgcgaagaggagtgcagcagcggcggcaagagccagagcgtgtggggtcagctctcggatggtggtgacacgagtggccgtagggttaggccaagaacctaaaagacccaccacataacactgaccttgtttagcgagcacctgtgtaaatggcgacatcaatatcatctgtatgtgacaaagatgagatctgatagttgacttggacttcatctcatcacgctctttttgcatcgtaattgctatgctgtttataagtttagctgattgtatttgatcctgtgacccgttgctgctgtgcggacgcttccataaactcactacaaaatggtgattttttgggacttgttcgaatcagctttcttctgctagtaacagatttgttttagctctctttagtttcgacttggatttatttgatcgaattggatggttatgctcagaaggtaaaaacttgcaaaggatttttgttcttaaccaaagggtcttggtttagaaattttgatatcttagcatactcacgcctgtgtggctgtgtgtggtttatggacgcttcctgtttgattagttatggacacttacattggttggatgagacaacctcaatccccgtccacacacagggattttatcaaaaaaaaaaagaaattattgaataaaagtgtgaattagagaaacttcgatgtgacttgagaaaaccaaacatcctgcaaagcggttgctttctcacgatccagcacttggattggcagatcccacggcgacgacacccattccgcctccttccgcggatctaacgcccttgcgtcttctcagctccccttctgtagagttcacccatttgccatctttatccatgtcttgcacaagctcatcgatcttccggaattgataaggccatcttgcgttgtacagaaattgccgaagatcgaaccggttatcctcgggcgaatagctctacagaaattgtccaacggcccaggttacagcagtgaagaaaagatcagatgttcatacgcatatgcactgaaaaagggaaaaatgcagtacctccgcatgataggatggtgtcaggacagtcatcttatgccggtttatcgcgtagtacttgaagaagtgcttcactttgtcagccacttcggagggggatagtgtcccacaccacctgtggcacaggttctgcggcaatatatgttagcattgtagtttatgcgccaaactctgctgaaattttatgttttgcgttgatcataatagaatctgatgatttaaagatccatttcaaatttaccctgttagatcctacatttttcagatgtatatttcattagcaaggcaatgctctacaccaaaacagcattataaacaaatacgactgaacaagtttgagttaaagcatgtctaatgtatttattattgcataggttgattttttatgattatttaaagtactactactattgtttttaagataagtagcaggcagcagcatttttttccaaccttctctatcatccatcgctcatcctacaagtgaggtgaactgtagccaaccctttaacttactgtttacttcagtccattttatattacagttgttcttctatacttaaatataacaacagcagaatatgtaaaaagctccagaaaaagaaatcccataaaaaggaaaatcctcaacaaagcagacttactccttatagtaattactgaaaatgccatctcgtttggaacagtaaaactaccctttggtcaaatatgcatataatcaaaacagcatgactcggttagagagatgcatgagaacgctagagctctaggtgagagttcaagggaaaaataaactaaagaatacacaaagattaaagtttgctgtgataggaaatatcctcttctgattaagctatcaaaagcatatcaaattcatagagaccaacctgaaacattgaaacaggaccacaacggaaaattttccttaaccttccatatattgacaactcctcgtatgtcattcccatgtccacctcatccaactaattaagcacaaataatgtcatatgagaacaagactaaaacaagatgagcattctgataaaaaatgataaaattctgcagtagccaactaagctatttcatgcagaactgaatttaatgaataatctataattggaatgatcagttgcaacagataaacatatgtagttctggtttttaggccataattgtttctagctttaacattaaattcaagccttttgctgttttgcaatatgtgatagagctcatgattagacaaaccatgttgtaattttgaactggaaattagagatcaaatttccaggatatgtaattacctgattatagtccgcacggatcggctcaagctctgcagtaggtggcgccgcttcaacctcagcaagggaagaatagtgaagatgaactgctgcccatcgcaggaaagcccggaggtcctgcttacttacacttccaatgggatttatatctgccgagctgcagtcatacttcatagaagaaaaatatagttatttatcatttccagttagttccagatatgatgtacaaaatttacggattcagaattaagaattcattaaggaaatgctatatacgtggttcctcttatctttacttacaaaaaccaggcaaactggccaaggcattacatctaaaagttagaacatctgggttgcactagtatttgagcaacttactttcgtcaaataaccacgcaatccttcatccacatttgaacttcccagaacaagatagaacccggatttgttatgaacccatggcataagtgacgccatcataaaggctagtaccatcctgattcgagcttgaatattttgcaatcccagattctcagtattggaacccccatcaacctgaattattttagcataaatagtagtcaacaaaatgtaataagaatgaaatgataagacataagggagtcaccgctcatgctaacttccatgtttgcaatctgattttcagatgatgtcagataaaccattgcagtcacaattgttcgttagaacttaaaccaagacaataatattaagttttgtcctcgacaagtgtataaataataacatattacagtttatccaaagagcattgtcaacaaggtgtcaaggtgtgacaggcgtcaaggtgatcagttagcaagcttgtgtagcagatcacctttgccttgagaccagattaaaacaaataatagaacctgatggtgcatcaaccaacttttggggtggcagatcactaccagatcgtgctacatatccaggtcaccaggctctgtagcaagacctttggtagtgagctcagaccatcactgctggatttgactacatgtggcagccactttcaccaatactgctaaccatggccacagtccacttaactccttcagcaatggctggtactcagctcctaccactagctcactgctgtatgggtgcggtgagttggccatgtggacttattgggcatcatgggttatgaggacccttgccattcattggcaatttaactatccgataacctcttttatgagctatacagtaaaaaagtacttcgtatatatcattgcaataatgccaacacatcaatgctttactgattaaggattgtcctttcatatttcaaactaaaacatcatacttcattgccacgttccatgtttaactatttacgctatttgcattccactttagcccacaataaattaaagacagtggtctaactgaactacacagtagaacaatgcatgcactttcttggtctcagtgtttatgcaattactggtagatttcttccagaccagtcttcattgccctggatcatatttttactacacatgggaatattttgcatctcattgttgttggataaacgtgtctttatagcctttgcagaaaaaaaaacacttccaaaaggataaaaacagcaagtccgcacatgtcaactcaactcctagaatgcagtcatgcaatttatgtaggaaattagagtagcatatcacaaataccttgtaccgtgggcgtttcccagtcaatctttcaaacaaagaaagcaatgcagatactatactatcaattggtacatccaagtggaatgaaccgatctcttcagcaagcattttcgctcgtgatcgagtaccttcagaactgtgacaaaaaagtagaacagtatgctagatgaataaaaagttactgttatagcatatatagataaatttacatacgaaatcgagaaatagtccatgcatcattgacatagattgatcatcagcatgtgtagccaatttcctctagtctaagacccttttgtcgtactcgcttatgagaatttggatcatctatgcaaacttcagaaacaataatatgcaatacatgtcagaaatgttattttcagttatattagaaaaaatataaatgatacaggaaaatagggtttgttagtgtcaatactggttttatcatattatttactagtatgttctttcaaaggtgttttgagttgcttattgctagaatctagcattgtcttataatctggtactccctctg

SEQ ID NO: 23594 - DNA, 74999 bp, Oryza sativa
  unsure (1)..(74999): unsure at all n locations
aatcccttatattatgggacggagggagtattatcatgcaagatcacgaattcataagtatccaatgcaatccagtccagacttgcctagtatttggtaaaaaccgtgcctattatttggtaaactagtgtgtgtatagctccttattcgatatggcaaattgttggattatattattctgttgacaaaaatggcggttagacaatagttgctgaacttttatcgggtcgtcaacctagaatattctgaattccatcagaagctacaatgatccattatgggcacacgtgagcgcgcgcgcgcgcacacacacacacagagattattatttgtgtgtataataaatctatgaataatgaggcgatacagtatgctaaccattatcaaggcaattaattcacatgaaatattatttcattttcaatgcatatcaaacaacaagaacatacataaaatatatgatcttagaataaaacccacctattttcagtccccatgtaaacagtgtaaaataaacgttttgcgagctctctgctatctttagggaactctccatccttgtactggccaatccgcatagcatctgccttaacttgctcatctccattctctatatctgcatattatggggactgaatagtcatcaatttcgaaacaggcacgtcagttataaattctgatgttacagaaacaatttcacaaaaaagaaaagcgtacaaccataactgatcaactggcaaaaatgatctaatggtaaatgggcaacagtacagaaaggataaagcttcttgttacatgaatggcccactcacactttggcactaaatttacagcatcacttatctcatccatccagtagttctctgccccattttactattctgttcttattatgctagtcaacatgatttgactacgttttgaaggcatttcatcaaaatcttttgctaaaaagaaagaggaagaaagacaatttggactgaccttttacgacaagctggcacatgcaaccaactattgctgcaacagatgaactatccgcaccaccagacagtggcagcaaaaatcctgatgctcgacttctccgcagataatcccataaccaacaactaggtccaaatgcaatctcctcttcaggacgatgatacataacctaccaaagatagatgcggcagaaagatgtcatacaaccttttcatctgcacagtggtcaccacctatcctctacactttgaggctgtaaatactataaaaagacaaatggagtattttgagtgcattaacaatgacacagcagggattcatgtgataatttgctcaggatagaaaaaaactgtatttaagtaacttcaagttcagtgatattataatagcaattgtatttgcaggcctactttcagagacaaccgcaagaagatcagaaaagaaaaagaggaactctcactacactaacaatctaaataactaatctgtggcagggtctaaatgggtctagtggtacatctcaattagtcaaattcatataatccattcattttagccttctgcaccaattaccaagaccagtgcactatgctgagttcttacatcctaaatattgcttattttgcagtctaaaactatagtccatgtacacaaaattaactccacagtaaatggcacctctcccagcaccaacctagaatacctaaagcggcatctagcagagaacaaagcccataaaactacgtctaaaaaagaatggagggagaaatttgacaggaagtctgttaaaatcagccatgaaataaaggaaatttaataaatagcaatatattagacaatacatatgttgcacgatagtttatgaaaatgaattagctgaacccacatggaactagttttcaaattgcataatatgctaaacaattatatgatgcttaatattgttattcccaataattgatgcttgaggacatcttaaatctcttatatttaagaaatcatgtcaagatagaatcaaaatagatatataaacaggaactgacctcaacaggaccagttggaaccattccactctgaaatggcttacaaagcttatatggtaccttaacaaaaggtactttggttcggtgacttgcttgctctctaaaactagaaacagatgctcgataacttgatacctgatggtacaaaataaatactcagtttatgcaagaatacaacccatgaacttacatcaaagactcaaagctgaatcagcattgtaagaaccagtaattttaaactcatagagaatagcagaacacagatttatgacttcagagaactgcaagtagtcatcaaaacggtggaaggacaagaagaatttgttaacattagatgaagcaaagaatgcagctatcactgaataaaactcacttataataattcaatactgccccgggttgatttttacaagacgtattttgaattcaaaacgcctttagattaaattttgatcattgatttctcactaaatgtattcttaatatctatgaaaccaatattttcacttcgaatacgatatttatacacttaaagtactagtaatttaacaaattattggtccaaatctacagattttgatatgcctaagaaaaatcaatggagggactaatagtattctttccacactgaggcaagaaaaggaaacaaaaaaccgagaaattgtttgtttgtttgtgtgagcatagctcattggaaagacgcatgttacgaagggagctattccttcacatgttcataagttataacagataaccctccattttgtatatttaaaaactcataatatacaggaaatagtaacggcaataatagtatctcaatgagctcgaacttactgcatcaagatctaccagagcatccaatacttcaacgtcttttaacgagaattgagatccctgtgcaacaacgtctccattgacagcgatgcagcagcaaccatctagcaggaaccattaaaataactttgaagaaatgaattaacctttagacctctcagatgaaggcaacgaaaacattaatgtaaaaaaatagcactattgttgactccttaaaggtttgaaggatagatggcattcagaaactttagaagacaaaatgttaaacagaagtattgtatcttgggtagacagttttaggataattcaatgtagaactttaaacattccagttccaatatatactattcgaagtacggtccatacagaaaatcaactacaatcaccaatttagtgctgtccctctggggttcaaatgctgaaagacaagtaaactagcatctactactagaaagtgcatcctcctcccacagttttcatgcactagccgcctccaacaaatgagcagaggaagaaggtgtttaggtcaacagaaaaaaaatccatgctatcttacaataggtgacaatggacactttctgacacatgaaaataataacaagagtagttatggatgcagggcagcccatgcggcagattgggttagaaataagccacttaagacgggagatcatctagttaggaaagaagtgagaattgttaatagggattgagatcctataggtgtcaagtcagtcctcctgatatatagaaggatccgatgtaccccaattatcaatcaagcaatgatgaatttctaaagagggtaagcatcatatcccctgatctttactcttattctaacccaatcgataacaaagagacctgcatgtccaactggaactagaaacaagaccacatgcactacgcagcatttagtctaaacaagaaaaaaaaaagcatatcatagatcagataacgctaaaacaatttttacagcacaaaaaaatggcattttgatataccataataaaggcgtccaccatcacaaccctgttgattagcatacatgtaaacaccaccacatgcaagggttgcatttctcatcgaatcaatcctaagactgagcttccttaactgatgatggcttccacttgcattcacaaaaacctcaacaccattcaacgctaggtcaatgcgaggggcatttgcagtgaagagctcttcacaggtttcagaagccaatgatctaaaaacatatcaattgaaataagaagctgtaacaggatcacatagtaaccaaataatttagcagttgagttgatcaagagacaaataggtttgtagacaatgtatgaatttactggttaacaccatattagcaaagagaacatttgagcatgctaataacagcatcacagtttaactgtgttctgataccatgttaacctaagtggaagccaactcgattgttactgcacaagacccgatggcagatatggtgggtacaagtgacatgatagtttaactgtgtgctgataccatgttaacctaagtggaagccaactcgattgttactgcacaagacccgattgcagatatggagggtacaagtgacatgaccctagactatcaccacgggaccacaaatatctctagtgcacacatgctaatacactagtacctttacctcggttaaaaagagaggtctaaaatgcaactcattaaaccctaatggttgcaacacccatgcgattatgtagcagatagtgcgggcactttgatcccaataaacaataattagtagactatctggtatgttaaccaggcaatcgtcaagctgaaatcacatctacatataaaagaataattcaagtagtagtacttacacatcaagaaattgaataaaaccataaccaaaaggcacagtatcctgggacgtaacctccgagatatcaagagggagttgaaagtcaacaagtgcatctttgaatgtccaagcagaaaaccatcgaaattcccgatagtttccatcatttgcaagagatatctttggcctaatcatgactatcttgctgtttaagcagaacacctggcagttgtaccgtacactcttgaaaataaccggcattcctatgctgcacaagatgccatccgtatagccgccagacaaaatgtccttcaagcactcccatctgcagattagtcaagtacagtggttaagagttactggaacagaatataacagtacatagagtgagcatccacacgagcatacgagagagatgctaagatctgagtaaagagttctacccgggtttagaattgagggatgaaaactaaaccaatctaaaaaacaataggtgctaactaatcaacaacaattagttaacttcaattgcaatttctggacgccgaagccaactcaaccaaactaaagtggaaatacacgtattaatttatatgacattaatagattctcattctccatagtttcactcctcgttacagaaccaaccaacagcatccgccactaataatccacaaattataacaggagaactcctaaacccttaagcataggcagctgtgactgatgatgacgaagattcagttcagagaaaggggggataaattagttacgcgtgggcggcggtgtcctgctcgaggaagtggtcctcgcagccgtagccggtgagctcgagctcggggccgacgcggacggcggcgccggcggccttggcgcgggcgatggactccttgacgttgcggaggttggtgtcgaagtccatcgcccactggttcaggttgcacgtggccacccgtagaagcctcatctcgctcctccctcctagtccctctcggatcggagagactgagacggctgggggggttcgggaacgaggagagcggaggaggtcgttcccgccgccggcgggcggcggcggcgcgtgcgagggaggcgaggcgaggcggcggtgaaggcaaaggcggtgtgcgaaaaagattttttattttgtttattttttgaggtgaagagacgatgaactcgaatgcgatgccgtggctgcggtgcggctcgtgcggctggcctgttcctggttcaggtggtgttcgcaactgaatgagacgaggattatggctacgtttgttctaagaaaattgaggggaagagttacatcgtttttttgtatgtttttcgttcataagaagattgctataaaagatgctttgaaaaatcatataattattttttaaagtttaaaataattaataatcgattaatcatatgttaataacttatctcgttttacatatattctcaatattctctttttttttctcttaaacataggcaagtaagattgtgaaaaggattaagaatgtgtaaaatgagaagatcattagtgaatgattaattaagttttaattattaaaaatgtgaatatatataagtaacttctatataataaatttcacatgaaatgtacttatagcagtttaaaaagcatgctaatgaaagccggatttcagccggacgagaaatcgcattataattagaaaagaatagatccagtgtttcttctggcataggagagtgaggctgtgttcggaactccaagttcccaaacccctctccgtcgttttctacgtgcacgcttttcaaattgctaaatggtgttttttttgtaaaaagtttctatacgaaagttgcttaaaaaattcaaattaatatatattttaaaaaaatagttaatacttaattaatcacgcgctaataaaccactcctttttccgtgcagggagatgggttcccaaccccaggagccgaacacagcctcgaatcaacggagaaaaaccactcgattgcttgatctaacggctgagaggaaacaggatactacctccgtagcgattgtatttgttctcacaaaacatagtataatgcaatagaatgaatgtggcgatatctcaatgcaagttcactcggtccaaccaacttttgtggtgatccccatgcaaaaatgaataattcgacagaacattttccgaatctagacaaaaagcatcgaactcgaaactaaatagcaaccacacttcagcacttcacagacacacgaaacaccaccacaatcaggtaagcttgattctagtacagtctagtacaaaagaaaggattaacttcagcagttcagccacaggattccaagtacaaaataacaaaaacttcagcatatgctgcagcgaacgagaacacacctcctgggtttccttttgccccgggatattgctgtattagtagctttgatacgtaattagaaatatttctgtacactagttgttgaatcctttttctttatagaggaatcgcaagtactaataacgcgacgtcggtgctaaaagtttaatagtttgtctaacttcacgagttctgggcgcctcaaaattgatgttctctgtcaatatcaccgagttgcctgttgcattgcttgagctggctccacaatgttctttgctagcatggaagtccgcatgttaagattcttcaagctttcgataaactgctcgtggctgcaatgaaaaaggatatgttggaaaaactccctcgtaaattgatgatagaaaaatagatcagtattcaagtgatgcttgcccagaagttagcatgaattgcgtgtatgggtgattggctgaagaaacttacatgttaacatgattggtcgtcatgataagagttccagacactgaatcaatcttggcatcgagctttgaatttctaactaagttcattatccacaactccccttcatcatagcgcatgttcagtttctgagagagcatgctgttcattgcaaaaaaattgaaataacttcttagatttgaaagaaattgcattcctacatggtccatataatataaagaataaaacgcatgaaccctgagaatttaataaactgttcctaactgagatgacagaacagaaagatgcaacagataactgccaccatgtagcgcattacagttcttttttctttttcctttttttttttgccgctaaacatgaagtgttgtccctacaatatggaaagcagctgactgacaaaattatgcaagacccaaccaggcacagaaccgatttgtgtattcgatatacagtatgatttagtgaattgataattaataactgcagttccctacttttcatctataggggacttttgcatgttaccagaaaaaaaaagtgagtagtaagacaaaaacccccacccaatatcaatggaccgatgaatacggcagtaagtttcaaagaataagcaaacaagcattttcaaggaattcatctctcaaaggaacagtgatggaattcccttcctcaatgcgctttcccaggaaaggatcattcaatatgacctacaaaggcagccattaggacaaagaaatgcaagactgcaatatgatcaccattgagaagacagtgctattagatatcgtatagaaatagcctagaatttggtagtgcaaaatcaccggtatgcccagagaagtggttctcatttaatttaaggagggaaaatagaaaagtaacaacaatgagctaatgacctaacgttcaactctggaaattttacaggccaggacaccgtcagacaccctcagacaggcctttctgatataaggatgtgaaagctgaactttgatcgcaaaaaaaaaagttaggcatcatatagcagtagtgtgtgaacatataacttttttttccaaacaaagaaaaagaggggaaattatctttcaatattttatatttcaacaataatgcattaagtaaaaaacagattaatcatggggatggacaaaaggttcaagacgcgctaatatacctcctcacactctatgagtttctgttgtgcgccatcaaaatcatagttaacaaacaagcattccagaaattcagtaatgggatccttgtagctgtgctgctcctgctgaatgactttaatcaactccttaagcatattccttctccttttgttcacaacaactgctgtagcaaggtatctcagaagatgtggtgcatttgtctggattgcattcaagtacctgaggagacgtaaaatgcaaattgaaaagttagctgagataaaatttgatatcacagacaaacatattttccatcatgggaactagatagcacattacaaataataaagcaaatgctttacggacgacaatagccccttggctctataatctcctctttgattctgctgttattttccttcacattcagcttgtccagaaaaacctacttcaaaatttttcactctttttatatcttaacgtagttctatgtataccagcaaaacacatcttaagagttaactcaatgtacgaaaaatatatagattttttaattggcagctttgcatggttctatcctagacattaaaccatggggcaaattattaataccttaccagcgaaaacaagtcatttagtgttagtttttagcggcattgcttattggttgttgaaccagggtaccattggctgtgtaactgcataagacaatagtgaacacaataatcatgaaattttagtaaacaaacctctcctggaagaacagatctatgatcccatttctgccgttttcatggttgtagaagataaagatactccagtgcatcagccatatcctattctgaagctgatttagcggtgaagagaagttctgggagatgaaacaaagaagtaacaaacgaagttatataaagcagctggccactcccaacaggaactattgataaagtctccaatcagttattcaagcaaacctttgaatcaataatctccttcaaacggttgagctcctccagtgcaacatcccagttctgcatcaaaatctcagctgccagctttccccacagggcactcaagctcctctcaatgtttgtgcacagagcacggtattgatgcaagtactgagcagcaaatgagtaattcccacagtcaaactgaaatttggcatactgatacagagtctcaatctgatcaggaccaatctgcaatgttaacaagaatacgattattaactgcatagcaacctaaatgacttggcatatggtaactacaaaaattaacaattgaaggggaatatcaagagttgtccctcacataaacggatgcaagacatcagaacatcccccagacttgatggcaatatacaattattctaaccatatacaccatattaagatcaaacaacatctgaagctaagaatcatcagatatccttctcccgcagttttaattcaataattggggatttatcgactatgtacacagtacacaattgctgggcacctgcatcccaatcccccacatcacacattcaactgtgcccccaacaagtgaacatacttaaccaatcccccaaccttcgcatcgccatctgcaaactacaacgctactcaaaacctacatacagctaacaccaactagacgatgaacagatctagtaagccgcaagccctgcagctagatcgaggggggcgtgggggtaagtttgggcctgacctgctggttctggtggatgttgtcgatggcctcgccgagcgaggtgagcctggagacgacctcggcgcggcgcttgaccatgtcctcggggacgtcgtcggtgccgtagcgcgacttgtggatgtccatggcgtagtcgaccatgttggtgccccggaggaggcggatcttcgcctcgaggatctcctcctccgggtagaggtgccgctcctgcaggaactccagcagcgggagcaccaggtggcagtccaggtgccccgccatccgcgccgtcaggtcgtgctccgccatggccgcttccccgcctcccctctccggtggattggtgcgcgtaggcgctagggtttttagggttcgcgggttggtggcgcggaaggcggaagagcggggaatacacgggactggggtgagtgggtttgtttcaataaaaattttgattggtaggagggtttatggttgattttttaatttttatccaaaataaaatcttttaaaacttatttttaaaatctaaatccttgtagtcaagcaatcccgtctaatatggcaaaacaacactagcacactacctgcaggctgcagcggatgtgaccgttttatcctaccgtgctagcgagagcgatgtggccaaataacgctgccacactagttggaggctggagcagcatgacggtattgttttaccacaccagtttggttggcgtggccaaaatgttcatatattgaaaatgaattttcatgagtttattttaaaatttaaaaaattaaaaggttcaaaaaattaaaagaaactctagggtaagacatgttttgtactagtaaaaaaataaatttcataaaacacctattttatggtcaaaattttagagaaccacggatggtcgcgatgctccgccttgctttcacaacaagtgtgtgagcttttatggctatccggttaattattggttaatccatgagtaatgccatgccatacacatccgttctcccctcctctccccctcctcgatttttttgtctaaagaaatgcaacaattccgcttttaaatactttcaaatactactgcatagcaaggttaatagtatcgccgattaccggctgcaatagtgtccaagtaatcttatagcctgcatataataacttagctataaaggatggcccaccgaattgagctggagaataaataatattttcaggagcacaccgatattctctctccaccttatcactttcaccatcgcaccatgcaccatccatttctttcttctatgttcttctcccttcatccatccccttccttgatttttctgtacgaacataagcataagcatgcaacatccaacagtcaaagcttgctcccaagctcgttgtaggcttgttgcccttgtatgcggctgttgcaccagcacacacagcactgcgccacgttcaaggcaggtctcgccaaaatggcctcgagctcgagctcctgtagtctgccgccaccgaggatctcgagcttcatgggcgaggaagcgtccgcaggtgaggccacaagttggagcaagctgagctcgaggccatgacggaattgagctggaggacgacgactccgcgacgatgttttagctccttctatcctcatcaatgctttcatccagaaagcgcgtgctgaagccaaatagtcgcctgctcacgttctctctcccttccaactcaacactataaccgacgtggctttcttatcaccggtccgcgatggtttattgcacctgctctaagtcgatacgtcggtttccagaaaaagaggataggaatataaatttagtacttggacccaccgcaggctgcccacgcccaaaccacttctactcgtagtgttctcacacaccactgacctgtgggtcccgcagagtcactcacaccacacgtggaccccatctatcagtgataggaactcacctttccccgcacatgcgggtccatggtagtagtctgtccccacatgtcagtgagcaaaacgtaaaggtaaaatggtaccgtcctaccgggtgcggaacgacaccacacgagcacgtcgcgtcggcaggtgggtcccatcccccgtgggccccacgtgtcatccacggtgaggcagatccgcgcgtggaaacgaagcgaggttgcgggcccacccacgggcgtcgtgggctcgtggcctctaccctttttattttatttatttatttcatcgcccaaaacacccaacttttctcacgcgcagcgattccacccccaccgccacccgcgaccacagactccacgattctctcagagagagagagagagagagagaggggactcagcgagcggtgggcgagagggggagatcgaaaccctagctagggtttgcgcgcggcggcggcggggatgtcgacgccggcgaggaagcggctgatgcgggacttcaagcggctgcagcaggacccccccgcggggatcagcggcgcgccgcacgacaacaacatcatgctctggaacgccgtcatcttcgggtgggtgtcagccatggacgcggaattcccatctgcctctacctctctccccccctccccctctcctgcgccggccccccggtgttctagggtttcggtgtccccggatctcgggggacccgaggttttcagctgtttttttttgtttttttgttgtagtggctgtggtgctaacgaggaattgttttccgtgtgatgatgttttgcaggccggatgatacgccgtgggacggaggtgaggcttgctcggtttggttttgctccgatctgtagctggtttagtgattaggttgtggtttactaattccttggggatggttcgatgtggaaattggaatcgttaggatggatatagcatcatgagtattttgcccagggagatgagaccgagtgagtgggcagctgattccacataaacttagaaggcagatgaggattgtctgttgttgtctatgtcggtcttgtcggatatgtggggagatcgagccatgcaattctggaagggtcattacagggttaggctattggctagatgtatgaattccttaacacgtaaaattgaaaacgacaaaaatacatggcatacttatgatgcctgtcacctaagcagctctaattgaggtgcgctgaaactgtcatttggtaattttggtttatgtgaattctacatgataattgctagagtaggcatggtttcattagactagtcaacaaatgaaccttgccatatctatcacatattcaataacagaaatgccgatttaggtcctgttcgaatccactgaaagaagtgtataaacttttgggtaaaagtggcacgcttttcaaattgctaaacggtgcgtttcgtgcgaaagctttctatatgaaagttgttctaaaatatcagattaatccattttttcaagtttgtaataattaaaactcaattaatcgcactttattaccacctcattttgcgtgaaacacttaatccttatcttcatcttcatcttcaggagattcaaacaccaccttaaacatactctagaaattagagtgactgctgcatttactgtctaaaatggagtaataaagttgggagttggtgtgagcttgcctgggaagtaggttgcatgtttggttcaggaaggtaggttctactatttgaaatatattgttttggaagtgcataacacatgaaggaataaataacctacaaataattatggatagagttaaccatgttgccatgtgacacttattgtgcatgttttgagcatgtggtgccccgaattatctgttcgacaaatcagggcactgtatattttttgctgttttgtcttaatcagttcgcaacgaacttaactatttgactgaatctgattatgatctgcacatatataaatttaagttaagttatggtgtcagatattttccaacaactaacattgccctttttatggaaaagaactttctgtttttttctcagagttcaggtcttcttcttttcccctcttctatttgagttgcgtaaacctcaagttacgtcttagatatatgattgatgatactacggttctgttgcacaaaccaatttgtaaggatggatgttaaatcctctatgcaaatcttggtgcctgtttattttatactgtttatgtaggttttagtgtaagttgagctgtttaaaagatttactttgttttgcttttgagtttcagtcttgttttgaaaataaaatgagtacacacttatcttttaaatgcatagcttaactgcatgcctacagtgcaagaacccttaaaattcttaggccatgatcctaccaaaagaaaagagaatgtcatgatgatgtggttatgttatgggcgtagaaaaaggatactagtgggaatgcttgggtttgcgtcaaattttacttcatttcttctctgtggttgtttattccagtgttgttgaggcggtaatgcagtttaaggcaacccaccactgcgaggcgtaaggcgttgcgacgccctatgagatggttgaggcatgattaatggaggatatggtagagaaattaggaagaaaaaaagggaaaccggtaaaaggcccactaatccaggcagccagcccaccaaagcccaacataagtcttcatacctacgtgttctatgccctaagaggcatcttactccaccaggcaccagctgccatgatgagaagaggagtccccagctgctggcctcatccacatgacctctactagggttctaggatgagcttacctcttcttctttccctttctttattggttttgcttgtaaggcctttttctttccctttcttcacagtggacaccttggcctctgtgaccgccttagcgctatacgccttaacaacctgggtttattctttaattcttctcatgtgaaatccttgtctgtaatgtagtaatgttgtatgacatattatcttccctacaactctatctgcattatgtgatactgctgcagctctgtacccctatagtcaggccatacagttaaatactcagagccaggagagcttgcactagcactattatttttatatgatgaaagatgtggtcttttgtgtattggttcctgattgttcttatctatcattgatctattgcttatatgacatttctttagcctttgttgtttaatttcattagttatagatagccttgaatcatctacagtacggcaaaagtgatgaatgcagatgtttgggaattcgggattatggttattagtaagacaatagttctgatacaggacaacagacaaccaaaagccacataatgattaatcatgcttcaactttttgtagctaccagtctgccagcatggtaacttgagaagtcgactaacagttaactcttacgtatctgtaggcacgttcaagcttaccttgcagtttacagaagattatcccaacaagccgccgactgttcggtttgtttctaggatgttccacccaaatagtaagctctcttcccgtgtgattatatattgttcaataattaccttacatttgtaaacaaataaagatcttcgtttttgaataatggaaaacttatttaacatcatactattcatgcagtttatgcagatggaagcatctgcttggatattctacagaaccagtggagccctatatatgatgttgctgccatattgacttcaattcaggtacctttttgatcaattttcagactagcaaaaagcatttgtaatgccatgaagagtagtgcttaccatgagtaatgagatctttctaggtgcattattttacagcttccaaggtcatgcaaattactttttgtggagaaactttaaacttagttgcactgttgtgcgtaaaaacctctttacaacattgtcatggaaacctactagaatgaacctcttacactttacagattggcagttggagcattatttatctggcacatttattcttacgtaagaatgaatcctcctaaaaattttgcacttgaatggaggttttcccctgtaactttataactagctctggttgatcagttcactgactgggggacagtgactaaaattgaactcattttattggaagctaattccaaagctccctcacaaatgtccactacactatttatagccagttagcacttagcagggtgccattgtccgaactttgtaagcatgttagtaagatcatttgatgatataatcggttaggttgtttgcttctacacaccaccatttccaatggttgtataggctacgtagcatgcatgtagcatggtattgtatcaaatacttgaatcgctgaattgtgatgcatttgctttgcagtctttgctgtgtgatccaaaccccaactctccagcaaactcagaagctgccagactgtttagtgagaacaagcgagagtacaaccgcaaggttcgtgagatcgtggagcagagctggacagctgactagggcatgcagcagggcaacgggtggtatccaccatgccagaaagatgcaataagcaaccgtgaaaaacctgtgcgtttctggctctccagatttgctgtcatcttaaaacattataagatctccagtgattgcttgtagtccgttgatgtttttgtgttcccatgtcccagttactcttggctgcttttatgtagtggtgttgacctctcatgcactagggcattctgctcatgtaaaaaggggattatcatcataatatgtgaatggaagcgaaatgggtcatgagatttgagtctgcttgcacaatgcagtttgtctgcatgatccttttgccatgtagtttggctgttggtgctgtcctatgcacatgcttaatattctctgccgtttggattttttgcaacattttgtatttttgtaggaacagaaaaaaaaattcccgtgatacttctcatgatacaaatggtaccaaactgaaatttatcgttcctcgagtgatgctttcgtatggtataaagaagggtttttaggcccctttgaattggaggattgtgaattttggaggatttaatgtcctaaggattttttcctatgaaacctttgattcataggaaagtataggaaattttctttaggattgcattcctatagcccaatttcataggaaaataagtaagaggtttaacctcttggaaactatcctttgctttgtttgttttctatggtgatattttctgtgttttccattcctgtagaattaggaaaacatgccacatcaattcctacgtcgggtttttaggcccctttgaattggaggatttaatgtcctaaggattttttcctatgaaacctttgattcataggaaagtataggaaattttctttaggattgcattcctatagcccaatttcataggaaaataagtaagaggtttaacctcttggaaactatcctttgctttgtttgtttcctatggtgatattttctgtgttttccattcctgtagaattaggaaaacatgccacatcaattcctacgtttttcctattcctttgtttgtttcctatggtgatattttctgtgttttccattcctgtagaattaggaaaacatgccacatcaattcctacgtttttactattcctgtgttttttctattctgcgtttcaaaggggccctaggtaaagtagtgctcttgattggtgtcgggggcctggggatatctccttttacttgtccatgtaaaggtctaaaacaacaaatgcgatacatggtattgacaccattgacacaatgataaccgaagtgcccctacagaggacatgccataaacgaggtactgaaccatgattacatttagacctagattcgtagtgagacatttatagtcctagattcaaagtgggaaaaattacaaaattacagttgtgcttagcttcttacatattcaaaagaaacatatagaaaaggcggtaaaaaaaaagaagataaaaaaaatgtgaagaaagtaaaagagcccactgacttctactggtctacaccaagaaggccctatacacatcttatcttatagggtagtagtacaccatatgccagttccagtctagcttcagctgcagctgccatctgaattgttctctcatgttcggttcttgaaagatcacactgcaaaatgtttgcttcatgtaatgtttcccgctgaattgccgttgctgttcttgcctcaacctagaaatccaagaaaacacaagaaaatatcatctcagatcatagctgaatgcataacatttccctcaactatcagccatggatgatcagagcatgatagttcagatgctcaaagtgcaaggtttggtttgtttggtgatagatacctgcaggctatgatggagtatcatctacagatctactggtcgtcttctaagtctctggggatctgcgacggcgacagcggcgactcctcgctgctccgggagtcccctctccagtcatcctgcacctgcgcggcgaactgcaggttccacagcacgtcctccaccgacggcctctgcaccgcctccttggccaggcacctcaggcagatctccatcaccgtcttcaccgactcgtcggagcaccccttgctcaccgccgggtccacaaagctcctcctcttcgccgtcccctccgccgtcagcgccgattgcagctgcagaaagaacacaggtgagtttctttttttctttttcagaactttcagaagtggacagtgtgatggtagtatctgaagtctcatgaaaaattcagttcagtttcagtctttggagggagtttgtgttgcacctgttctttcattatctccacctcgtagatggatgtgatgggcctgcctgagataacctcgagtagtatcacgccgaaatcgaagatgtcgagcttatcaccgttcggtacactgcgagaagaaatttgcaacagaaaagttcttaagaaaaccagttgcttttagtataatatacatagattctgctgtaaggtgatttgtcaagtacctatcagatggatacttgttgccagatcctccctgaattcatccacaaaagatgatataaaacaacaatgttagttcagagttcagacagtgccaactcaaaattcagcggtaagtttacatgatcagagtttcctgaatcatacctcggatttcatggtttcagataggatggggatattgtagctgcctattttggcaacaagattctggtctagaagaatgttggtgatcttcagattattcgcaaataggccaggtatgatccctccatgcaagaattgaattcctttggcaacaccaatggctgttgatatcctctgcacccaggtgagctttctcccttctgttccttctgaagtcaaaagtatcaacaagttcagtgacattcagctaaccgagtaactgattattggagaccgatttcaggagaagatggtaaacttacgtgaaattctgcctctcaggttgccattctgaacgtattcgaagacgagatacaattgcgtgatggtggaatcgtcgagattgtattcgaagcagtgtccaagtgcactgaccaagtgcctgtgcctgagcttggagatcatctcaatgtggtgattgaagctctgggaagtctggctcctcttcaccttcagagacctgattgtcaccggagttccattgcttagccttcctcggtacatctgacagtaaaaaagagcaaaccattttagacatggagcacaacaattttagttgcaaacttgctatgttacaacttgcacatgcctcaaaagaaaaggtgattcttgaatagattgaaaaatatgtatggaaagatggctttggtactctgacaagaaaaaagagagaaagcttgtaataactataaaaactgttctctttaatctttataccccaattgtaatctagcagtagtatttaactcattagaataatcagaaaagtgaatgggggcataaagcatactgtcaattaacaagaacatgaaaaattaggttcagtgaagatgaagtggccataactaatccagcaatgatattctgaacaaaatgtccctggattgtcagtgggagcaatggtacaaggagtacctgtccgtgagaatcttgccccatcatatttgatacttcgaaatcattagtagccgcttcgagctcgaccaaagaaaatgatctgtatgctggaattcccagagctcccaatttcactgtctgagatatgtaacctgtttggttgttccaggtaaatgcaacaagaagttagtatttcagataaagtttcagaaaaaaaatggtgctatcaagttagttactcttaacactaggcaaagttccagagaaatgatgccaaagttaacgaatctaaaaaagagcaaaagatgtacagaagtttcagtcaaagaatctgaaattcaacaaaagtttcagagattgtgccaagttggtgactctgaaattcagcaaaagtttcaatgaatgactgaaatttagcaaatgttccagctaatgactgaaattcagcaaacttttcagttaatgaatctgaaattcagcaaaagattcagttaatgaatctgaaaattcagcaaaagtttcagtgagtaactgaatttcagcaaagtttcagttaacgattcaaattcagccaaagattcagctaatgaatctcaaattcagtaaaagtttcagtaaataaatccgaaaaattcagcaaaagtttgagagagaaattgacagggagcaagatcatacgcgcatcggcgaagagcttggaaggataggcgctcgacgcgtgctccacgagcctccgtggcggcctcgcctgcgccctcctcatgctcgccttcctcacggcgaggaagaccgccacgccggcgagcaccgcggcggcaatggcggccgccacgacgccggcgacgaggccggacctggcgccgctgggcttcctccgcgcctggtcgggcacgatgccgacggcgatggcctggttcttgcagaacggggacgggtgctgcgtgtcgtcgccggtggcgaggcagttcgccgagaagagcaccgtcttggaggagtcggagtcggagtccgccgccttgccgacggcgccggcggcgaggcaggtcgggaggctccccgtgaggaggttggacgagacgtcgacgaatttgaggttgttgccgcacgacatgttgccggagagcatgccggtgaagcggttgccggcgacgctgaggtactcgatggacggcagcgagagcagcgccggcatgaacgggccgacgaacctgttcctggacacgtcgagccgctcgaggaggtagaacgacgcgagctccggcgggaggccgtcgctgaacctgttgccggcgagcaccacgctggccaaccttccggcgcgagccgcgggaactccggcccgagcgagttgttggcgaggtcgatcacctggaggttcttggcgccgctcatgtccggcaggttgcccgacaggttgttgctcgccagcgacagcgaccgcagcgacgccatgtcgctcaccgaccccggcaaggtgccctccagcgagttgttcctcaggctcagcacggcgagcaccggcagcctccccagccacgccggcagctcgccgcttagcatgttgtcgtcggcgatgaacgtctgcaggttgccgagccgcgacagcgcgagggggagctcgccgtagaggtagttgccgctgacattgacgatctcgagcgcggcgagccgcgacaccttcccgggcaatgggccccagagtccgagtccggtgagcgtgagcacccggaggtcggggagcctcgacagcgtggtgaagaaggagtcgatggagaacgtcttgggcagcggcggcggcgtcggcgagccgccgccaccgccgatgatgtgcagctgcgtgacgctgtcgccgtagcactcgacgaacgccgacgtggtcttgtagtcgccgccgtagcagaagtcggtgtagttgtgccagtggccgagcaccgccgggtagccgagcatctgctggatcttgagcagcgaccatgtctgcgacgcctgcagctgcgtgctccctggcaccatcgccatcaccaccgacaccaagaacaacaccaccagattcttccctcccatttcttcagcttctcacaagatttcttcagctcctgatcagttcttgatgagcaccaatgtgcaagaaccagcagcaatttctgaactggagcagaggagatgagcagagcagggaagatagcaagaacagcaaaatctgtcttaactttttgtgatcaagaacagtgacagaggtgatagattctggtgatgtgatgaagaagggggaattttctgaagatttgatgctgggaggaggagcaaggagagattgattagctgaaggacagcatgatggcatcaagcaactgaactcttcagaaaaggctgagctgagaggaactacagttattggagagatagctactggtgacctgaaaaaaatgatgtgtgccaaattgaccaatcttttactacagggatctatctgaccactaattcatttcatcccaaagcaagaaagcactggatgccaatgactgcagcagcagaaacatctccagatttgcttctttccttcaagaactggcaacatgagagaagaaaacaaaaattatagtagtatcaggttagagaccaaagcatcacttgtgtaccaagatttgtagcactatcactaaactacagtacttgcaagaaacctcaccttgttatcagtcactgagaaaacataactactgaagatgaacagtgcattggataggtcaaggagatgaaatgccagcgagtgaaatgaaatgtggccaaataatatatgttttttgggggtttgtgagggaatcatatgcttagtgtcgtctactactgccctactgtcgctgagcaagtgagcatcacggggtggcacaaatatgaggcaaagagacaagggtctctccaaaagattgagctggaaaatggaggttggcataaggacattcagatgggagcccagtgcactcttttccttccattgtcccctttataattattcagaacttgaattatgataggaaaataatggttaactttcttttacttgtaattatgccctttttgtgataacattctttgcctgtgctttttttttcttctcttttttcattcttaagatttgctaaagcaagactacaagagtgtaacaaacctgttgttttcaccttccaggaaggaaagaaaaaacacaacttttgttttctggtaggtcaatgtttgcagtgcaatcaatagacatacaatttgtgaggtggtggtagagcacaacaccttatcacattgtatgctctacagttgcttcatttattatattactttgatctggtgtttagaacatgttgtggtttcttttgctttattcccttacttaagcgacagagagaatactaagtatgcatactatttggtgtcaattaatctatacacaatgtttagaatacgcataaatcatctcaagattgatgagtttatttaccaaatgagtgtataatgtgctaaaactctcttctaattactatacattttatcaaatatttatcaagatctgtagtggttacatatccattttattttcattctacctatgatttgacttaatccattttttctctcctttgctgccttttcctttgctttacttaaagcaggcaagacaatggaagcatcgctttctcttaggtgtcaaacatgcaccaacctctcctttcatgggctaagaacattccataaaaaaatatgaacaaatatagctcttgtttatttcccaacttttttttcaaacttccaactttttcatcacatcaaaactttcctacacacataaacttctaacttttttcttcgaacttccaattttagcgtggaactaaacacaaccacagtataaaattagctactatctggcaatctgcattgcaaaatgtactgtgcccagtgaaaaattgggaatctgatatatattcatcaatgcatgagtgttcccacatttgacttggatgaatgtttgtcagggtgtgggccccactttactcactgtagccttggaaaaattattaaatgatatattccccaaccacctttgggcaacttggctaacagtaaaccattacaatggtactgagggcctgcttggtttctagagacttattccaagtccctgtcacatcggatgtttggacactaatttagagtattaaacatacactaattacaaaacctattccataaccttggactaattcgcgagacgaatcttttgagtctaattacgccatgattttgacaatgtgatgctacagtaaacttttgataattatggattaattaggcttaaaaaattcgtctcgcggattagctctcatttatgaaattagtttttttactagtctaggtttaatactccaaattagcgtccaaacatccgatatgacatgggctaaaaagttttagccccatctaaacacccccgaatgaaatgtcccattagaacacacactttatgtgagacaaactgatggtaacacatggctgtagatgctcttggggtgattagttaagatgtttgcttggccagatttcctagatttgtggtccacaatataatattgacattcatgtgagtgttaaatacaatgtagatttatgtgagccacattgtaggtcgatattttttgtctcttttaagtcaaagcaacgaaatatataaccctagaatgtaaaataaatgaggagtgatgaagtaacattttgacaatttcagatattacatcttgatatttctgttaaaaaaatgctcttctcatatttctctcagtgaaaaggattagttggcgttattcaggatatttcgagcacttagttccttccaaaatacagaaactagaatttcagtttgccaataaatattttccttttgtttcaaaaaggaaagaaaattttccactttaccttacaagccatatactgtatgtcacatgagataattactagtaattcttttttcatcggaaaaagggttgcttttggagagatacaaaacggcaggcagtaaaagtgaagaagcccttttaactgacactaaaagaatgtgaagagaaagcagtaactagctctaataaaagaaagcttaaagaagaattaatttggtcgataaatgcgagcgtatgggatcgagtggcgccacattaccacgttggtgcgtgcgtctctattagggttggtgggcagttccttcgtgccatcactcaattgattctttgctccccttcttgatctgttcccaaactatactgccataacaaaaattcctgcagtttgatttggaaatttaggacttcttttactaattttactaataagttggttgaaatttcaacaattttgtagaaaggaaagaatcctaagaaaagttggatgacaattaggctctttggattgttctgtactcacgtgcagcattgagccaaggaccatgtgcagatgtgtgaccttgagcttctcttgcatgggtggggttactcacttaggtcctgtttgatttagcttatgattattataatctgaattattaggagtaagctgaaacaaacaaatagattattatgctagattgttataatctataagccagattactataatccaataatctcctctagaggagctttttccagattattgagtggctaaagaccccactacccttagatgcctctaataatccagagaaaccaacaactcgtagcttattttatatcagcttattataatccagcttagagtaatctgatttaataatctagattacaataatcttaagctgaaacaaacagggccttatttggatcagttgtagcttgccacttctttgagctatatcaactctgtttcttgcgtgatgaattttacgatggtctctgctggcagtatactttacctagattttttgttttttcctatttagtggaccacatctatttatcacatctatttatactaccactcaattacatatataaaaaaagctatatcgatgttattaagaagaaaggtgagtgtgtatgtgaagatttggacgcaggccttcgggcgaacaacggcaacccctgcccaccacgctacggtgcaattctctaccaccttaatacttagaatacgtattagtagagaccaccataaaattacccttctttatatcctcttaacttggggttaccattatgttgagcacaattaatggcatgccctcatgatgcttatatcaaggatagacatgaagtgaattggccttaatgcccaagagctccaaatggagtccctcgtggtggtggtgccatacacccttcgtctccgaatgatgaatcttttatggtggtgccatctccttcacctccaaatgatgataattcctgcaacagaattgcagtacacttgtgcatctcaaaggtttcaatcatgcatttattcagcaactgtgaattgctgccgtcgctgaaggagacagtggagctgcactatgcaaatagctagtacattcatcatccataattctgctcaaaataaataaaaaatggaaaataaggtggggaaaaaaggttctgttactgctgctgttagcttttttttttctctcaagatgcatgtagctactgtatactgttccatatggttggtgccagccactcttaatttgattagagagcacagtaacagtgacatgtcaagaaagtcagtagcacaatagaaacttatattagttcacatgaaaaatataggtcattatgatgtgtcctgtgtttggaatggtacataattgcatatgctaaatttcatccgaaatcgccacagtgcaggatgcgccccactacaattaggctcaagtgttaggcaaaaaggtttcttaaaaaaagtgttatgcaaattaaattcaggtgaatgacagacaagtaaataggtactaaagttctgcaaagcatttgtagttaagaactcatgatcagaagttcagaactgaatttttggccaatcaattgcgtcagaaatgtacttcacgatcgtcactgcagctagccaaaaatctgaaagactggaaggctcccaactaatgtggattctatgcatttcgagtactttaattaacgggaaaacagcacccacttgaaggtgaaaattcctcattcttgtcaaaccattggtagccagcttagctcagagaaagcatcagcaggcatctcatcctgctgggcacaagaatctctgacgacagtgtgaagagttcatattagcaaatagcaatatttgttgctagttgctactacttgctatcaactatttggctctgattattccagtttccaaccaacacaattagtcataaaattgtactactagattattcagggtgggtagatttgtcagctgtcacttcacacggaggacaattagattagtgctaatcagaggaggacacatagccacatatacgtactatcatgtcatgtgaatgaaccatgaatgcataccagagattcagagaatcagacagacagacatgcgtgaggtgaggccaactgccagcgaccatgtaatgtcatccactgcaagcctgcaagctgcagcaatcacgaattaatcgaggtgttaatcttggtttatgtcggtgattagttcccttggttaatgtgctctgcagctgggcggtgaggagcctggctgggccagagagcgatgcggctcgagctctccctggcctggttgaatccatggaagccaagggtatttcaggcaggtgatatgtaaaaacgtggtaaaattattttagtttgaaagaaatgaccgaaatggcattcaagcgtacatatcctagttcagaattgcaaactatcgaaactcatttgggagagatatttcgacgaagccaacttctaacgattgcatatatccaaatttctcgctaggagtggctgtgttagatgcatggggttgggaacccatctcctccgcatgaaaaacggaacggttcattactacatgattaattaagtattaattatttttttaaaaaaatagatcaatatgatttttaaaataaactttcatatagaaacttttttttaaaaaaaacacaccgtttattagtttgaaaaagtgcacgcgaagtaggaggaagaggggttcagtttgaaaaacgtgcacgcgaagtgggcaacaattacaaactaccgaaactcattttgaggtgatatttcggcgaaaccaacttttagttaacgattgcatatattcaaatttctccctaaggagaacataatagtcatggcacttggcagctggtctgttgagaagggcggcggcgagtgggtgaagtcggtatgtagtagccaagtaaggactggtttgcatacattcgatggttagcacttatcaggggtgtaaatgtatacatttgataaccgccaggggtttaaatgtatatacatttcgaccagcaccaatggcataggtcgaaataggggttgatacatataaatttaattatttaccctaaatttaaaccgtgatcaatgatggaggcaagtaggagttgatttgcatgaattcggtcagctgacagtaatgagattctgagatgggtcctatttgcacaatttcaatttagctgtatggcttagcttccccaaccaaaatttggtagggtagagatgagaaagatgtgttctagtttaatatcaaattatgatttgtgagttgaatagatagatacgagtactaaaacatgcttattgtagtatcctaatgaagtgtcaccaaatttctactatagtgttacgaattttgttagtagcatagcaaaccaaactaacactcagtacatatatagacaagtattatactgtcaccaaattttagtagcatagcaaaccaaactagtacccaggcaagtatttggtaaccaactaaccaggcaagcagccaaacacatagacattgacgtgacagttatcaacttctaatcccagtttgcattgtatagactactcgtcaagcttaatgacaaggtaaacaagctctctgaatatgaacatttaattatcttagcctttccagtcaagcaaatacatgaacaaactaggcaccaagcttattttctggaacctgctgtgcctgtccagaacaaaaaatatttttggagatacttaagatgtaggcagaacaattctaagaagcatgaatcaagcaagcaaagcaattgacgagctcaagttaattatgctggatatcaaaaaacacaagacgagtagtcgagtacaacagctatcaggacacacgatgaaacaggctatccaagtccctaactcttaacatctacgtacagtcccctcgcatagaaacaagagtgctccactgataataaaaggattaatatctcttctctgagctgataccgcaagaaaactacttgtaaccccaatatgagatagaacagtgaagcaaaggtggcaccggtgaatcttccatagttggtatagcaagaacaacctgtgaaggagagaacgaagagtcagtataaatcacagtgaaatatgtgcaaaatcaggtgcaatgaaaggctacaaatgtatatttcctgaaaagggttgtgatgcaaagtcatgaaaataataacattgccataacatggactcaaaactcaatgatctctgagactctgtgtggtagctctgctgttcagttaaaagtaacatacaacttcgaattgaatttgactaccagtaataacggtataaactacttatagtttcattcttcaatggttacaagcattgcatttctataatttgtatgatcatataactcaaagattgtcctctgaactattcttctagaatggttgataacaatagtagtcgtggaatgcaaggtttacagattaagcacatcgcacaaccacacagtacgccaatcaactaaaacaaaattttcaaaagcttgtacctacaacacttgtaagaatcaacagggagtacaacaaattagtgattatttcttaatatcatatttgctccaaacaagcactacaaataacatttagcagcagtgcagcacaaggtcaatgacataggggtgtatattgcaaaacaattcaacatatggcccagacataagcatgtctaataatacaaaatgatatgtttcattgaatttaaaacttctgtcaccgctaactggccactaaaagagaaaagtgcaagtaaataatatgagtgcaaggtataaggcacacaataaccacaaaccgtgacaggctttacaatgcaacaaactagggaaaaacatactccatccaaactaggaaaaaacatactccatccgtcccaaaatataaggggttttggacggatgggtcatcgtagtactaggaaatgtctcatacatccaaaatcccttatattttgggacggagggagtagaaagaaaatataatctactcatatgaagttaacaaaatctcaagagcaagtgattagcagaacatgtgaattatactatgtaacaaaaacattagaaacaggaagattcagaagacatcatcaacctataattgcaatttgcaacctacatcacataatatggttcatccatctcaaatgcataaatcattagcacaacataaccatctaacagatttaaatgcatgaatcattcaagtttaccagcaaagctattgcggagggttttgtccaggttgctgcggaccgggaggcggcggtggcatcccaggcctgaagggcggaggcggcatccctggcctcatccccggcggcggtcctccaggcatcccaggcctcacctgcggcgggcccatcggcggtggtcccctcatgaacgggccaggaggcggcggagggccaccagggaacgccggtggcacgcccggcgggcgctggaacgggatcggcatctgcggcggccgcatgggcggcggcatctgccccggcggcgggcgcacgacctgcgggtacgcgaccggcggcgccgagaggttcggcatcggcgggcgcgagatctgcggctgcatcatgccgggggccggcccgcccacgccacgcaccgggccggcgagccctggctgggcctggagcatctgccccgcggggacgccgcggccggcggcgcggcccaccccgggccccgccatcgccgcgccggcgccggcggccttggcgcgggactcgtcgggcggtggcgggccctcgacggtcatggagacgacctcctcgccgcggagcagcaggaggcccagcgtcctccgctcctcgcgctcgccggtggtcttggaggacttggagggcgggagcttgcggaactcctcgcagtcgccgaggacgaggttcatgtggcggtcgaacgccatgaacttgccgaccagctggcgcccgtcctggatcgtcacgcgcatccggtagttgacgaactggagcatcttggagcccttcgggttcgacatggcggccggcggcggctagggttagggtttcggcggcgaggcggaagaggtgggggaggaggaggaggttttcgaaggggtttgagttggcgtcggtgtctcgggttgggttgggtgtggaggaagaggtgggagtcgtgggctttgtgggcgttagtcggttggttatgggccaaaaagctcatgggctttagatgacctaactgggcgttgggaagggctttttggacgatgggtttcccctttggaataagtccactttgactccctaaactggtaaccgaatcagattcgtatccctgaacgacaattccagatgtctggacccctaactattaaaaccggtgcaatttgactccttttatggttttagagggcggtatcgctgacgtggcgcctacgtgacggtattcacccgtttttgctccacgtggtgttaaggtggcattcgaattaaaaaatatgtggaacctatttgtcattaaaaaatatatcatgtaacccactgacatacggggccttctctcgttctctcccctccaccgtgtcccttctccttcatcgtcgcttccttctccctccctctctctttctcccgcggagggcggagcggcggcaggcaagcagagacggcggcgagcggcgaagacgcgggcatggcgcgggggcccgcgagcggcggagacgtgggagtggcgctgccattcacaaatccaccgcgcccaaatcagaaggagaggtaggtgacgggaagagatggaaggtggaggcgacgacggccatggacttccacgcactctctcccaccgcgagctgcangcgatgtgcaagcgcaacgactgccatgccaacatgaccaacgccaccatgaccgatgccctccagttgctcccctcggtaagaatcccctgattgattgattgattgcgttgtttgatctgcccatttcgagagtttggatgattttgtgtggggttctcgtgtatatgttcgtcgtgtgatttggtatggtggtggtgattgatgagttgtgttggttgcggattaggtggatgggatccacaagatcgacacgacggcgctgtgcctcccgacgccgagcaggttgacgatgaagtcggctttaaggccgcctcggcggtcggcgaggaagagcagcagcagcacgggagcccactcccccgtggccgccgcgtgtcggtgaagtcgctggaggccatccagatggacttcgaggagggtgaggacgagatgaagcgggatcgtgaggaacggaacctgggcgtggcgctgcgtagtaccagccgccgcgcgagggccacgccaacgccaatcccaaccccctgcgaccactaggcagaccgccgctgcgcgcaaggtggagaaggcggcgccgaccccagctactctgcggaggagccagaggacggctgctcggaaggccgcttctccagacttcggtgcgtgccgccgctcgccaccgtctccgcttgcctgccgctgcttcggccctcaccgcccgccgcgggagagagagagcgtggtgggagaaagaagcggcgataagggagaagggacaggagggaggggagagaaagaagagagataagagcatttgtagtgtgtcgttgaaatagatggagagaaaaaaaaaaaaacgaaccaaccacatagtgggactgtgggagtcgactggtacgtgtcagagccgtgtcagaaaaaaatcgaattgagtttggaggtcgaacagaaggcatttaaataatatttgttggcatgttaccgttctaaaattaatcggctagcaatgtgatatgatagaataagcattgatacgaaggtcaaagcatgcatcggctggaggtccgatgccattaaatccacaagattgattaaacagtgtaacctttgttgtcatcggctaaatccaacttatatgtatatacaatccttataaaccgatgcaacgtccagataacttatcggctatcactccgataaaacattagcatgaacctatcggcttaacaagatttatattatcaacaacaatctagtaggtcaaacctaaccgatgcagcacgagattgtatatgataatctaatactcgatgagccgatagatctatctaatgtgatggatataacaaatctatttagaataacattgtgattgtagagatatattggctaagacagaagatcagacctaaccgagacagttccaactaaaccgatgcgtctctaaacacaatacaattagagatagaatcgagatatcaggtaggcaaatgtatcaaccaaaacagagtaatccaagagatcgaagcgatacagccttgaacagcaccaacgtagcagacagattcaccaggacaggcggaacgtaggacttaccccttcgccggagatcgaactgaaccgatgcagccccgcgtcaggtgccaaattccgtcggatgataagtaaaaacatcggtaaagagggtggcgatgcgccgagagtagttgtattgatctagagatgatagattacaatgaccccaggtgtacatatttatacccataggaagatactagtccttgtaggagaagaaagaaactttcctaaaaataaaagaaaaacataaagtccttattggacactaaacacactttcctagagataaaagaaaactaaaccatgcctaattaatagataacttgccatgccgcatcctccttggactcggactcttctagataagcttcctttaattgatccgactccatcaagaacacaacttctggcgacttgacgactcccatcgggtgattccagtactctaaagtcgatactgactcttagccgatgatgacttcggacttaccaaattttggcgttaacaatgttctatccatgacgtgcatggagacccacccaggttcatgaaaaaggcccccaaatatccatcatctaactctctgccaccgtacacgagaaaaataacatatgtaatttggatttcctatcgcaacacacgagcatctttgctattcttaaaagaaagagaaatgagagagatgaaaggaaatggttcacttgaggtcccttgtcgtcgagtttcaaaattgtccctgaactgaaataccagatataacagagccgtaatcttataaaaccaggtcacattaggtcccaaggcactattgctccccggttttggtgacgtggtggctgagtcagcatggggcccatgtgggtcccacatgtcaaccgataatcttctcgacctacacggcaaagagcgcgaagaagcgaagtaggaagggctcctgacacgtcgtcctctcaggttacactaccacatcgttgcgtggcagctcaccacgcccgcatcatggtcgcatgtcagccacacgtcgagattggtagaggatctccaagagttgggagatggagtacgttgcgacgcctgagcatagttgcgagcaccactgactccatgagtgtccgtgcatgcacacgaagaggatgccagacgctgaatcgcgggagaggtgtgtggtggccggtgaccagcagggataagggtggcggttgttgggtggcggcggtaggtagaagctcaacgacggcgcctagagatgggtggggagaaggctggtagccaacaagaagcttggcagtggcgagcggcggggagaatggcgcatgcattggggacgatgcgaccacaatatggtgtagatggagttgacctcgaagatgatgcgacggaaccacgcgtgcgcctctgcagacaagaggtagagctcggggacacctgaacacatcggcttttgagcagcttgacccggggcggggggggggggactatgagcttgggggataggagcttagtcagcgtgacaaggcagaagccccagccctcgcgcgtgcaagtgaagacgacattgcaattgtagttgggacccgcgccgcactccccgcgcgcgcaagtctatgatgtgagcgctcccgaccgttgggagccacgtcagccgatggcctccgccgtcgagcttttccccaccgaccaactatgttacccagatacggggatacggatacggatacgcgatacgtcgatacggggatacaccattttccagaaaatatagatacggggatacgcccatatatatttatatataagaaaattattaattcttgaaagaaaatagccgattacaacgtagcaatcttttgtaatgatctcttgtagttgattcaggtggagactagttgagaaatagcaccagcagtaaacagatatccatcgattaaaaaaactcagtgtatttcagcatactctgacttttctacttcttctctaacacttaaacatatcaccacatcccacaacggcttcttctcactatcatttggatgaatgatgaatttgctgctagattagcaaccgcgctagctctagatgcattgacacttctagtcacaataatcatcagatctataaaatatatatatactcaagcatcgaagaggccaacaagaaaacaggaaaggggaacaagaatagataaaatcacatgcagactcaagcatcgaagaggccaacaagtcaatcgttcaatggaacttgcctaactggggaacgaaggaatcaagtcagtggctgcgacggcggcgatgttgtgccatgttggcgttgcgtccggtggtggaggcgatgaatacacccagacacagatatgcattcagcgcctgaaggcccggcatgcagctacggcgccagcggcgttgcgctcggcgtttggtggcggtgctgagttcggccttcggcatggtgggcggcggcgccgatgatgggaaagtgccgcgaggtggtcggcctcgggcgagaaaagtggaggcaacgcgttcatccttactagggatgaagccatacggacgtatcgagaacatatctgatttattttaattattcgaaaattgtgaaaatcgctgatatgtacgggatcgctgatacgtatcggatagtatccgtatcccttcacgtatccgatatggatacgacgctttctggacgtatccaggtaatgtagccgaccaacacctttctccccaatcattagcggatgccctgaaggtttggattgagatgagagtagagtggagtgaggtggaagaagattgccggttgacttgtgaggtctacgttggactcagccgccacgtcaacaaaactggaaagcaatcctaacttgagataaaagtgatccggttttaaaatattagagggttcaacgacaagaaaagggaccgtagatgaactttttggggagatgaaaacattccagcctagtgcatatgagtatacggcagcagagcgctgcacgacctccgttccgcctccccaatccgtcccccgtctcctcgcccgccgccctcgactcccgtcttctcgcctcccgctggcatcctgctagcagaggtggcgccggcgttctcctgctcccgccgcattcgctcaccggtgagcatcctaatccatcccatccggcctcggcctcgagtttcgtctcctcgccgccgcttgcgccgatccccatcctgcgaggagaggtggcgcccggcgtcctcctgcttccaccgcatcgtcgctcgccggtgagcatccctccctacccacacctcatcagctattctgcgttatccctcaaaaaagtttcggggttcaaccgaaacagggttagatctgcctctgcccagttccacctactttcaacttgttaattttgatttttgtttttagcagatgtaatttggttactgaatctcatccaaacactcttagaatagttgcattagaacggaaaatgtaagctcacataatttgtactcatccaaactcatataaatttcttaagaagaatctataccacaaactactcatagtcacacaaaatagctttttattaaggtatattcttataagaagtttttattccacaaaattttctaaaagacatactgtaacacttgcaattaatctaattaaacattttttttctttattaggttataaattttctaaaagacattgtgccacttggcatgaatctaatttagcattctttctttatcaagttataaattgaaaccatcaaacttactttgtcttcccgtctctaaaacattgtgatatatctataatattttaatatttttgatattaaaataaatttagactaatcatatatatatatttaaattaggtaattaataaattcaaatcaactatacttttatataccaagtacaaatctaataacaatagaatgttagaaacaatgtgaattcaattttttttataaagtttaagtacgattcatatataaaattaaagaaaaatataaatttatatataagtgataacataataaaatgcaagttaaaattattaaaggaaaaatattattaataatcaatgttattgatgtatttctaaatattttcacgttatttttattaaatatcaatgagtaaaacggatgatttgccttatgacaaaataattattaaaattgtttttatccgttgcaatgtacggatatttcgctagtttatagcaaaacaaaaacacaccatatgcacaaacgcctttggccttttgagaattcgcaattccagccgatttgtaattttcaaaccaattgaataatactcctaaattgtttcagactagtacacgacatccgtataaaataatgccctacttgtcgttctttacttgtcattctcctttttcaaacccatggcctacatgtcatcctctacaaggcattctctacttgtcattctcctttttcaaacccatggcctacatgtcatcctctacaaggccaaagaaaagtgagcaactcatccttccttccccttcttctcatcttcagcgaggagcggagcaaatcctccgccgcctcgcgagctcccccaccgcctgacctatctccggtcgctggaatccgagatcggcctccttctcgaatccgcccccgcctgtacagtcgccgacggccgccccagctgatggttcgccaccgccccagctgatggttcgccttcactggaatccgagctgcttgaaggtgcacctttggccttttgagaattcgcaattccagccgatttgtaattttcaaaccaattgaataatactcctaaattgtttcagactagtacacgacatccgtataaaataatgccctacttgtcattctctacttgccattctcctttttcaaacccatggcctacatgtcatcctctacaaggccaaagaaaagtgagcaactcatccttccttccccttcttctcatcttcggcgaggagcggagcaaatcctccgccgcctcgtgagctcccccaccgcctgacctatctccggtcgctggaatccgagattggcctccttctcgaatccgcccccgcctgtgcagtcaccgacggccaccccagctgatggttcgccttcactggaatccgagctgcttgaaggtgctcccgttggtataccttcttgcttggttactgttttgagggtggctcttcattggtggttgctgtagaatgttcgtgctgcttagaaattggatatgaatttactgaattaccgatccgggtagttcggcttgatggcatattaggtttggtgttatgtttatgtagatccagctactgaaaatctagttgagtgactgcgtggtgggtgtagatcataccatctcccccaatccccttttaaagaagtgacagtattcgattccaaataagcaaagcaagtagttgtcttttcctgtcagttctaatcgattcatcgaggagaaaataatctttgattttgtgacgattccagcttcagaggattatagtgtctgcttcattcggaggttcatcgtcgccaaaaataaataaaatttggccgtgtcaactctacaattaggaaggtttcggatttctcaacgtggaatgataagaaatggcatacagagcaatgctgcaaagtgctgcggagtctgctatacagtccattggtcttggttacgacattgctcatgatatacgtctcaagtattgcaagcagcgcagttcgcctgacccgttgctcattgagcttgaccatgacgaggttcaggatattgtgctccctggtggactgacagttgcaggcgtgtccaagtcgattaagtgtgacaaaggggagcggacgcggttccggtccgatgtcctgtcatttcagcaggtacgtatcatatgcccaattcatatcttgtgtatactgcatattgccatgtttaagactgagaaatatatcgtaagatgctgtgtaaatgtatgctactatgatgtaacaataatcatgatgaatcccttgctatcttgatctaagaggttaatatgatagcattcatagttccaacttccatgatacctccaaagtaatataaccttttgcaattctataaattaatagaaaataggattattatttattgtaattaggagaatttctccagcaagaaaatagagtaggaacacaagttaattcagtatctcagaattacttgatatggatggtttcaacaatttgaattattagcaacatagactttaatctaccttgtattctaagtagatttggcataatttgaggcctgcagaagtgcagagatgcgagctccctacaaaatgataattccacacttgcagtgtccgtactagaggtttatagagacacacttccgttgtgacatctcaagttttgacagttaccagagcagagttatttttgctcaattgcatggctagacgtttagtcaaaactgtaggattctatccggtttgctggttgcgtgcattttttggcatgtggcactattcaacgccacctatctcaggccacagttatctgactcaggtgttgtggcacatgaatcaattagactctgcaatccaatgttttttctgttccaattcagtatgattctgtagtgatatctcatataactgcaatatatgtcacgcaagcaattcctatataccttgttcataactgttctatgtttgccaactgatgagctgtgaactgatgtaccattgctggctgaacattatgtctcaatgatacaagtctttgtccatgtcatgcttcttttcctcttcagctgtcatggaagccgctttaagtcgcagagtataattacatctataaaaggtaatatttgtgttcctgaagttgtgaagcattttgcagatgtcggagcaattcaaccaggaattatctttgtctgggaaaattccatctggtttattcaatactatgtttgaatttactggctgctggcagaaagatgctgctaataccaagtcacttgcctttgatggttggtgtatcacactgtacactgttgcactctcaaaggcacagattgtactccgggatcatgttaagcaggctgttccatcaacatgggaacctgctgcattagcaaggttagattcaatttgagtccacgctccatgtggtgatttaaattctgaatgaaaagttgaaaacttagtatttatatccttcagaaaaatcacattaggtttagtttttatgttctgaaattttcagaactgttctgagtgctcatttttcgttggtaggctggaagtgctcatgcctaataagttgctttgtaatgccatttttaggccttactaatttattgtgatcactgataaataacatcagtttgctttctacagttagtatttgacctattctaccaatgaatgaagactatgcacatcaaaacaagtgctgaactaaaattttgtttgatcttgtttgagaacaacgtactttactcttacaggtttattagaaagtttggtactcatgtagttgttggtataaaaatgggaggcaaggatataatttatttaaaacaacagcattcatcaactttgcaagctgttgatgttcaaaaacgattgaaggagatgtcagaccgaagatttcttgatgcaaacgggcaatctgacttcagtttcaaggattcctatggaaaggataaggtgattcctcagcgtctaaattttttctgccttcttttctcatggcatgatttttattcggcatcagtgatcagcattaactgctgtatttttttataagcatccttgtagccctctcaatagttaagagcatgttgtgtaaagatcctttttgttgaacacatctcattgtctcaccatatgtataattttcttctatagtggaaatgtggcttttcaccagttgaaattagtgttaccatttatttgatactattatcagaaacttatatcgttgattggcgccacattattttgagtttacaacttttaaagatttgaagtaagaaattggcatatgcatgtgctatgttctatgaggctgcatagccaaggagtatcttgggtttagcgatacagttataccatttcacaattattctcaatctcgatctctgtaagtctgtatatgtaggttaattggaatttaataatagatttactgttctctggcagactggcagtaccatttttgtacgaaatatgttggttttgcatcaattcctattccctttttttttctcttctaaaatttacaatcttagtttttctgtgctgttcagattgacacaagagagcatcggctgagatttgtggactccagtccattgaattcttactcttcaaaggaggtatagttcttttgtgttgatgcatttatctttgttcacattcatatcggtaagttgtggttgtgccactcaggatttggtgatgatgcctaagcggagaggtggaagggataaagatatcctttctcacagcgagtggctgaatactgttcaggcagaacctgatgttatctcaatgtccttcatacctattacttcactgttgaatggagttcctggctgtggatttttaaaccatgcaattaatctgtaccttcgatgtaagtcgagttttccactctacctctttgttagttaacatgaaactgcatctgcaattatgactaataataagagagcctggatcttcatcctcagtggtttacttttgctttgcacttctgttattggcataattgcagcttgcttattcatggtttataattgacggtagtgtctagagttaagaaaagacgattatggcacgctaatgtcaagtactgtctgtttttcaatatggcaggatttaatgttatctgtaggctgtttgaaatttgaacctggaccctatccacctcaaatggtcaaacatgtagaaagagggttgactggcttctctttcatatactaaaaatagtagtcgatgttgtttactaattctaataaaagaaggtgctgctggagaatagattatgtaatatttctatatttcatagctttgttcaccgactgtgcttcctatattttcttctgtggcgtgtgaaataatacccaatttagtatggtgtcacatcatcagctagtcagcttgcatttgcatggctctcttccccctgtggtagttctcatctttagtatggctgcaaagcaggtgttctctagtaatgagcttcagaggaaaaaaaatgtacttccaattgagttggatctttttaggttatgggtcactgtcgtatcatggcatacagacaatcattctagctaggaaaaagatggcattaggcctgaaacaacacaagcaactgtgtgacatgtgtaagttctgtgcagataagcctcaaattgaagagctgcaccaatttttggagttccagcttccaaggcagtgggctcctgtttacagtgacctccctcttggtcctcagaggaaaagacaaagcactgtatctttaccagttaatttaattggtccaaagctttatgtttgtaccaacatggtatgtatcttttttttgttatcataattgaaacctcccttgtttatatatttcttttgttttatccttgcatacttatatcataattattgtagtcttgtactcactataacactaagtcaggataggctagctctagaagcatttgataatgatgagttaatgatgatggtggtgatagtgttatttgacttttgcatatttagagtctgcattgataaccttgacatttttatctgtaaaaactgcaaaattgagttttcatgcaagtttgccaattgcactatatgaaaaatctactctaacaagcctgaaaaatgctgtaaccttttttactggatgtaatcttatcatttaagcagtattcgatgatggttttttccttttttttcttctatcactcgatttattttaaaacaaattggcacaggttgatgtgggcaaaagacctgttacaggaatccggctgtttcttgaaggaaaaaggagcaacaaactagctatccatctccagcatctctgctctcttcctcagattcttcagcttgaagatgatccttacaatgaccaaactccagaagcatatgaccgcaagtactacgaaccaattggctcatggaagcgtttctcccatgtctgcactgcaccagttgaatcagatgactcctccattgtcacgggggcacaattagaagtggttagccatggcttcaagaaaatactgttccttcgcctccatttctccaaggtctgcaacgccacttccgtcaggaaccctgagtgggaaggatctccaaacctggctcagaaatcgggcctcatctcaacactcatcagcacacatttctccacagcagctcaaaagcccgcgcctcgccctgctgatgtgaacatcaactcggcagtgtaccctggtggaccccctgttccagtgcagaccccaaaacttctcaagtttgtggatccaacagagatgatgcgtggaccgcaggatctgccaggttattgggtggtctcaggtgcgaagctgcagctcgagaggggcaagatctcgctgcgggtgaagtactcgctcttgacagcaatgttgcctgacgacgatgagtttgcgttcgatgaagagttttagaaccatgaaaccgagcgaagaaaagaaacccacctcattttgtttttatcatttatgtgcagctaacagcaggaactcgaatgctcaatctaggattttcgtagcatttgtaagtgaactagctggaagtctatgttgtatacagttgcgggtttgaaacatggaagcagaaatgaacggtctctggcttggatgacgcgagagtttgttgtacttgtaacaatgtaccatcccttcgcagcatctgttccagatgactaaggatagatgatcactagaggctggggcgagccaagccgcgccgcctgcatacaactcggttgattaggttaaattatttgctttcagactaaatcagtgattgtctaagacaaccaagaaaggactattctttcttgagcaaagttgtaggcacatgaatcgaacagcatacacaggttacccattgatgagtaatttaatagaaatggtgctaaagattctgatgagaacaaagctctcacccaccattacaaatttacaatcctaaagattatgcacactgatgcatataaaaaataaaatcagagttttacacgataaatgcactgatgtatatgtaaaataaaatcagagttttacacaataatgagataaactgatgaaaatttgctacgaggagattcactctactcttgcaaaccttatgtcacaacttgaacttggtcaggagggtcaggtcctgctttcctttgatgagcacaaaacatagataaatcatctgagggaccaggttattttatttctagtttattatctgtgaactttgtacaggcatagcagtcgaagcacaaaagaagcttccgaagaaaatccaaccataagctcgttgcttggtgatatttcgaaaatcatacaaggcgctctccacaaactactcttgcgggcatacataaatttctgtcacacagcagtctcaaactatgaagcatacatatggctttgtcatgttgaaaacataataaaccattcattatggacatgaaatggttgtcatcgacgaacaaatattacccaaatcaacattttctagaaatatattactgtgaaagagagcatgataggattatgtaaataagccaaaatatattccagagagtgcgatggagagggatatacctgataaatatattttagagtgcgatggagagagatatacctaatggtatcctctggtagattaagatgactctcaatgtaacgtggtactactccatgttcaccatttctgtaaaacatcaaattagtgtactatctaaagaccatgtcaaaacattgacaatactaaactccaaaagcctatcaaatacatcatgatgggcacactggaattgaaccctagcataaaggcagtgaactttagatgcaaccaaaaaaatggaaaaactatgtattttttattataaaattcttatgtagaactgcaaagcatacaacatacaacagtcgtgtgaaagtgcactttaaaatggtctgcttaatatgtttataagctagcaaatgacatgaccttgtttgtcacatgatatttcaaatctacataggaacatacaagatatgcttggttagctttttcttgtggttgattatttgaataaatgctataaaaaactttgcatatccattcaattgtataacaaacatgtgagggcgaaatagtgagataggtaaacatcttacttcagaggacctgcaagcagccgctgatttgagcaacagaatgaatatagtggtaaagtgtgaaaactaaattgagcagcaccctagtcacctgctagtaaaaatgtgctacgtaactccagacatagaggagcgtcgaactcgatgttctatgaggaacactgaactgttgaagaaaattctcattttaattccttctttcatataattatcctgcaaaactaaagggcacacaagtatatatgagttcaaatggatgcagaagtgcttatcacaccctctttggagaaaatggcagtgtaaagtatgattctacatactgattcatgtgctgtataaacaagaaacactaataaccaatttcgcatttgaaattagcaatccaaaaaaagctaacagagcaaggtaagcagtcgcagctgtagcaccacagtaacaacgtttctgagtagaatgaaaaggccggccagccaccacgaattttgttgaggacggataagagcatcccatcccctgggaggtatacccaacagcaagcaacatgagcatactctgaactctgctctaatttgctctttaaaaataaaaccccaatatttatacaaattttatgaggcaagtacatgaatttaaaatgacaagaaaaacaattgacaagttttataccttagatttcacatcaataatattacgtattgcaattgtataatatataacaaatatagcacataattcagtatgagtttatatgttcttaaaattgatcatagattgaagttgttgaacaaaaaaaagtactaattgttcacagtatgaaacatgtaaagaatggaaaatgataaaataatactaaattatataatttaaaccataactgtttggtagctactgctctaaaaaaataatgataatcttatttttcacttggaagaaattcctctcaatgaattataactgaacaatcattcaagcgttattgccttgtcttgtttcatttatttacagtatctaacagtactactatctttgctatacagattgccctacataatgtttatttttcatacctatataaccaaaaatgagacaccgtaaatagaaactaaaagtacctcctaagagtggctgaatttaccttggttaatagggttctgacataattatctgctgcctcctgaaatttctcttcttccaggaaatcaaggggtatgcgttgttgcaattagagacaattttagattcacagcttctacagtgcatgccccactcaccatatatatggatagacaacttgggattcagcaaattagttattagtgttgcaatatagaacgaataaataccacatatatcaagatactgttgtgtgcccggagaacccaacaatttaacatgaaggaacaaagaaaaaataaaaacaatttgaggtagtttaccttaacaacagatgaccaaccatattcttttttaagtgagctataaaatgtgcataatcggtcaacatcatcagtggaatactgaccattctctgagtatagaccaaggcacttttgaatagctatgaaacacctgtgtaaaaccagtgaaaataaatcatttcctagagtattatcaagaaggggtacaatgtaagtcagaagagtgctatatacgcaatccctgaatataagagaattccaaaattgagttgatatttgcatctcatatcccagtgttctgaaattattctgcaacagctacactttacctaaatgttctttttaagtcatagaggaagattgtagcaccaaaagatgcatcaaacttatcctaacacttagccttacagcatcactccacctaaaagatgagcccagttggcatggatgcagatggttccgaaagttttatgtccaactatctagggggattaagccaaccaatacgcatgcacatggatgcctattgcagtgaccttacttgcactgaaagtttgggctcttggacggatgctttctgacatggtatactaagcacctcccttcttcgccacttattccgttatacaagccttagcagacagaaaattggttcatatcaggccacatatttcagataccatgcacactaggtaaattctgaaaaaccagaggctaaccatcctcacttatcctaaaagggcaagccaagtcgttggtaagcatgatcaccccattgtttatatgggactactgggtttaaaccggccaccacccaccaggttaactaagaaccctcctacaagctaaatataatggtatagctcccctgtcctcctatgaagagcatgtgatatacatatattaggcaaagagagaacaaacacaagaaataacttaaatcaatcccatgcaaagttttgcaacatggacattaaatacgtgaaggactgaaggctcataatcaatcgtgataacatgtgatttttgcctcgtggatagttcatgtggttgcagaccaaattgttgtcatgattaactacagaatgcaagtaccgataaaattggttgaattagccgattgacaaacactttatttataaaatagagctagattatcatataactcataaactgggagatagtattttacagaagttgctaaagcatgcatcatcacaaaattctaaatttaaaaataacaataatctaaaaatcagatattatatatacgtcaaaaggaataaaaatggcatgtaaacaacatattagcataagtccatgttgaaattcaaaacccatattcactgttttcagagtttaccagaagaccaaagcaaagaaatttaagtgaggaaaaaaaagcagcacaagtgtctcacttgtagttatcaggattcataaaaagcatggacctatatgttttctcagcctcctcaaagcggccaactttcaacaaaacgtaggccatttgttctttgaatgatagcttgtcaacctagaaaaaaaaataattatgtgcgcccatctgtctgagtaatattttcctctttacatgattgaaaaagataagacttacaattttgctatcctttttctgcatctcctcaagagctctgtccagcattatgcattcctcgaacaatgaaatctgtggaacaacaatagcattacataacaagtaaagatgatgcgagtattcaaaataacacaaattctttccacctagtttccagagcatgaaaagtacttgtatataaataaaagtgatggcataaaatcagaacataagtaaaaaaaaagaattcattcagaaagttagattgcttgaagaagagatagccagcagcaagttttcaactaatatgaagaagagagtgaatataaatcatcattcgaacacttcatatttacagacagcattatgcaaaatgcagcgcataagttctatcgtaaccttatgcctagcatgtaacatatcatgacttatgtcatccttcgaaaaattgaaagatgggtgaaaggcaccgacatgcatctaatgcaccaaaagaagcaacaagaaaaatgacacttttttccgacaactcgattcacatagagcaatctgaagcaaagaaattctagtaaacaattaatttaggcacaataaaaaaaatatcatcagaatttacttgtgttttttgggtatagtacctttgctgaaaagacacgataatttcctggaagaccatcatgctacagctgtatgtccttattaatttggagaaaacaagagagtagattaggctgcagtatttactatctactatattgattagaactttaacacatatagccagatttgtcatttgtgatttgatcccaagatgcatatttataactcatagaagtaattaatctatgtatggaacaccaccttatttctatttcgggagggattatgaccctatacacataactaaatcgatgcagttttagagagagagagagagagagagagagagagatcaatttggcgctagatccggcggtggctggagcagggttcactctatcggttgaggtgtttgtatcgggggtcaccgaaatctgaaaatttcggtccgaagtttctaaaattttgagcaaaatttagttgaatttgaataaatattactcaaattcatgaaaaaattaaaaaatttcggtcaaaataatatcgtatcggaagtgaccgaaatttcggtccgaaatttccaaccctgggctggagtcgtcctgcaagtagaactcgacgatctccgacaggtcggcggcggcagattcgtcgtcgtcgtaggctcgtatctcagcatccccttgtttctggccgcctgcagccacagcaggtgctcgaacagcagtccgtccacggcgaccgccaccgcgccgccgcgggtctgccgcccggccgccgcgaggaggcgccgcacctccacccttcgtcgagcacgtacggccgggtcgatgtggaacaagctcctctcccccttcgtcgtatatcctgaattttattttttttatgctgacaatcatttggaatcggatttgtattccgagttgttgtaatattggaaaggaatagatctccactgtcgtcttacgtggctgattcagcttcggtttcggttcaaggtgattgcgcctctccattttatagggagggcctcaatccaatcagttcgtgcgtcgtcccccgtttttgaggaattttaaccctcacatcaccacagatcagccgatcagatcgatagccatcgccgacatggccggtcgtttcgtgttccgtaaattagcctctcatttgtcttccgaatcgaccaaggcttttccccggcgctgctgaggttcgtgtaccactcccatcctactcccatccttcaattcagttaagtgtgatttctttagataatgaaattgaatataagagtagttacttatacttcatatcttgcatctcaatctatgccttttactaaagagtttaggacgctaattcataatgtgacaggatgacatggctattctgttttaaattatttgtcgttttggatttttcgtaagtaaaacgttcctaacattgactagcttaacatcttaagatttatgcttttagattcaccataagaaatactttctccgtttcacaatgtaagtcattgtagcatttcccacattcatattgatgttaatgtatatgtctagattcattaacatcaatataaaatatgtctagatttattaacatcaatatgaatatgggaaatgctataataacttacattgtgaaacggatggagtatattcacaatatatattattcacgtgttgccaaactatatgaatttttagatattgattgtcaaagttaggaatgttttgatctaagacacagctaaaacgaaagtgatttgaaacggagggactactaaacaatgccaagacattatatcttatatatatttcatgtacttgcaaagaaaaaaacttggctcaattgcctgtcctgatttgttatcctgcctaatgcaggcgtcgaggaacttcaacaccttgccaacaactgggctgtcctctgttcatcacaccaataatcgcgtgatcaacacctatgcttgtgttagaggcgccaacacaaatgctttattcagtacaactgccaaggtcgatcgacttgccgcaacgtcagacttcactccgtaagtatatactattagcactaattaattaattatcttctagctatatgtatcgggtcatgtcctattatatatccatcactgtgaaactgcaaaatgtagaaaggcacactagcactagctgaatcaagtttgatgtgaactcgatcagaaaaggtcatcagtatcttttttatttactgtatgtaattaccctcttaaaccagctggaacattaatttgactagacaaactgttgtaaacaaaaatagccattactgtttcgctttcttaaactacacaaatcggtcagatagaattaatacgtggctagctagcatatagcaaatcgtatttgtagaatgatgattgattttagccaatttatctttttttcccctttgttcaggaggcgaccgatacttgataaagtactccatggcatgatcttatactcatatactatgggcctttgtggattgtttggtctatttctgtgcattgataacaagcgcgccgcccgccgaaattcaggcagcacccaatgctgttcaaagcaccagtgtagttccaatcatgaggaccaatgaggagctccaagtaccctgaggcagtggtggtttgttatttcaagataactgaagctttattgtactcatgtcaactactctctccgtccaaaaaaaaaagacaaaccctggctatgtatctggacatgcatcatacatgatgcatatataagatacatacaaccaatgagtgtgagcctatatatataagtgatgtttacatgttgtgtattttataagtgatgtttacatgttgtgtattttgttccatgtcactggcctacgagtgtattgagtgatgtttgcatgttggaaaactttgttctgattgaccaaaccgctaattatcaaaattgacctaattatgcagataacatttttcttttgaatttttattactagataaaatgtttattcaatatatccttttcttccaatttcgcgagacattgcctggctgtaattcacccctccctccctacgctcttttaactcttgtgtattcactgttcctgcttaatacttcctcgatccgtcctaaaattgaaatacaaggtattttagctatgtaaaatgcatagtcctttttattctttcacgaatttcaaagttaattaaccaagaagtttttccctcaaaaaaaactaataattcaacataatattagaactttaacatttatagtatcgataagaatatctcgtgcaacgtacggattagcaattagctagttattagtataataataacttaaaacttcaagagataaccaggaaaattattacaataatacctcgagagaacctaggtttcatgagcctgagagttttcaaaagtgccaatcacttttctcatccattggatatgatgacctaatatggttcgtcgcttccgtacttttttttattttaaaaaaatgtttcttctttcttggataactttctcacccaaacatgaaacacaattataattcaataaatttacaaacttacatgaaaaatatttaaacttggatataaaaataaaatcaagcttagataaaaataaattaaaaccatacatgacaacaaattgcacttaaaatacatagcaagtactccgtataggttaaaaataattatcgttttgaacgagaacatgatctttaaaaagtaacttccattactattttctattataactagcaaaatacccgtgcttcactacgggtataatgaaaggttaaatgctataaatacacagttaacatatatgtaataatgtttcaagatggacaaaacgtccaatgcaaggttaatgataatcaggacggataagaaacactattgcatattgatatactcatattgtcataacacacgctctctctcaactcttgcatggcaagcgtttgataatttccaaaatcgaacacggactcgcatggagacggatcgtttcacggctcatgcgtggactatagatggtgcgaactctaatatgttgtgttttgcagacgacgaaaagaaaaaaagtaattatgtttgattttcgaatttaaagctggttcattataagatttcataataactaaatatctgttgaagaaagaggtgcaaaacttttgatttttcaaccatcggatgtgcatggtccgtgctagtggcactggatatctgttgaagaaagaggtgcaaaacttttttgattttttaaccatcggatgtgcatggtccgtactagtggcactgaatatctgttgaagaaagaggtgcaaaacttttttgattttttaactatcggatgtgtatggttcgtgctagtggtggagagaaaaaaactaaatatctgttaagaaagaggtgcaaaacttatttgattttttaaccatcggatgtgcatggtccgtgctagtgtcagagagaaaaaaattgcgcgcaaataggatttgagacgtgggaggaaaagtagacttattccgagtaataataagcataaaagtttttgatagggtaatctggcctaggagagggacaacttttttgattttttaaccattggatgtgcatggtccgtgctagtggcggagagaaaaaattgcacgaaaatagaatttgagatgtgagaggtaaagtagacttattctaagtaataataagtgtaaaagcttttgatagggtaatttggcctaggagaggcccatagacagtgcaaatctatatctatatctatataccaaaaataagtaaggcttccgtaaatattttcatacgttattaagcgtgggcccacatgatatttcgtcgctaatcatgattcggaagctgacagcgatctcttaagcccgcaaataaaagagaaaaaaaaagagagaaagcgcatccaaagcagccctgatttgtggattagggagaaatattgcaacccatccaaagcaacagcaggccggcccagaaaaaagcagtcgcagcccaccagcgcgcccacagagcagaggagctacagcccagcacaataatgcgtgatactgtagcaatcaagtaggaataaagtttggactcatgcctaccaggtatcggataaaaaatagttcattttgtaacttaaaaacatgtaatcaccacaaaatgaactatttaccgacaaaataaattatttttaaaaataaaaaacaatcacatgtgtctttgtttttaaaaacatgtaatcaccaacaaaataaatcgtgtttacatccggatttttttccctcatcaatttctcattcgtcatagaacatctaatcacatcactttttttccattcattgtatgatttattctgttgttaagagtgaaagttattatgcgatacaccactttttttttctttccattgattgtatcatttccttctgatttttttagtgagcgattatgcaattggagtacagtgaggttgatctgatagctagcgaaaaatatatcttgtactatggctactctttataatatgaaaaaacgtttatcaataccgagtaccaaaaaataatcatgtattgcaactgactcataataatacatgaatcttgtactatggctactctttataatatgaaaaaacgtttatcaataccgagtaccaaaaaataatcatgtattgcaactgactcataataatacatgacaaaaaaagtagcaaataattatatcatgttagtgtcttatttgctcccacacactaattattattattattttttcttcacactaattattaggatggtgggaatcgaatcctggtggccagggcgcaaattttcttcactaaccaagtaggcaaactgctacttgtgcttggtggttacatgaaagaacacatattctatattaaccgcattttgtattagattggaaaatgtccgaccggactattaagggattaaaacagattttagtaatgggatcaggatgatgggcgaaaaaaagaatatccgaaaccttacatatctttttattaggtactagaaaaaatgcccgtgcgttacaacggataaaacctatttaatcttattattattatacggtttagctaaggtgaaatttactatgggaactctttttttttcaaaatcatgagctacaattagaagtccgatcgtctcaagttagcatgtgagttttttttaaagagatgtcttatacgacttcttttatatttctaaaaccgaaagaacttaaaaaccaattcaaacatggatctgtatttccaaaagtgaatgaaattaaaagccgactcaaatacggatgacataccaaagtaccgacaaaaacatcttcaatttttataataactagaaaaaagcccgtgctttgcgacgggtgaaggctattttagttttattgttgttgttatacggtttagctagggtgaaaatcatcgtaggaatttgcttggatctttgttttagaaagtcatgagttgtaattaggagtcgactcttatctcaaattagcatgaagttttttttaaatgatttcttatatggctccttttgtattttcaaaagcgtcataagttaccatgcaggtttttttaaagagatttcttataagacgtcttttgtatttcctaaagcgaacaaacttaaaaaccgactcaaacacagatctgtatttccaaaccaaacgaacttaaaaaccgactcaaacacggatgacctaccaaagtaccggaaaaaacatcttaaattttttacaatagtagagactagataaaatgcccgtgcgttgcaacgggtgaaatctattttaatcttattattgttatatggtttagttaagatgaaaaaaagttagcatgcgagttttttttaaacgggtttcttatatgattccttctatattaaaaaagtgaaggatcttaaaaaccgactcaaatacgaatatatattttcaaaagcaaacaaacttaaaaaccgactcatacgcttcaatttttataatagtagatagagatatatagatatattgagaaatatctacaaatatatgattttattgaagtacattttaagagtaatctacttaaaatctatatgtatggtctccatgtttctaacacaaatattttagaagttattcatagttgaatcgaagtttttaaagtttgacattgatattgtacaaaacgaatattattttcgagcaggagggagaagggagtagttttaggtgactgaaaatttgtaaatcttttcagccgcatgaaaatctaccttattataacaatatacttacaagtaacatgacaaattaaatgacatatatagataagccaagtgacatgacaaaatgatataatataatcaagcagctgccaacatccagcgatcgatcgactacctagctagaaccacacgagcgccgccgcagccacggcgccggcgaccgcgccaccgcgggccctgtagttgagccgcccggcggacgacgacgaagacggcggcggcggcggcgacgccggcgccggcgcgttggggtcggcgacgtcgacgacgagcttcatgcccagctcgcagtggttgtcgacgttgcagaagaaccacctcttgccggccttgtcgagcgccaccgtgtcgttgccggagttccacgtcatcaacgtgttgccctgccggttgcacgcgtggaacgctgcgccgtccacctccgtcaccgtgtgcttgcccttagtatacgtgaacactgcgattattaattaaagaaaacaaaaagggttggaaccatgcatataattcttttaaacaaaatggtataagtcagaaataagtatcgaaataatcgagaaatgaaaaagggaactattcggatgaaaacatgccggcatctattgggaatatgtaattcatgtcagaattgtgaaatataaaatagaatttaaaaattatcatgatgaaatataaaatagtataaattagttcatgcttatactatgcaaattgtggacaatctctcctttaaccacatactcaaaataatggtttaatgctagagttaattaagcacctgtgctatggatgaagtggagtcctgggccaaatgtatatattgtcacatttataagtacggtaatgtaccatattatataaaactttgcctgaaaaaatggcaaacctaaaactatttctggttccatttcaattacaaatataaaaccattttcagatgattcggcccgtaaaaacatttttttaaaaaaataaaaattaaaacgacagttggttggtcggaaattacagaaaacgttttcaaccccctaagtataaatacctagtttgtcgccgatttggaatgatttgccgtcggcccagttggtggaagggtactcgagagtccagccatggccatcgccgacggtgtaatccgtggcagagaccatcgccgggagcaacgcgacggcggagacgatggccaagagcagcacttgccgggaagccattggtcttgcggttggagatagcttgctcgaacttatatatcaacttaattctgcttctaaacagctcttaattagtatcagagctttattagcaagctgtaggattcaatgtcttggagagaagagtgtaaatgatcacatctatttatacagaggtaaattaagatcaatattattccatgacaggtcgagatagcaagatcgatgtgcaggtagctgacgcagcagatggtatgctagctccaggtggcgcatgatatggaggcaattaatattaattagttatttgtctgtgaagagttcaattaattaaattaatcttgtgtatgctttggtgctatcagtggctgggtgtacgtattatggctgaagccaaggggaagaaacgactggcacattgttgtttcccctagctagtagctaactcgctctttgctttttttcttcttctttattttctttttttcttttcttttttttttttgcttgggtcgacgttttcctgatgaattagctgggtcaatggccggcttgatcggttgtcagcaaaccaagttactgatccaacagagattatttgttgtagagggaattgaatatatataggtggctgattccattttaagtgtccatgtctcagtatatataggtggctgattccaacatggatacttggtggcatttggcaaaatttatgtgttttgttttccatacattcaactaggatagtatacgtagtggtgccacaatcttaaaaatagtcatgagacttttgttctgttttggataggacagtacctatagaattagtgcaaaaaatctatatgatttgtcttagtttttaattcagatggtcatatatcatacgcaatggtgctacactcttaaaattagaagccaggagacttttgtttcattttggatagcgtagtacctacagaattagtgctagaatttatatgatttgacttaaattttgattcaaatggtcatgttttacaaaagttggggaattgttccatcactcaatattgtttttccttttctttatcaactcaatgacttttgtttagaaaaatagtacaaattggttgcgtgtctgttgaaaaaattcgaagatgtatccatttccattatctaaagaaaagtcctcatgttttttaccaagcctgcaggatatacataaagtgaattggaatttcagtattcaggtttagaagtaggcaaataatcgttgcctgtcatcaatttcaattattacttggtttacttaagcaaggtgaaaatagtactgttagatctgtcatcaaaattactttaaactggtatgtttgtctatctatctgtgtataaatatttccaagaaaaatgaatagtcaaaacaaattacaaaaaccaatttcttcatatattaaaaaaacatacacacagagaaaacttctctaaagctacaatcaattaattaattaaacaaggctacaattaattaatcaacaaacaaaggatcgaggccttgttcttcgtcatgtatgatcaagctgaagtacgaaacgagcagccagagcacaccaactgctaggatgaagccacacatgacctgcacatctaaccgttgatcagcgatgctttgccctggattcgggtgcaccgtggagtagatcgtcgtgctcgacgccaatgcgatcaaggcgaagcagatgacctgcatgcaattaaataattactcctttcgttctaaattataggacgcccctctttttaaaaaaaattaaactcggtaacttttaactaataatcataataactatatctatattaagtattatgcatgttatatcactagattcatattcatattttaaagtactttcagtgatgctaattttatatttgttgggaatatatatacaatagaataaaatactggtcaaactatgttattgcaggccgtgtaaaaaaatatagggcatataatttgggacaaaggaaaaggaagtaataaactattgtcataaacaagttaatccatacatataattatctatatttgattattattacgagaaatgcctagggcatttctggtggccagctccacaaggtggtgggttaaacgacctgagttttaagcctcaccacttctaattatttgatattagctaggtcattccctaatattcactctttattattattattattattattattattattattattattattattattattattactactactactacttccttcgtttttcatattataagtttgattaagttaatagataattagaaacatttacaacatcaaattggttttaataaaactaatttttaatatattttttatcatatgtttattttgtatcaaacatattactatattcttctataaatttaatcaaatttaaagtttaactagaaaaatagtcaaaacgatatatttataatatgaaacaagaagtattaatttgatctatcgtgaagataatatactccactgtatatatatgatataccttgaagatgaataggacggtgcgaatagttttgttcgcctcactagaaggacgaagacgaggctgaaacgccgctgccgccggcaagatgcgaggcggcgctgcagcacgggctggcggcggcggaggtggcggcgcgaggtccttgatgacgtggatgatgaactccggtgagtggccgtcggaattcatggctgacacaccgaccgatcgaacgaacgaacgagcgtaagtgcaagcaaaagcaaaattgaggatggtcaatatatatcagcacgggattaaaaacaaattagtactctctcctcccctaaatgtttaactccgttgatttttttaaacatttttgaccatttgttttattcaaaaacttttgtaaaatgtgtaaaactatatgtatgcataaaagcatatttaacaataaatcaaatgataggaaaagaattaataattacttaaattttttaataagacgaatggtcaaacatttttaaaaaaagtcaacggcgtcaaatattttgggatggagagagtacttgtatatccgattcggatctatagtacttacagtgaatcgaattcctagtaggattcctctaaaattggacacacaagatcgaccgtccaatctaagcgttattccgtcctcaaacaaacctccgtaaagacattttatgcctcacataacatgcttcttacttaacaagtttcaggtattatgttctgtatcacaaacagaacaaacgcaacataaggcaccagaagcatgcgaagtatgcatacgcaaccttcaattgaattttttgagagctttcaaaagaatttgcagcaatgaatgttgttaacatgcgaagcggccaaagaaaaagaagtccaatctgaccatatgaaactgtgctgatctaaagaaattgtgttttcaaggtcttactagatactaagttatgtatgtacctaaaataagggagtatatgcacccgaaaggttttctgcagcaaatttgagcaaacagctttaagcactataccatggtaatgaccagccaatgtgagagtacgtgcagttgtgggtaaaaaaaacatttgcaatacaatatatccaattggatatagaggccgtgtaaaaattactcttctctaaaataaataaataaataagcctttgcaagtaatattcacatcgcaatcttctcgttcctaaatcatacttgtgaactgctaacaactttgctgccaacgtatcaaaggcagatctctgagcttgatggatccaactcgtcatcaccaacaagggtatatctgtaaatgaaatgaagcatcgcctgcaaagagtcagggtgcgcaggggcgagcaactggcgacgatggtgcgtggtggccgccggcgagctcttccggcgtttctatgaacacgagacgtacgtgagcgaggacgagcacgtgaacacgaccgtgagcaggggcaaaaacgtccgggataaaataaattggatgaaaaatgatttagaaatagcgaaaatagcattctagcgaatgcccacggcttgacagtggtattcgagctaatcccactttaacgacggtattctagcgaaactaatttttaataatggcagatatacaaatttctcctcgctgaaccaaccggtgggagagccctccaccttctccttccattggaaaaaattactgatccaccaaactaattcttatatatatttttgaaggaataaaaaacaatactataattcttaatttttcaaaaatattctcattgaaacaataaaaaataggaataggtatttgtttgttaaagtcaaaagaaacaacttcgttccctagttattataaggacttttattaaaataaaaaaaagattgaattattttacctcggtctgtttagttcccaaacaaaatttttcatgttatcacatcgaatgtttggatagatgcatggagcattaaatgtagacaaaaaaaacaaaccaattacacagttcgccaggaatgcgagataaatcttttaagcctgattgcgtgttgatttgacaatatggtgctacagtaaacatttgctaatgatagattaattaggcttaataaattcgtatcgcagtttcctggtggaatatgtaatttgttttattattagactacgtttaatacttcaaatatgtgtccatatatccgatgtaacattcaggggcaaaattttttgccaaccaaacaaacccttaggcctgctttagttccccaatttattttcctaaaaacatcacatcgaatctttggacatatgtatggagcattaaatatatattaaaaaactaattacatagttagagagaaattatgagacaaatcttttgagcctaattagtccatgataagccataagtgttacggtaacccatatatgctaatgatgaattaattaggctcaaaagattcgcctcgcgatttccagacaagttataaaattagtttttttatttgtatcaaaaaccccattcaaaatccgatcaaacatctaatatccgatataacatacaaaaaaatccatttcacgaacccgttagtatccttcccgggcggcgctgccgccatgtcccgcgtcggatgggatggaggagggtttgggaattttgggctaaggcatagctttggacctctcggctcggctcatctcctctcggctcggcttaaaaacagccgggcggctgccacgctagctgcctctccccttccctttctccccgctcggacttaaacccccccacaaaaaaaaaaaaaaaatcccccacctcctcggattcccctctcctcctcctacttcctctccggcgaaccccacgcggcggcggaatggggaactcctgctcctccgtcgacgagagcgccgccgccatcgccacattagcggagagcgctgctgcaggggctcgggaaaccgtcgccgacgagttcgccagggcagcggggtcgggagcgggagggcgaggcgacgtcnccggatcagcggccgcaggagtcgcctctggagcgggagggcgagacgacgccgccggggacgaggttgtgatcgctggcgtcctgtcgctggccgacgggcagaaagccgccgccgcgggcgccattagcggggtcgagtcgatgcagtcctacatgagaggtactcgattcttctgtttcggagagcgcgtgtgctcggaccagatggccgcgctcaagatggccgccgcgtgtggttcggccgccggcatgagggcggtagccatggttgccgcccgagctcggcacgccgcacggattgccgcgaatccagacgttgagaatcctctgcatgatatccccgaggtaattttctcttgtttttcatttgtgatgttgcaatcgatgcatttgtgtgtcaggaacccacactctaacctcaatagatagtatccaatacaaaacagtagtggatcggtgtggaattgatggtggagaaattatggaatacaaactgaatagaaggttctagtagtttctagataagtagaggaagaggaagggtagagaagaagatcaacaagggtgccaagcccggccacccaagtcgccgccaccgccgattccaaatgttcgatgcctctaagtgattgctgttgctgctcatatatgctgctagttgtgcttgtgtgggccaggattgaaacatgactaacttatcccatctgcagcccaactgtgttcctaacaatcccctctccttaatattcgacttgtcctcaagtcgatgcaaattattgccatgccaccaggatcccaaggtgtctgaagttcttgcatatagttagcaaccctctgaataacaagtgattgtggattattaccagcaacgcttctcgatttcatcttctggttatcatccatcagccaatgcaccaaaagttgattttagttgatttgcaattctcccttattactgaccttttctctccctttttccaattgatgtgctgttacaggatcgtcctgattacatgctatccgccgctgccactggagcaagagcaggggttctatgtgcacggatgaagatacaagcagctggtggtgattctacttcacatgttagtgccagatcccaactattttacatcttctttaaacaattagaattagggcctgtttagatcccacccaaaaattttacaccctgttgcatcgaacgtttgaacacttctatgaagtattaaatataggctaaaaaataactaattgcacaaatttcgactattttgcgagacgaatcttgtaagcctacttgctccatgatttgacaatgtggtgctacagtaaacatgtgctaatgatggattaattaggcttaataaattcgtctcgcggtttactaatggatactgtaattagttttttattagtgcccgaacaccccatgcggcaccctatataatacccgatgtgacatgccaaaactttacacccctggatctaaacacccccttcatcgtaaaaaaacacccccttagtatgctttataccaaattcatagtttgttacttacaaagatttgttgtttattgtattcatgactacaaatagtatcaaattaccatgtttgttgatgtttattgtaggcgaagtatgtcccttttctcgcaccgttcattggaggtgcactaccagggtcatatgcggcctatcacctcgtgaaacattctcctgaatgggtcatgggcgtggtctttggtagcatttctttgggtttcttcgcagcttgcacaggaactgtttctggtttactaggcacgtcatccgccacattccagtacagcagatttgctgccattacaaccttcacggctgtatggtttttattcagcttcgctatgacttccgtgttttcaaaaacatggcgcaagattctctgtggatttatatgtggtgtgcctggggtaactttcgtgggggcctggctatattcagggtggtaagagttgttaacccttagctagtaaaaatcaactcagtatgtaaattatttgctcatttttgttattttttttattgcaggtgagaacgagttgcaacaaccgtttcatctgtggagactatagtttaccatagcttgttttctttgatgtggttgtagagacttccatccacatagtacagtctttacttcagtacattttcgtagtgattacagaacatgacaaagggagaacagatcatagttcctacccatatacagggtgaaaaggtggtgctaaaacctctctttaaatcaaatattttccaatatgcaaggggcctgtttgcaaatctttttttgcccttgcttttggatgggaccattcctatcaaaacagtaaatactgttgttctgggtgtctgaactgtgtttcttgatgtttacagattttttcctccccgtatcaatgccaagttcttggttctatgtgtgtttggactgaaggttttgtgtgttgggtggcattataatcgatagttcaatttcagattagtaatttaatcctcggtaagacaaatattgactgaatattaagggctttgttatatattagtgttgagaattttgatattcgtgttctaattccaatactatgttcgctgaaagttcactgccatggtttagccccagttaattttacttatgtatattattatatattttctttctgcatatgctaatatattctttctgaagaatatatattaggtcttctgtaatgcataagcacatattcttcagaaagaatacctaatacattttttaagaaagaatacctatcatggtttacactgtagtgtcggtactgctaataaaaaaatattctttccgaagagcgagtaacgagttgctggagtgcattttctatatattaagtatacctgaaaaaatatgtatctgtactgcattcaatgtagccaagtaatgctcgatcctaatcgtactatttctacatcttatataccgaattcaggggtagaaccctggtatttgattgggccacatgccactaccattacaactgctgctgaattctcggttagagaaactagaatggggatgcgtggccccgcacaaccaccaccgcacacaaatctctactattataaaaattaaatatgtttttgccggtactttagtacgttatctatgtataagtcgatttttaagttcgttcgattttgaaaatacatatccgtatttgaatcggattttaatttcgttcgcttttggaaatacataatgagttgtataagatatctctctaaaaactcgcatctaacttgagatgatcggactcctgatgctcatgattttctagaaaaatatatatccaagcaaatttgaatagtgaatttcatcttaactaaaccgtatctttactattataaaaattaaagatgtttttaccaaaattgaagatgtttttgccggtattttagtacgtcattcgtgtgaaacaatgctaacttgaaacgatcgaactcctaactgcagctcatgattttctaatatatatatatatatatataagcgaatttcactttaactagaccaaacaataataagattaaaatagtctccacccattgcaacgtcggatattttcttttctagtataacttaaacataaattttattaaacacaaaaattagctatcgttgatcaaatgttctccatttcgtttaacctaaaagggtaatgtcaaatgtagtatatatataattacaaagtgtgtacagtatcaaccttctatgtgattggaccacacgcaatttaagactaaaggaggaagaagtaaaaaagctgcaaaaaagaagaaagattgacaacgatatttaagtcaagctttgtgaactaaagtacaatggtctaaagagagataaatccatgtgtagcatagcatattttgcatgaaaaaaagataatatagatcgctaatatgcatgaataccaccatacccatcacggtgagcagcattccaaggatgatcttcacggtgagggccgagtcgaacataacccagataagaatcaacatgcactcggtcttcatgtggccccaggaaaacttcatgatagtaactgttctgtctggttagcaataacttcatctggccttcagggcagcacagaaaatacaataccatctgaatccatgcagcaagattctttacttgttataattaagctcaacaaatataataggctttcattggctgattcaaattgttgaattgaagggtgcctataaaacaaagcaataaaaatgaattatttttcttgaactgttaattaaaagaacatgacaatataagagggaaaagaaactaatacgaaaacctcctgtaaatataataggcttccgtagggcaagttgttatttggttagtgatcgatctacggaagaattcagcagttccataccttttgatttgttagagagacaaaccaataacatatacatatttttggtgcaaaacacaaggcattttaaaaataagggatgcatgaaaaataagatctggaatagattaaagaagcaaggtcaacttctaaatttcaatgttgtacccaccacaagtgcatcgattctttaaaaaaaaagaagaggagttaacatatcatccagaccggtagttctatcaaacatttaatacttaaattatgtgtagggaaagtttatataacatgtaagtattccaattagaaatacatagaagtattcagattcaattcgaaacttaatcaactaagggttaaaaactgtaaatcaaatcaaaatttcttattgtggaaatataagtacccatacagagatatcagcagctaagcatgaccgttgatcattctgtgcagcagtacagagagcaatagaaaactccagctagaggctatggaggcacctatactcgtgaactcagcttcacctaatactaacgagccaagacctgttgcagttcttgtagtggagaacaaagtgaaagggcagatcgatcaatatagttgccatcactgcatgcagtttatataaatttttatgcatgattgacgaaaattatgaagggatttgcagtataatgttaaccatggattgatccatattagtaagatataaaactaatattcaaaaagaacaccaagccactaaaacttcttaatggagtggaaagaaggccaataagtaagcatgacgtgcgtacagccataactgaaaaaggccgaataatagacttgcagttttggacctttggtaggattatagaaggtccctgctataaacttgattgttgtagcaaatgaataagtccatcaaagaacatcttttggaatcacaaggccattgtttattntacagcaccagtgctgcagctgcaagagcattgagtaggaacatgcccatcatgaacataaaaatgggaagagaataacatcaaagtattgttcagcacatatacctgacaacgttctttgaaggtggctctaaaatactttgctctgactcccaataaaaatctcaatagcctcctcttgaaggaaagtaaatcaaaaggaacatgtcaaaactacttatcaaagctaaggatagtaatatttattcgaattgaagtgcataatagcaagcctagaggaagttgaaaaggcaccttcatcggtcttgaaatcaaatggctactgttcatcatatcccttcttcgaaaatattgtgccatcctgaaatattctaattattttaagtgtcaacaatgaatacaactttattattatcagtagtaatcacacgcagttgacctctagctgatatatgcacaagagaaaataacaagatcaacaaccattgtgctttagcatacttttgtcagctgcaccttcattgtgacgctcatacccttgaccctccttgagaactttgttcaaaatattttcttaatgacacccatttctatgagtatttctagtgaaaacaagttaagatcaagtgataaacacgaagagtggcattttatttggtggtacagcatcttcctcaatagctgtaggtccaccactctcaccaaatctatctaccattacaaagttttaaatcttttcaatcaactcagagaaagagatggcaagccatacaaaagagagtgtgaaatcaaagaagcttacattatggcttcttttcatgatcttgacagctttcgctagtgcaggacagaaaaaccctggaacaaaaataccgaactttcattagttagcaagcaaccgattgcgttcaatactatgaacgtgaaatgctgacagggagataaagggagatggataatgaccatcgttaagagtaaattcatcatctttaagaacacagcagaaagcacacaaaagataaagaaggacaataagataatcaaactcatgttatcatccagattcacaagaaagtctttgcctgactgctagaaagtaccaattcgtacaatacaaccgatctcacacattccaaagaattcatgatttgactaaagatcattttgtgatgatcatgaataacatgtacatgcaacaacgacgaatgactaactatggtctaagtactatgattactcaataatgataggtaaattatacaacacagcgccgccgcggatcacaacgccgccgcgaggagagtgggacacaggcatcggctccaacatcgtcaccggccacaacaccgtcgcggggggatagagaggaggaggaagggggacaccggcgacggtccccaaaccgccactggcccagacgtggccgcgggggagggggacacctacgccagccccgctgctgccaccgctgacggacttgcatctcggcggctctgcagcatgcccttttgccgccacagggggtagaagaagaggggagacgacgggcggcggtcgagcggccgatttcactgctgcagcagacccctttgccaccacatgtggcctgtggtgaaggggtgtcacgacggcagcagcagctcaagaaccgggcaattcaaatcacgaagcaatgggccgaacggggggtcggcccattcgttaatgacagcccgacaagcgctttccagcgagtgagtggacccagtaactatcggctgggccacggctagtgagtgaggcttgatagcgtattgctatataggccagcagcgatagagagaaggcgtattattataatcaacaaacagaaactcaattcgaatatctctgctgcttctatcgtcttcctcctctatcttcctcttcttcctcaacaaatccctctcgattctctctctctctcgaattctccttggtgaccaaatccttcgcgagaaagacctagaatcgtgacaagggggcgtcggctccgacggacgccatgcctatgcgctcctttgccacggaagagggacggcggaaggcacccgtgccaccgcagtctcgtgctccgccgccaccaacctcgtcgactcctgtgccaccgcggcctccccgatccccgcctatgtggccatcgtcaagttccacgacggcgaagcaggacttcgcctccagagggaaggggtagggggaaggttggtgctggaggattagggggagggccgacgccgccgtggggcatgggtggtcggtgccgaccacgtcatctccctgcaaccccagccgaagtagccgcgtgcggccgtcctggccttgcgtgcggccctgctgccttgtcgccgccttcacggcatggaggggagcctcgcttaggtgggcagcgccgccagccaccaggaggagatgctgaaacagcggttgcggcgatggcaggaggagggcgagaggcgccggtccacgggcggcgttgggatgggtaggcaggagataggatttggatgtgtttttgcaaaaacacccttgtatttccttggattacagtgccatccctgaaaacagaattttctctttttcgtgttatatttctcagaagtatatggggctttcattaaaaagtgtagtaaggtaaaaacggtggaaggattgcttcaagatttcttagagtattaggttttttctgcaaaaacaagtggggtgcgtgtggcttgcatgcatgcctcaaccgcccattccttgttaatcacaccggacacgaaggggatacatgtctatggaaacagagaaatgaccgtgggaaccgcgaacaaccagtcacattcgcgcgcacgaggagccttaaacacaaaacgaagacgtgtaaaaaatgagatagccagaaaaaattgaaaaaccgaagaaaaaggaatggttaggggagttattgattgatgatgtgccacgtattcacaggcctccctcagccgtttgattgtaaatcaatgatagatatgatgcaacggtccaatctgtgatttcttaataaatgattggttgttctcaatgcccatcagtacacggcacgtggcaaaacatacggaaccggaaacggattgcacaggaaaaaaaagaaaataaaaagaaaagaaccagaacaaaaggaaaaaaaaattcccattcctgatcgtcaacgctctcgccactcggccgctgcagccactcaatacgccgtggtacatggcggccttccccgtactggaccatttataacccaatgattaggatggtgtctatatcattgaataagttaccacctaagatgaaaaataatgtgtcaaagtgaataaatgaggaaagagaaagaaaccatgtcttgtatgagacatggtttctacacaacatccaagacatcatgtgagataagtagcattaaatttaagtatggaatagtgatgtttgcattggaagagtagtgtctagtactagtttttttatgatgtagagtttatggaaattatgtctagtgtcttgggttgtgaatggcctaatccactcattaagaagatgccacatcatcatccactaacaatcatcacatttaaacatcatgcaaacatattatatctttatagtttttatagtttaagagcttttcaaatacaaacatgttaaattatcacccaacataatttacataatgtttcaatgtatatctttattatgttttatgatatcctatatacttatatagttcatcttcacttagttagtgcttaaatgattaatctatggtccaaattatctttctccttttttcctctaattaagtcatatcacatcaattatttttagcctttagatgattaatctacggtccaaactatcttcctacttttcttcttccataaagtcataccaccttactttttacgtttgaatcatcattctacatactatttaaatttaaattagcataaaccataataatttacttaatctaatgttatgtagctatcttacacgttattttttttattgttatcgtactaaattcccgcagcaatgcgcggggtttcacctagtattactaatttgtatgcctttgtttgtcttaacaataatctgaaaatgtatgctttcaatcatcctctcgcttatgtttttccaaataactcattactatatttatctgtaaagcatatgtctttagtgattcacaagcaaatactataaaacaaaaaatttggctcagagtctaggaatcgattaaatatgtaaaactaagattcaactcgacaaaaagctggctggtgcataactaagatggtgaagaggaaattaggatacgcaaaacgagaaaaccattagcgcatgattagttgtcctttaattattacaaacgtgaaaaatgattttatttgatattttaaagaaatttctatgtagaaagttattttctgctttcaatatagttattttacgataaatagaaggagctaaaatgaatttattacgggacagaggacgtagaattcactattttttctaattgtttttcatttagtctattagagcaaaatcatgcttaagtgattatagataataagataaccactaaattttctgaagggcctttcacatatagatttgtcgggtcctagattttaaaacatgatcgacgaccgctgcttgatccatcttttttccatttcatatatgaactattttttaaataacctatacaatacttatgcacccaaaatatacaatatctacgggttatccattcagtgtgccaaaaggcacgcttattttctagtacttctctgaagcgagagctcatgaaagtggcatccacagaggagctaggatttagacacgagaaacgccttatatactacttcatccatattcgtagtgttgctgacttttttatttgaccatttgtcttattcgatttgttttataaatataaaaatatttgggcgcgactatgcatcggtcgtccaacggggagagggggaaagcgcccgatt

SEQ ID NO: 23595 - DNA, 16063 bp, Oryza sativa
aattgatttttctcttaaattacttatccaaatcatgatccgattgcacaattaaattcgttgcaattaaatcttcaaaacaagaccacacatggatatattccgacaaaatttttttaagcttattattgaattatttttaaatgttgcatgatgttccactaggtatattggaattgtttggctaagcagattaaaaatgttttactcgtttaaatcgggtgttgtttcaccttatataaaaacaatgtttcagcaaataacgaaagattgtttcagttcattgcaatatttgatccatatatagtgaaacattataagtacactaggtgaaacatttttcggtggaacaaaaaataaaacgaattcccttaatagggggtttcaaaaatatgtgggtttttttgttgcaatgaaatatttcagttcactgcaacattagatctatacatagtgaaacattgtgagtacaccaggtgaaacatttttggtggaataaaaaataaaccaaattcctttaatagagggtttccaaaatatgtggttgatttgttgcaggtggggacatgtattgtggtggggcccagcaatatcaccgcgcgcggggggagcgcccgatttttgctcccgccacccggccgctcgaagacaagtattttcgaaaatatttatgtcatgcttaaccatctgaccatttgaacatatgccttagactttgttcgatacatggggttggaaacccatcacctccatacggaaaacggagcagtccattagcgcgtgattaattaagtattagctattttttttcaaaaatgatcaatatgattttttaagtaactttcgtatagaaactttttttaaaaaacacaccgtttaatagtttgaaaaacgtgcgtgcggaatacgagaaagaggggttgggaacccccttcatcctaacgcagcctaaagaatattttatgataaatctagtcacaataaaataatggaaaatgatgccatccgggcgaccggcgtgggggtgccggatggggcgctcccccgcgcggccctctccccaagcgcctacatgcatgccgctgggctccaccacagtgcctgccccacctgcaattgcaacaaatcaaccacatattttggaaaccctctattaagggaatttggtttatttttctgttccaccaaaaatgtttcacctaatgtactcacaatgtttcattgtgtatagatctaatgttgcagtgaactgaaatattccattgcaacaaaaaaaatccacatattttggaaaccccctgttaagggaattcgttttattttttgttccaccgaaatatgtttcacctagtgtacttataatgtttcactatgtatggatcaaatgttgcagtgaactgaaacattctttcgctatttgctgaaacattgtttttatataaggtgaaacaacacccgatttaaacgagtgaaacattttcgatctacttagggaaacaattccgatatacctggtgaaacatcgtgcaacatttaaaaataattcttaaaaaatttttccgtcggaatatatccatgtgtggtcttgttttgaagatttaattgcaatgaatttaatggtgcaatcggatcatgatttggataagtaatttaagagaaaaatcagtttaaagtagttttgcacgtaaatcgggcgctgacgtcctcgcccgatttagcgcgtcctaaaataattaataattacattatttttttaataaaacaaatggtcaaacgtcgataaaaaaaagttaacggcgtcgtgcattaatataggaagaaaatattatcatcctagatgattattatgtgaaaacatagaagggttggccaccaggccactgaacatggccccttgtctcagctactgggttgccagcttgttgttcttcgtcgtctaggattacgcacttgtcatcgcagctgaagtaggaaaggagcagccagatcacagcaactgctaggatgaagccacacatgagccgcacacctgatcgttcatcggcgatgctgtcccctttgatagggtgcaccatgaagtagatcgtcacactcgatgccatcgcgatcgcggcgaagcagctgacctgcacgcaataatcaatcatatattataacaagttaatatatgcatatttaagaggatgactataggaaacgctatatcattactttcgaggcagatttagtaccaagggtataagataccatacccatacccatatgagtgacgcaatcatgccatcaacaatggtccaaggcccaacacttaaccctatttcgaagcctaactactaatttgaccctatttttttatttgctaatttaacctcatttttcaaaattgaatatgccatctgaccatatttgcactgcaccattaggatttcacaaaaagataataccaaaaaatcacatttcacttcaaccctatctctctcatctcccgacctcccttctcatcttctctggcccaaccctctctcttgcccgtatctcctatggcacgaccagctgccgtggtgcggggagggaggaggaagcggcgacgtgcgaagggaggcagcggtggcggtgctggcttgcaaagggaaggcgcggcggtggttcctgcgcacggaggtccggcttgcaaagggaaggccggcgcggcggtggagctgcgcgcggaggtaggcgacaacgacagcatcggcatgcggactgaagcggcggcggcgtgtgaagggagggcacagcggtggcgccaatgcacgaagggaggagcggcgatggggccggcgcaaggagggaggtggggcggtcagcgcacgaagggaggagggaagcacgggcagtggtgtgccgacatgtggagggagggggtggcggcgcgtcagcactcggagggagtactatatttttctataaactagatcacaattaaaaaaaaataaaaagtccaaattaccccctcgactaatgtggcagtacgaattaccgcttcattttaaagaccacacattctttaccctcagactacggagcggttttggtccatacgtgacgtacacgtaacagtccagtcaacataaaaaatataataaaaatggtggggcacatgcctcttctcttgatcaccacatctgggctctacatttttttatattctttatgcttactagactaccacgtgttcgccacgtagggctaaaaccactccggtggagagtaagctagtgtttgggtgggagggactaaactcaaaaaacataagtccctcccatcccaaacaccgggtgggagggactaaacccacaaaaatataaaagtcccttccattccaaacaccacctaacttatcaagtacaacaagttgagggtcgtttttgaattgagagggataatttataccgctattatagttcagtggggtaatttggattaatttcttaaaagaaaatgagtgaaaaagaagaccgaaacgaagatagtagtatatataccttaaaaataaaaagaatgccacgggccgctctgaccgcctcactaggaggcggaggacgtcgtcgaaacgccgtcgccggcggcaagatgcgaggaggtactgcaatggcgtttggcggcggcggcgcgagatcgtcgacgacgtggatgatgatctccggtgggttgtggacggactcggcgttggaattcatagccggcggccgaacacgtacgtaacgtcgacctagcaagatcgcgcaactccacaagacacaggtgccagagaaaagttaattaagggcgatggatgtatagtatagattgatactacatcaccacgcgatattatatatacatatatagtctacgttacgtatggtgaactaatcctagtaggattattggactcgatacggaggcgtgttaggagcactgatcagtgccccatctccgacttggagttggaggcgctcaaggcagcggcggcatgtggctctgccgccggcttgagggcggtggcaaccatggccgcgcgacgagaggaatttacggtcgttgagaaagtatctagaggaatatggtcgttgagaaagtatcttgcggtacttaaattttacattaaaatttttgatatcttgaggtatctaataatatctaaagacatcaaattttacactagaaaatatggaaccttaatatactttcttattttgaagcccctaaaagtagattgaggctatccccattttctaacactactacaaaacatcaaataggtgtcaccactataggtgccggtaaccttttctcacctccgcggattgaaatcgtaaaaaaccgatatctttaaataattataggtatcagttctaaataaaaaccgacacatattatattttgtgttagtttttttaataaaaccgacacccataatatattaaaggtgccgttttttttaaaactgacaccctaccaaacgagccgagccgagggacagccatatccactagccgagtgagggagcaaccttatcctctcacccgtgaggccgtgacctctctctttctctcacgctctccattctctctcggcctctctctctctgcgctttcgagggaggcgccaggcggtgcctgcggcggcgggaggagaggcggcagcggcgggtggcgacgggaagagagacggcagcgacggaaggagtgcagcaacggcgggcggcgccctcccctccgccaggtctagcggcagaggaggttgcgtcggcggcccggcggtggaagtggatgcggcggcggcgggtcggtggcgggaggggaggcggcggtggtccgacggcccggtggcggcgccctcccctccaccagatctagcgggagggatggtggtggcggcggctcggtgttggctcagcggcggatggtggcaacagcggcttcctcggcagcggcagcatagtggcggcgccctcctcctctccatccagcaatggcggtggtgatgaaggcagcctcctcctcgatccgattcattattgatgaatgtgtgttcttgatgaatgtgtgactgtgttcatgaatgtgctcttgatgttgatgtgttgttcttgatgaaattttgggatttgggtgttagattggatcggcttgatggctcaatgcatgcattgagccgattttttttttggctcatgggcgcctcaaaggccaaaactggcacctttgaccttgggaaaaccggcaccgaagggggtttcccagccggcaccctttagagtttctgtagtagtgtaaggaccaagaaatgcctccaactccagcagcaacccctatttcttagtccatactcttggttatcttgtattttaaaatacaatccatatttacactacgtttaacaccacaataattcaaacataaatatttctaacgcatataatttaaccatacttaaattcacaatttcaaacaccacaattcaaattcaaaattaaaattttcaaacatgtaaatatggtgtgggcacagtgccatatacaacaacaacatgcacccaagattcataattcaccaatgaaaatgaaaattgctcatcaaaaatagactttgtgaatccaatgatcaattatataaattaaaaataacacatcctacaaccatgaatggttccattataaataacaaatctgaaagtaatataaattattgcggaaatatttaacaaaaaagggctccaaaggccaatcgtggtaatgacatatcctactagtaaaggacacatggatcatccaatagaaaccaatttattccatcgaagtgctcaaactctctccattaccgccaccaaactcacctccaaagccactactcccatcaaatccatcattgagggcagccacatttgaagctacaatatgtgccctcatagccaaggtggaaacatcaaaaaacatgatcttatgttgttgatcccacactaacttacgttcagcaaataggagcttgcgctcttgaatctccttagttttcttccatctctcttctttcaattttgcttctttctctttggcgtcaagcaaatctttcattgcctccctgtatggtccatcttctcctccattcttcaacttctcctttgcttgcttcctacatattggtctctttttagcactcgcctgtgataaatcaagatttgtactcttgctagcatcatctccttcttcattttcttcatcaactctctcaattggtgtcgaagacttcctagaccttggcttcttgtgggattctagtgtttgaaactttggagaattcctcaacttgaaccaacaatgattaaattgaaatgccctgttctttggtgcattgaaagagtacaatgcctcagcttcaagaacctacaacaaattcaagtgttagttctcatacatacaacatcgttattaacaataacgaataacaatttaacatacaagctcttgatgttatatgccacttggatgtcgatgctcaatttgattgtagcagccctaaaacttgcttacttccttctgaatgttaccccaacggtgctcaagagagtttgcattcctatcagactctgtcgaggagtgatcctctctagcgggaggttgtgatgtcacaccctgaagttctcctcccaatcctaaaatttaatttataaatgaccctaagaaaataccggtgcaaatcaagagaaaaccctaagaaagtaatacaaataataatcgaatctggcatgtggaatttttcttgagttctacatgtcgaaattcactaacaagatttttagtggaattttcagagccctagaaataattttaaccaattaaaattgagcaagcaatattttaattccagggaaaatccttttcttcctttttctttttctttttccccctttttcttttcgagtgggccgccggcccattctccttcctcctctcccctccgctgggccggccgtaggccgaggcccagccaggccaccccgtctccctcctcccacccgggacaccgacaggtgggccccacctgtcgggcccgtctcctacctcgcgcccgtgccgccgcgcccacaaccgctgccgcgcccacgcctccgcctcctccgggccacgtcggtcacgcccgcgcatgcgccgtacctcccgcgcccactcccctctctctcccgcccgcgcccgcgcccgagatggccaggattcgattttcgaatcccgcctctctctctctcctctcccactcccccacgttggccggcggaatctcgcccctaccggccacgtccgggactcccctcccctatttaagctcagccgtcgccccctctctctttttccccatttcgccgaactccctcgtgctccccatcgctcccgcgccgtgcacccacccgccgccgcctttcccgccgctccggccgccgctagccgcccctaggctcgccgccgcaccgcgccgacgccgccgtcaggtttgcaaggacgaactccaccccgtccgcccttcctccgtcgggattcgtcgccggaattcgcatcccctcgcgctccgatgagttctacctctacaaacgccttcggccatggatgccggccgccgtggttcatctccctctctctaatctctctctcctccttccttagggcaccccgaagcccgtccgccggttgccgtcgtccccccgtggcttgccgtcgccgtttgccgtcgtcttcctccgcgccggccaccctcggtgaggcgtcctctcccctctactcccctccctctccttcctagccgccgcttagcaccgccgccttcacgtcgcctttgtgccgccgcctccgccgccggttgctgtcgccggcaacgcgtgcgcgcgcgccgtcgccatcgccgtggccggtcggccggccttgagccgagccgagccgggtcaccgccgcccgtccgatcaaccccggggacgatctgggccgtcggtcccgtggaccggcggtggaccacctgcgtggtcccagtccacggtggaccgcccccccttgagccgcagacgagtggggcccgcgtgccggcaccccttttccctctcccccgagccgctgaccggtggggccagcatgtcggcgccgcgcccccccccccccttgatgacgtcagccctgggaattattgcgcaataaattatttaaggactttttgttatagtaataaacacagtgaatcttctaaaattcataactaattcatccgagctccgtttaagcccattcaagtctcagtaaatcaagaaaaatgcgtagaatccattaaaaatggttttgttctctgtttgagtagtcttatagcctgtttgtattgtttgctttgtatgtcgcctagattccggttcttccgacgctccggtgtacttcgagatagtcgccaaggttcctccagcagcagagcaaggcaagtcatgcctgtcacttgaacatgttgatcctatattgcaaatgctctattgtttttcttcaaatactgcatcgttttataatattactatggggtgtttacctattgttacagccatgccatttttgataccatgctcctttgttagcttgggttataacatgaatagacgttggactaggagttgtttagccatgcttagttcaactagcacacaatggggaaatcccatttaaaatatagactgtaggttcatatgataatgttggtttagtaccaccgctttgatgttggttaattaaaatgaatcacggtgggctgtgggtgcatggttttgttggtcgcacccatggcagttaaggaccagttcgcgggatgccctggaagaacttatcgtacttaccacaagccagcgtgggcaacggctgggcttgcagtgtagcttttctctagccgacgcatccaggcaagggtgggcgtgatggagtttggatgggccctacgacggcctatgtggcttccggattcacctaggcacgagaggggactgcccgctgccttgcgaggagtggggtgaaacctgaggtgtggtgtgcttggttagagggggttatgcgaagggtcctgtcacggcttcttttcggtatgtcgtggtggcatgtcggcgcacggaaacgtgtcgtgaggctgtgtcttgtgggtacagttgtacacctctgatcagagtaaaactattcgaatagccatgcccgcggttatgggcggtcaaccagattcaccgtgattagtttcaccctagtttagtctaatgaaattggatagtataggtggatggttgggcctattgcaacgtgggatagcgttggacagcggatgatcaatattaattaattattgcaactgtttaattctttcaacttctgtttataaatgctcactttatgcaaatgaaccactctagctctcctttgataattccctgcatcatacccctattctggtatgacttgctgagtacagtgggtagtactcagtcttgctctattttccccaaccccagagtacgagtatgtgtccgatggcgggttctccgaggagtaggcttcgtccgtgccgtcgagggtgcctgtggagtggtgttcccactgcagttcaagtccaggcttagccccagttatcttttgtttttccgctgcatttatgtaagacttttatgatgtttgtaagacgtggatctgaatgtcaacattgtcgtttgtgtaccccggccggtcctggacggggattttaatgcacattctgcttggaattctattcgggaatttctgggcgtgacaagttggtatcaaagccgaccttgaccgtaggacaagccaaatggaaaaacctaagagccctctgaatccttttcattgcatatgttctttgcaattggatttgttccgggaaaattgggatctgttcttgtggttcaagggaaaaatcttggtcgctcgtttaagtgagatttgtcaaaacaagtcagtctagggttttagtaaaattattgagatttattcgtcagtcagttgggatttgatgggtgaaatgcattaggtcctagctcaggaatatgggttgcaaggtacttatgctcttattgttattattagtatgtatctaatttccccattattttatcgttatgtaagtctgtcttatttattcgctctcatgcaaaatgatctatgcataaaatttcgctcttattcgattctcttatttgagtcctttattgctttatttaaaattggttttgagcatgcattgatcctactcctttgtcttctctagatggccggccacccacccaaccaccgcggagaaggtatgattgactttgtggcagagttagcacgtatgacgctggtggtgggctaccccaacgcgccagagtacacgacggttccaccgctcagtggcgagcttcctcaccgtgtccgcctggaggtctatggctatgtgggcacctgcctcgctaatatggtggttgaggcgtccggaggcacagcagatcacgcctgtcaggaggcagcatacctgatgatggccagactacgggagcgccacaactacatcttccacgacacggcgtaccgatttcaccctcgtcgagccagcggtgatgatgtcagtactttccgtccgacagccggcgagaacttcaccacctttggtcacatgtgcgttgtgatgagggggatggacaggatgcactcggacctgcacaaggcgtccaaggccttgaatgatgggaagctcatgaggatcatcgctctgaaggacgagatagcgcgcctgaagagggagaatgctcagttaaagggtcttcccgcgccaggaggagtccggatccgcactacgccccgcaagtcgacaacggcacccgtgcgcatccagcttgcgcccaggaacccacctccatcagcagctccggcagcacctccagttccgcccgcagctccagcagttcctgcagctccagctctagctcctgttcccgtgtcagctcctgcatccgctctctccttcgcgcctgcatcagccgtcagggtcccctctagtggcaatggaggttggttaccagctactcccagtggcagtcgcgacctcagcagcagcagctccagtggctcagagccgggcagcggcgagacttatctgccaggctccaggagtcgctcagagggacctggtgacgagcaggaggacgccttcgactccaccgaccgcaggagccgttccgagcattaggctcattttccattagtttatcgactgtctagcatttgtttgttagtttgtgtgtttaggttgcttgcttgtgggtcagtcgacggtcgatatcatgtgcctatgatatgactgtcttaataaggattttttcttgctttttaagtgttttaattcagatcagaacaattgtagtttaaattcctatataataaagcttagttcttgagcatctgtttttcttcttttccccgtctgctcttcctccagatggtctacaccaggaatggtagccgtacaacaggcgagggcagcaacggcgaagagcgcactgatggtgtgcatcccaacagcgattccggcaatggtccgccaccacttcccgagaatccgacgctagcccaagtgatggcacatcagactcagatgatggcagccatgatgcagcagatgcagcagcagcaccagcagatgcaccagaggatgctgcaacacgccgaacagcagcaccagtagtttggtccccctccccctcagtccaagttgccagagtttctacgtgtcaggccacccactttctccagcaccaccaaccccatggaggcgaatgactggctccatgacatagagaagaaactgaatctcctgcagtgcaatgatcaggagaaggttgctttcgccacacaccagcttcaaggtcctgcgtcagcttggtgggacaatcacatggccacccgcccgccaggcactgaagtcacttgggcggagttctgtcgtagcttcaggaaggcgcaggtgccagacggggtcgtggcacaaaagaagagggaatttcgggcactccatcagggcaacaggactgtgacagagtatctccatgagttcaatcgcctcgcgcgatatgcaccagaggatgtccgcaccgacgccgagaagcagaaaaagttcatggcaggtctggatgacgagctgaccaaccaactgatatctggggactacgcggattttgaaaggctggtggacaaggcaatccgtcaggaggatcagcgaaacaaaatggataggaagagaaaggcggcacagttccggtccaaccaaggaaaccatcagcgaccgcgcttcgctcccgggcagcagggtggacctaccaccatgatcgtccgccagtaccgcccgttcaaccctagcaacttccaccagggcgccagtggcagtcagaaccaccatggaggtcagcccaaccgcggtgcagctccacgcctaccagtggcaccggcacagtcaggcccgtccgcgcaagccaagaaggagactggaacaaaaccagggtcctgcttcaactgtggcgagcttggccacttcgctgacaaatgcccaaagcccaggtgtgccgggccaaggtttgtccaggctcgtgtcagccacgcgtctgcagaggaggcgcaagcagcaccagaggtcgtactgggtacatttcctgttaactcaatccctgcaacagtactttttgattctggtgcaacgcattctttcatttcaaagaaatttgtggggatgcatgggttaaggaaagaagagcttaatacaccaatgagggttcataccccgggaaatagttcaacctcggtcagttttagcccttcagtgctaatagaaatccaaagatcaccatttctagccaacctcattcttcttgaatccaaagacctagatgtcattcttgggatggattggctgaccaagttcaagggagtcattaattgtgcgaatcgcatagtcaccttgaccaacgagaagggagaaaccgcagtgtacaaatcactagtctcaccaaagcaaggggtcgccttgaatcagatggaggcggaaatcccagtggtcaccgaggagaagaatccgaggaaattggaagagattcccatagtttgcgagtacccagaagtctttcccgaagacctcactaccatgccacccaagcgagagattgaattccgaattgatttggcaccgggaaccgcgccaatttacaagagaccgtacaggatggcggccaacgagctagcagaggtcaagaagcaagttgatgagcagctgcagaaagggtacattcgaccaagtacttcaccttggggtgctccggtcatttttgtggagaaaaaggataagacaaagaggatgtgcgttgattatcgcgcactcaatgaggtcacaatcaagaataaatatcctttaccgcggatcgatgatttgtttgatcaactgaagggagctaaggtgttctctaagatagacatgagatcaggctatcaccagttgagaattcgggaagaggatatttcaaagacggccttcaccactcggtacgggctatatgagtgcacggttatgtctttcggacttaccaacgcacccgcattcttcatgaatttaatgaacaaagtgttcatggaatttctggacaagtttgttgtggtattcatcgacgacatacttatctatccaaagtctgaagaagaacatgagcagcatctccatttggtactcgagaagttgaaggagcaccagttatacgccaagttcagcaagtgtgatttttggttgacggaagtcaaatttctgggccatgttattacagctcaagttcagcaagtgtgatttttggttgacggaagtcaaatttctgggccatgttatgtcgcaaccgagaaaaatacattttcccgaacgctagtgtattaatccccgtcccaggaaaagccggggtacaccacacaaacatgatataaaagacacatctttattatatcgataatatttacattattataaaggcacttaaggcctaacaatcaaaaataaacagcagcggactagcgggcctacggctccatcttcacaggcgctcaactggggtataagccaggactccacctaagacttcttctccaaagcttctcttactgaaggggggggtgaaagattgagcaagaatgagtacaaccacagtactcagcaagccacaccggcagatgcatgattaatgcaagggggtacaaggggtaataatataggggttaagttttgcagaaaacagcatttaaaagtcacttagttgcccaaagccattttataaagacgatcctagagttacacagtgttattaatcaaggccgtgaaccctcacgaacctgccttaacccaaggcctacgatgattcagaccgaactggcaacccgaccctgggtcccagctcgtcccaagccaacccaggccaaccattccacattttagttgttaagcaggttttaagaattaaaacactaacttgggtacattgctaggcttgcccataaccgagggcgcggctattcgaataggttatactctgatcagaggtgtacatctttacccacaagacacatcttcctcacgtgtaaccacgtgccacataccaccacggtatacggacggaagacgtgacatagttcccaacccatcctagccataaacaagagtaccaacccaaccccacctacggccggaacctccgggacaggcaggcaggattgagcccctagcagcaggacaccagccctgtgccatgacatctcgactaccgggccacagctcgtgtagccttcatttgtcctagagatgtccatcgacccccgacttcgtccatcttcatccgtgtacttttgtttataaccagactgagccacaaactaagccttacccactagacatgtggaagtacggtagtgctttgcaacagaggcccgagcttaatccttatagtacccgaggtacgactaacaaaacccaaccacgcacctcgagcccagcctaaaaccattttgggggttttgaatagagggggagatgtgtgtccaattccaacataagccaaacattccatagtgtccaaatgatatgagaattcccaaagtctaaagttataaaaccacctaatgttgcctaattaatcagcgaagcatctacctaaattcatactagtggaaccatgaatagagtacccactagttggggtgttttttatcctagggtgaacaaggtaataataacaatagcaataataataaggtcataacaaaggtaaataggcatggctaaataaaacagtgataacgcaggaatttaaataaagcgataatgcattaatttaaatcaaaataattttataaactgggattcaatatgctcaaggatgatgtgacttgccttgctcagagagaacggccttccgaaccttcggcgacgaccgcgaaccacgcttcgggaacctctggaacgacagaagctacgcgaagcacacaagcaaagctacaagcctataaagaagcaataacaatacataaaaacaaagcacagggttctttaggttataacaaacattaggagacttgaacggatcgattcggagctcgtatgaccaagacatggtcatccgaagtttaatgctgttatatggagatttgcggattattataattaggttttgcaactataaaacatgtgtaagcgctagcctggaaaagacaggaaggctgcgctgttgacatgcggaccccacatgtcaacctaagggaccacggcagaccgggtacacagagacggtccacgggtcgatggaagcggatcccgtgtgtcaaccgaggcgagtggccgataaacggactccactagacaccgcgcgggctgcacacgtggaaaccacgtggctaccgagcgtgcacactaacacggtcaccacacgcacaagcgaacgactaccgacaccggtacacgggtaccggggtcga

SEQ ID NO: 23596 - DNA, 16462 bp, Oryza sativa
cgatgaccggggccggcgaggaggcgacgagggacagctagcagcagctgcacggagacgaggacggcgtggaacacgccgctgcgaatccgacaacggaggcggcgcagcgagacgacgagccggcgaggaggaacgaccgaccggaggagtcgtcgacgaggacgaacggagacgacgataacgaacactggcggggttcggatggaggggaggcgaggccgagggcgaccttgccgctgcgatgccggaggtggagacggcgacgtcggccggcgcactggcacggcggacggggctgccggaggaactccggtgaggcggagggcgagaccgacgcgggcgacggcgttccggtgaaaccgagggcaggccggggtggaggtcgacgcggcgacgccgagggaggagacggcgcagccggcccgcacctgagcggcgcggcaggggcggctggaggcagtacagtggcggcaacgccactgttttgccggcgaggacacgtctccggtgatttccccgcgaaacggagggctgaccgggggagagaaggcggctgcgaggccgagggcggcgacggcgcgaccggacggcgctcgggcgaggagggagaggcggctggaggccggctggcgccggagagagagaaggagaaggcggggagaggtgatacgaccacggggaggctcgggaaggggctaaaacgatagaacgaaggatggggattccattttataggcgtggggagggatccggccacgggaggagccgggaacggcggcggaaaagccggccggcggccatggaaggtggccggagttggcgcgtccgttcccggcgattgggggcgccattcaagggggaattaagggggaaagagagaggagggaaaggggattaattccccctaataaattttggaattcccggtttgaatcacgtggattttggggaggtttggcgctaggtttccggggagagagagagcaggccgtgcgggaggaggaagacgaccgcacgtgctgcgcgcgtgcgaggagcggctcggcgtgggccaggtggctgggtggcgcggcttgggccgggcgggaaggagggaggggaggggcggcccagaaggaggaggagaggagggagtgggccgggaggggaagaggaggcccaagagaaggagagggagagaaagagagggaggagagagggacttcggccgcgggccgagagggagaggggagaaaccttgggccagacttggcccaaagggaaggagagggttatttttaggtttttctttttaataaactctgataattgttgttgttgtttaataaatatttttggtgctctgaaaattcaagtaaaatttgagggctccttttagaccaaggataatttaacaaaaattctccggaccacattcaaatttttctggcacgtattttagtgtttgtcaatttcttttcgaattttaattaattctattattccttttagaaaatgatttttattttgggatgaatttatcaggacgtgacatgttattacagctcagggtgtggcagttgatccatcgaacgtggagtcagttaccaaatggaccccaccgaagaccgtgtcacagattcgaagttttcttggacttgtaggttattaccgccgattcatcgaaaacttctccaggatcgcccgacccatgactcaattgcttaagaaagatgagaagtttaaatggacagctgagtgcgacaagagttttgaggagctcaaaaagaaattagtatccgcaccagttttgattctgcccgaccagatgaaagacttccaagtctattgcgatgcatcccgccacggacttggatgtgtcctaatgcaagagggcagagtggttgcgtatgcctcgcgacagttgcgtccacacgaagggaattatccaactcatgacctggaattggcagcagtggttcatgctttgaagatccggaggcactatctgattggcaaccgctgcgaagtatatatggaccataagagtctgaaatacatcttcacccaaccggacctaaatctccgacaacgaagatggttggaattaatcaaagactatgatatgagcattcactaccacccggagaaagccaatgtggtagcagacgcattaagcaggaagagttactgcactgccctaggcatcgagggcatgtgtgaggaattgcggcaggagcttgagcgtctcaacgtgggaattgttgaacacggattcgtagccgctctggaagcacggcctacgctcgcggatcaagtcagagcggctcaagtaaatgatcctgaaatagcagagctgaaaaagaatatgagagtcagaaaagcccgggattttcatgaagatgaacacggcacaatttggttgggagaaagattgtgtgtacctgacgacaaggaactgaaagatctgatactcaccgaggctcatcagactcagtactccattcatccaggcagcaccaaaatgtatcaagacctcaaagaaaagttttggtgggtcagcatgaggagagaaatagctgaattcgtcgcactctgcgatgtttgccaacgagtgaaggcagagcaccaaagaccagtaggtttactccaacctcttcaaatcccggaatggaaatgggaggagattggaatggactttataacaggactgccccggacatcatcgggtcacgattcaatctctgtcgtgaatgttaccccaacggtgctcaagagagtttgcattcctatcagactctgtcgaggagtgatcctctctagcgggaggttgtgagacccccctttgtgagttcggccgggggataaggcgcgatgatcaagagtgtatctccgccagggatctggctaacgagattgctcacaagcgagtgagagacaagggattatacaggttcgggccgctaggaagcgtaataccctactcctgtgtgtggaattaagcttgtgctgttataagggagttctaaccctaggctcaagcttctcaagtggcgtccctcctttcggtgggcaaggtcctccttttatagttcaaggggataccacatgcaccgtcttacacagttcatcattggatgggggcccacatgtcctgggtcgagctgtcgtccatgccttcgtctggaagcaaggcggtcgtttgcccccaggtggatcccaacgccgtcctccggctgacacgggggacatccctgtcattccctcttaattccatggagacttttgtggactcatgtacggggaggcacgctcggctacatgccgatgggacggggcatacccgcccccactccgcctgacagagggcagaacgtgggtgcgctaccacccgtcccatacgcctgtgaccggtcacagaccggtcaagctcgattgacgcacgtcaatcgagcggcgcctcacgtccgcccacgccacattaactttggcgggggacaattggggcgctactcatttaaggcgcttggcagcgcctctccctccgcccactcgaccgccacgtggcagccgagcgagcgcctcggggcagcgtgctccaagggcctgaggggtgcgacagggcaccccgaggtcccttggccgcttcatgaccgctcgttctcccccgaggtggggaggggggagggacaggccgcgcggccacgtggccagacgggaagatcctttccctctatcttgcgtacccccgggcccatattaccgacagactcataatcacggttagcatggcagtgctctgtgatcctcttcaaatatgccttccctggttgctcattgccaataataggatctgagctaatgctctgccatgaaatgcacaattgaatgtcctccttacaagtatagttgcttgattttttagtacttccttttgcaccatttgttgaagtacgaaggtctacatttggcattggcacttcgacatcagtgtcctcgaacatcatgtgcacaaagggatcacctctacttgtcattgcaatctagtcactgcaataaatatataaattgacaacctttccaatcgatctcagaaacatcaacaaatgattgtaatgtacattaggttatactgtttataacatgtatttgtttagcatatatattggttctacattactaaggactcagtacaaacacaaatttctctcttcaatattatatatgctctgcaagattagctctctgacatagaaaatgcaataaaaaaaagctataagacaccgcatataaaacatgaatgatagacaatgttttgccgtgcgaatgattttgatgggcctaggcacctagtaagtcttagattcagtttcaatcaaaatttcaatagctacaagacactgcatataaaacacaaaacatgtgcatacttttgtaaacacaaattctttgttcaaagtttgcactctttctattaaccaaaatttaagtccatacttgatttgcatattgctcaaacaaatatgaaaacaaggtacatcgatttgcactattgaattcctattaactatgctatagcttatattcagaatttagatggattgcaagaaacagtgatattgtccttaaagttgtaaaaatcattcagatttccaagttcagataacgcaaactgagcaggctatattatgttaatcacaatcaataaatgaactgtacttcatttgataattaccagtaataatttccaagtacagtgatgaagaacaaaatgataattaccagtgataatttccgcgactgagccctcaggactagggactcgagaagatgatttgggtgccttcctatgttggccctttagtagggcatctcagtttttcgcctcaactctcaaaaatcatttgatgctcttaaggatgtaaaaattacccgcgcgacgaataaatgcagcacgcgttggtgcaaacgtggatctcgagaatccggacatacccgaggtatttatgaatccaggaatctgctattccagtgttaagtcttgcatccctgatgtattcgaagtccatgaatacgcatttgtagtgtctaaatcgatcttgtgcatgaatataagtttctcattcatttaattttttttactgacctcacctccaaacatatttaattttggtcaattacagcaagtatttaaacgtaagccccaatagtactatgtagaattaatttgttaagataatgttaacttttgaaaacactaaatgtagtcgattggatgccaaatgaataaaacaaatagttatactcccttcggttttaatagatgataccattgatttttaatacatgtttgagcatttaccttgtcaaaaaatttgtgtaagtatgaaaaacatgaaacttctgattaaagtacatttaatggtaaaccaaaccacaataaaataaatggtagattttcttttgaatgagactaatggtcaaacatatttcaaaatgttaatggcaccatctattaaaaactgaagagagtattatattggggctagtgtattatggaaaatgtattagtgtagttatatttttatttatgaatagatggtgtagataaaattagaggtagcaactatctctactagtattaaatatgcttttgtgattctgccatgggcatgaaagtagataaaaaaaaccttttagggtgctttttttagataatagaatgaagcattccggcctttactcaagaggtagcttatctaaagtggatctggaagagtagctgtactatgaaagtaaaagtttttggctagcttctgctcattgatagattgaatactcgtgatatgcttgacagaaaattttgtaccccggaaggaagtgatttaacatgtgttttatgctcgacaggggaaagagagactcttcatcatcttttcttttcctgttcattcagtactgaatgttgggctcaatttggcattgtttggaatctctccctgtcttttgaaaatatgttgacacatgctaagaattcctatcaatcctcacacttcctggagaaggttctttatgtagcatggaatatttggaagcaacgcaatagtttcatttttttataatgttcaaccctctgtagcttcctggatgacattcttcaagaatgatctatcccttcttgtttatcatttaagattagatgagatatcagctttctgttcctggataaatcacttgtattttctgtatatattttccttaataaaattatttaactgtgggggcttcccctacagtgctttcctaaaaaaggcttgttgagatcgttgcataaatctatcatatcgatatttgttaatgctaaattttggtgctacaaagttctaacagggttggatgtatttggtttgaaaccttaacaaatgttggtagtgtttttaagagctttacccggatggacacacgacggatggcgccgggtcggtgtgggagtagctggtggagtatcctgtgatcagcgccgtgattgtacaatatatgcatattgtaccggaccgggtcctatacatactacttcctttcctttcatagttgagttatttttaaacagagaatacgtacacatgctagaattgaataatccactcgaaatcctttgacccccgaaagaaataccaataattattacttaaaagtaaacttgttttagaataacaagataaaaaatgattatccttgcaaaaagaaatagttacatatctcaggtcatctacaatagtcatattcgtcgctgaaacgacaattaattaattaactaatagtaggaataagcaagggatcaaggtcatgttccttttcatcgatgcataagcacttgtctccgtacctgaagtggataatcatttttggtaaaatttgctacaggacatccaaaaaagtgtaattagcttgaggatatcgtaaaaacgtgtatttgctttagggcatcgaaaaaattagtaattggctgctggacacccacgacattattttattatttttttaaggattaggaaagagaaacaatgattaaagacaagattgcccctttggctcaaatgactctgggccccacatgtaaccctctctctctccttctttctagacgggccaggtggcagagcagcgatccgcggccgcggcgctggccgcgttcgccgggtggggggttggggtgggtacgtgcagcctctttcccctccgacattggcggcggcggcgacaacgacgacgacggcgacgggagcgggtaggtgtagtagaggaccatggccgagttccggcagcgcggccaggtcccggaggatatggacaagtccatcggcaccgtcctctcctacatccacttcgccatccccgatgtgccggtctccggcccgcctctccgcgctcttgcccgacgacggcgtcgaccgcctcagcctcctccccgacgtgctctccgccggatcgtctcctgcctccccgtcaaggacgccgcacgcactgccgcgctctccacccgctggcgcaaggtttggcgctccacctcgctcgtccttgtcgacgccgaacaccttcccgtcggcatgtccgactccgatacctgcgccgcgcgcgaggatgcccacgccgtcacctcacctccagcttcatggaccagtaccagggcctgctcgtgagctcgttccaggtcctcgccgtcaagggcatccaggagctcatcctcgtcaatcgcccgttcccacccgttcctggctccaggtccacgtcccagctccgctctggccgccgcgtccggtacagcttcgtcccgcctctcgaaccggcacttctcgacggcgcgctcgactactccatggacggcgctcggggacgaagagaagaaagaagaaagagcaaagagagaagagagaaagaatgagggaagcataaggaagaataaagaaaaagaaaaaaaattcgaagggtagaatagtagtttctctctccaattccatcagatataataaaataatcctgcgggtgtcccgtacttaattagcagttttttggtgccctataacatacacgcgtttttacggtgtcccctaactaattacatgtttttttttatatcttgtagcaaattttaccttataataaacacacatgtcatccgcacgcctgacctttcatcagcaatactttcctcaggagaagggtgcaccgtgagatagatcgctatgctcaaattgattaccatcatggtgaacatgcagacctgcacacagtacatatatataatcaatcacaatattgaacgtagtctcagtcgatgcatatttatatagagaggtagactacctctgttttctgttgatttttaaaataatctttaaccatgcatattattaaaaaatattaatatgttaaatataagtcctacttaaattctttttaatgataaaacatgtcacaataaaataaataacatttatgtatattttaaaaggatgaatggtcaaatattatgtaaaaattcaactacgtcttctactaaaaattgagagtattaatttgattatgaagtaaattacacttgtggtttataaacttgtgagttgagtgtaatttaatacataaagttttaaatcgcttatttcggtgtataaacttatctagtgtgtgcaaatcaaagccaaaaaaacatgtcgtaactaattttactaagttgaacattgactaagatgttatgttagctgacatgtcaagatgatattatctaaatatgcatatgtttaattaaacataaaataagtaatgtcaattatacatatttttaatacatataaagggagtatgcaatggataaaaaataatataagaacaaaataactatgcatggaatgtataaaggttaattatttgcacataatatatatatatatatatatatatatatatatatatatatgtacatatatatatatgtatgtatatatatatatatatgtatatgatgcctcttgtgtgtgcgtgacattttataacgagactaactcaacatcatttggattagtttgcactccctacacaaatttatgtaacgagtattttacaaatttgtatactaatttgcactcacctaaaaagtttatatatcactaatgtaatttactcttgatcattgtataatcatagagaaaaaaaagtgtctgcgttcataaagagttcatggtatatagggaaaaaaatgatggcatgtgtatatacctgaaatacgaaaaggagggtgcgattattggtggcctcgtcccttggaggaggccgaggtcgtcgtcgttggactgctgccccgtgaaacgccggcggcgggagcggcaggatgcgaggagggacgagggccggctgcgctcgcggcggcggcggcggcggcggagcgaggtcgtcgacgacgtggatgatgaactcaggcgggtggtcgtcggaatccatggccaccaccgtgccagagcaaaaaggacgtaagatgaatagatagattataccagcacacgattaaaaagggataattataatctagtatacgtacgtgaatcctaataggatcagtagaaagagaaattcggaaaaaaaaatatcgaaagcgattcggaatccctttcgattaatactacagtaatgaacccactagcaaaaatattggtgaattaaaattaaccgcaaaagaaattagctatacgccaagctatttcctggaaataaatgaagagatccatattgcttcgcggttgggagggccaaaaatgacatgttaccttgatggtgtagatcatattaagttggtggttttatgatttcttagagctatgaaaagctaataacgaccgtaattttcttatcggacggactgctaaaaaaattcggtgttaaccgtcaatgaaaaggaatttccctcccgcgcacgcagaaaacagagcgacacattttcttatgattaattaagtatttaatttatttaaaaatggattaatatgatttttaaaagtaacttttgtatagaatttttttaaaaaaacacaccgtttaaccgtttgaaaaacgtgcgcgcgaaaaacgagaaatgtgagttggaaaagcatggagaaaaacacactcgtatagtagctggtggcgtctcctgtgattaataggcatatgtacattacagatatgcacgttcgtttgctcacgaccacgatagttacgtgccgtggtgacgtagtattgtaccggggcgggtcctatacatactactctttcctttaattgagttattttataacaaagagaatacatgcacatattagaattgaataatccactcaaaatcctttggcgccggaaccccggagcagtggcggatctaggaagggatagcaggggttctaaataaactagacaaagccacatacgatctttccatctacatgtagcaaaaaattttagcaagagttttgtgggggctcccatagtattcatgccagtagtgaggcctcgagaccccgctgcccctatgctagattcgcctctgctcggaaaaaaatgccagattgcttaaaaataaacttgttttgaataagaagataattgcacaaagaaatagtgacatatatctttaggtcatttacgatagtcatcttctaaaacaacaattaattaagagatttgctccggtccaataaaaatacctcgaggtaccggtacctcacggtattaaatcatttcttatcgttagatctaacaatacgcattctgtccaactagattcaacgatcggaaatgatttgacaccatgaggtatcggtaccccgaagtatttttattagaccagagcaaatctcttacagcataataataagcaaattattaagaggcaaagggtgctgatgagcttgtgtatgggcttcagggcccatcagcgactgccgtgccacctatcttgtgtgtttgatcgtagtaatatcgtacgtgaaaatcgtacgtgaagcattttcctttccgattatcagacggtgatcataaacgagcttaattatgagggcaagactaattaagtttttaatgttggacggttgcaaaatagatttttagaaacaaaattttctttaaaaagttttccaaaaaatcgctctgttcagttgagaaacgtgtccgtgataattcagaggagtggctaatccaactttcacttaagaacagtaccaaaagaatatccaagtttcagtggattccacatggatgcttggagtcactggatgacacaagaatcattcctttgaactttggcatatcatgatttgttttttgggagggttggcatatcatgattgatctgatggaccaacaaaaccaggattacagttaatcttccaggaacactgtactgtagtaagtagcaaccccttaattactcccttctcttgatcttgggtgattggtctcctctcaaatggccgagacagaaccaacataattttaccttcttcaaaatttgctcgagctacagcaattttactaggatttgtctgatcatatgaaggccaaagcctctgctcgccactgctcctctgtttatataaatatttcttttgcatgcatgacgcctacaagctacgcaaatcattttagtggctctcaatgcatcttctcgggcagttctttgccttgtttttttcctctgcgtttaatatattttttttgtcttctactcaactttaagttgttaataactagtttttcatatatgtgtccctatcaaagaaagcaatggctaggccctatcttaaaaaaaaaaacaatggttggttggattgtgctccggggtccctggaatatgcccaagaaaacagctgggtatcaaaagcagctggtctgattgctactataatattgatttattgaagctcaagtctgtgaaaaaaataatttattcaggagaattagtactttttcgtgaaaacggcctccagaaaattgaccattttaatttgcctcctgccggagtaaccaaaatgggaacttatcatgtacacaagtttcgggtacactcatcgtctacatcacctaacaagtatcgttgaaaaatctagaaaaactatatatatgatttcagtagtatttcacctatgtgtaaaaacgtcattttcgaagtcatcattcatagagaaaaatacaaaattctgagatttatacacataaaactgccggatattttttttatttttttgttaaagctaaaaaaaatatattattttaaaaagataggtgtaacactatactgaaagttgaaagtacatacacaattgttttagagtattcggtggcattattagcaagtactatttaattaccgataaatattccatagctcgaggaaatatataatacaaacctagaactaccatatgataaaaatagataattgagattcatccacgtcacctcaagtaaaattttactcggagtaatgttgacgagtttcaaatgtctattttcatttttcaatcaaacggtagttttttatttttcgatcatacggtagtttttaagttcgcactagatagataagtccccttttaaaacgcaagattattaaaaaaaaacgtcacggcgcttgctcttgaggcactcacatgtaaggccggtcacgtatgcatgcccatcttccatgttgactcttacatttaatccacgtcagcagacggatataagcacagtagaaggcaaattaattaacatttagtttggccataggttaatgaacattgtgcaaatggcaggcctgtctctttctcttaatcttgtggcgttcgtcgacgcatggtatagctagctactccctccgttttaccatgtaagttattttagcattttctatattcattaacattaatataaatatcggaaatgttagaatgatttacattgtaaaacggaggaagtaatagcgaacgtacaccaatcaaagacatttaaactaatttggatcatcactattttttaaagaatgctagttaatttaatttggagaattggagatgtcattgcgccaaaattaaaatatactatatatatatatatatatatatatgccgtatacatatattcaacgttcataactaagcccggtctttcttgtggtataatccaagcaaagtcgtcgtccctgcatgcgcatggacgcacaaacgtacgtatacgtgtttgaccgcttgattgatactacagttgtattgtgcacgagagttctcgcagactttttatgaacatgactttttctgtaattaattaatgttgtatgtactctcaggcacagtcaaactttacaagctattaaacacatgattttttttatatgctccctccgttctataaaaaactaacttctaactttaaatttagaagtaacctatgttcaggcggataattagaagttgattttttttctgggatagaggggtacatttttagaatcgagataggttaaatttagcaaaatctcaaacgggtttgaatagctagagatctagtagtgaaaaagctgaatacctctgaactattgcaaacggattcagaaatcagacattcgacgtcctccaatttaattttcatgccgcatccccctccaatttttccaattacctctaaagttgcatcctttaaaaaccatgacaacgtccacatcaacatcatccgtcttagaaataaataatttatagagatttgaatctggacatttctgggacggagagggagtatctgtgatgtctcgcagctacatttctagtctcgtgtacttacatcgttattactttgaagtaattggcatgcaatgacaagctagaaagctactctgatccatgcataagatgcgattagactccatatatacagtctggccatgtgcactaattaactaacttgatttggatcgacgaccctgaaatggagctctctactgacccaggaaatccattaaccaagacctgaaaaactgaaaccaaagctaaaccacacacacatatgcatatgcacccagctcttggttgtgttaattagtaattacgatatgattggtctatgtacctatactaaactattggaggtcgctgtaattaacacgtgtttagctaaaaataacccttggcatcttcctctgtttcttgttggattctgtcatggtctcatggccagtctggccattcaggatgcagattcagatttaggatgactttgatcagttcaagagagatagataaaatgatttaggacaactcaaatgacaaaggagaaacttatccgatcctcaaatgtccttccatatgcaacctggactattcgagggatgtcatagctagaagataatcaaattaaatcagaatcagcacacttagtttcttgtgaggttacctggaacacacatggtctttccagacttaatttgttatcaaattaatctttactagcatatagtagtcaccaaaataaaactttaacgactaataattttcattgctacacataccataaaatatagtcaatcctatattcctagtagtaaataaataaaacattgtaatatcaagtactatgtccatccgaaaaagatcacttctataaacaaccatttgtctagattcatgtaaaaaaaaaattagagagagaggtactagtagttttcgtgtaaaaaatatagtaaatttcacaaaactacaagtattttacataatttatcataaaactgtagatttagtgtctccgtttatcacaaaattataggtactttgtacaatctatcataaaactatagatttaataacttatttcataaaactatatatttagtgtattcgtttatcagaactacatatttagtgtcttcatttatcacaaaactataggtttagtgtcttcattatcacaaaactataaattttgtcttcctgtagttttgtgatacaaaacctgtagtttgtgataatgaagatactaaacatgtagttttgtgataaatgatgatattaaatatatagttttgtgatatattgagcaaagcatctgtagttttgtgatgaatgaagactctgaatctgtagttttgtgaaataagttcttaaatctatagatttgtgatagattgtgtaaagtatacgtagttttataaaatttactcgaaaaattaattttttttctaacggagtagattttcatagagaactataggtagagcatatgtgagggaaagtatggagtgcaagaaatatactatatagtattctttattagaggagtgcaagaaatgcaaaaaatattttcgagagggaagtgaaataaatgttatttatttactacttgatattacaatgcaagaaatatactatacaaaaatgtatgcacatttttgtgtcttctagccgggcacgtgaggcccatcgttcacaaaaccgcaaatacaactactcccgagtatgttttcgcaaaaatgatgcaacgcaccaataatagcattccacgtggcacatcaacctccttttccctaccatttttttcagtttccgtttcccttttgaggacacgtacttcgcttgctcgcttctctctcctccggaaactcccctcacctcaccctctctctcctagtctagagagagaaaaacacacacgaggcacgcacgcgagcgagcgagaggagagagagagagaacgagaggcgggtggagagcttggaggcggttcgtcccttgcgctcgcggagcatattccccgcccggatcccctcccccccgcgagcatatacgtgccacagagagagagagggagggagagatggcgtaggacagcatgtgttcttgacgagagttcttcttggctgggtccaatcccaaggtgagtggtggatggattgtttgttgattcttgtttgagagtgaggatgattggaattgtttctaggggggtgattgtaggattggggttagggtggtggcagatccgttttgtttggttggatttttgctgcgtttggtcggtggaatggcggtttggactgtttggttgatccgatttgtgcggtattttgaggattaatttatttatggttggaaatgtgtgtttttcccgtccttgtttgtgcctgcttcatgattgattggttgcccctgttgcagattgatactaggtgttattcttaatcatgaattactattgtttatcagagcttctaaaatttctatggggtgagtggtttgatgaaaaggatttgggggagacgtctgataattcacaatttttatgaacaatagttggattcatttgtagtcgcacatatgaacaagggtgggtgcaagagaaaaatgtcagtgtcaatggaacttctatttctctatcaaagtttggtacatatttcatagttttgtttgggtaggtcaatttttggatt

SEQ ID NO: 23597 - DNA, 10637 bp, Oryza sativa
ctgtcgccgctgctcaagctcaagcacaagctcaggttgccgaaccacctcccctcgccgttcgccagcctcagccggcgatccagggacagccgccaaggcaaggccaagcccccatgacctggaggaagttcagaaccgaccgtgcgagcaaagctgtgatggctgtcgaagaggtgcaagccctccgcaaggagttcgacgcccagcaagcaagcaaccatcagcagccagtccgcaagaaggtccgaaaagacctctactgcgccttccacggacgctctttgcacaccatggagcaatgccgaaacattaggcaacgtggcaacgtgcaagatccaaggccacagcagggagcaactgtcgaagcacctcgtgaagcatttcaggagcaaacgcccctagccgaacaacgccaagacgcacagcgaagggtaatccaagtgattacaagggctgacccgccaagccagttgtccaaacgacagaagaagatgcagatccgaatggtccacagcatcacttcggcgggtgaaggggcgccgcaatacctgaaccagctaatttattttgggccggaagacgcagaaggagttatgttcccacatcaagatcctctggtgatctcagccgagatagctggcttcgaagtccgacgaatcctggtcgacggagggagttcggccgacgttatcttcgccgaagcatatgccaagatggggttgaccagccaagcccttaccccagcaccagcatcgctccgcggtttcggcggagaagcagttcaagttcttggccaagcactcttgttgatagcttttggctcgggggagaacagacgcgaagagcaagtactgttcgacgtcgtcgacatcccgtacaactacaacaccatcttcggccgtgcaaccctgaacatgttcgaagtcatttcccaccacaattatctcgagctcaagatgcccggcccgacaggagtgatagtggtcaaggggcttcagccttcagccgcttcaaaaggcgatctagccataatcaacagagcagtgcacaatgttgaggtcaaactgcatgaccggccgaagcacgcgcccaaacccacccctcacggcaagataataaaggtgcagattgatgatgccgtccccacaaagctcgtatcgctggggggcgacatgggcaaagaggaagttgagagcatcctaaaggtgcccaagaagaacattgatatcttcgcctggagccccgacgaggtgggaggtgtttcgatagttctcatcatgcatcatctggcagtcaagccggaggccaagccaagaaaacagaagttgcgcaagatgtccgccgatcgccaagaagcggcgaaagccgaagtccaaaaactgctcagggctggggttattcaagagatagaccatccggagtggctggcgaatccagtgctagtgcagaagtcaaacggcaaatggcgcatgtgtgtcgatttcacggacctaaacaaagcgtgtccgaaagacgatttccctttgccgcggatcgaccagctcgtggattcaacagctggatgcgagctcatgagtttcctgaatgcatattccggctaccaccagatccacatgaacccgctcgatatccccaaaacatccttcatcactccattcgacacattttgtcacctcaggatgcctttcggcctaaggaatgcaggagcaaccttcgccaggctagtgtacaaggtcctttgcaagcagttggggcggaatgtggaagcttatgtcgacgacattgtcgtaaaaatccgcaaggctttcgaccatgcgatcgacctgcaggagacattcgacaacttgcgcgcagcaggcataaaactgaatccggagaagtgcgttttcggcgttcgcgcaggcaagttgttgggcttccttgtttccgaaagaggcatcgaggcgaatcccgagaaaatcgatgccatccagcaaatgaagcctccgtcaagcgtacatgaagtacaaaagcttgcgggccgaatcgtggcactcagtcgattcctctcaagggcagccgaaagaggtttgcccttcttcaagaccctccggggcgcgggaaagtttaattggacaccagagtgccaagtagcgttcgatgagctaaagcaatacctgcaaagcccgccagctctgttaagcccacccccaggaagcgaactgctactatacttagcagcttcgccggtggcagtcagtgctgccctcgtccaagaaacaaagttcggacagaaaccggtctacttcgtctccgaagcactgcaaggagcgaagacaagatacattgaaatggaaaaactcgcttatgccctggtgatggcttcgcgcaagcttaagcactacttccaggcccacaaagtcatagtgccatcgcagtaccctttgggcgagatactcctaggcaaggaagtctctggccggctcagcaagtgggcggcagagctatccccgttcgacttgcattttgttgcacgcactgctatcaagtctcaagtgttagctgacttcgtagctgaatggacaccggtattggcctccgagcccgagcccgccgaacaattctaggtgatgtgctccgacggttcgtggtcgcacaggggagcaggcattgcggtagtcctcttttcgccgaatggtgtgccgattcggtacgctgcaaggctgtagttcgacacaacaaacaacgcagcagaatacgaagccattctcctgggcctaagaaaggcgaaagcacttggattccggcgcttgctaattcgaaccgactccaagttggtggcaggccatgttgacaaatccttcgaggcaaaagaagaagggatgaagaggtatctggaggccgttcggtccatggaaaaatgcttcaccggcataacggtcgaacacttacctagaggccagaacgaagaagcagacaccttggcgaaatccgctgcttatggtggcccacattcgcctggcatctttttcgaagtcctgcatgctccaagtgtgcccacggacagctcggagatcatggcaatcgaccaggtgaaactgggcgaagacccatatgactggcgaaccccgtttgtgaaacaccttgaaactggctggcttccggaagacgaagcagaagcaaagcgtttgcaactcagagccacgaagtataagatggtctcaggccagctttatcgctccggggtacttcaacccttacttcgttacatctcttttgccgaaggcgaggaaatggcaaaggagatacaccaggggctatgtggcgcacaccaggccgcaagaacagtggcctccaaagtgtttagacaagaagtttattggcccactgtgttgaaagtctgtgttgagcaaatcaagaagtgcgaaagttgccagcatcatggccgaagccaaaccgcaccccagtatgatctgcagcccattgcgccaatatggcccttcgccagatggggactagacatcatcgggccgttcccggtggcgcgaaatgggtataagttcgtaattgtggctgtggaatatttctctcgatggattgaagccgaacccctcggggcaattacttcggcagcagtacagaagtttgtatggaaaaacattgtttgccgttttggagtgccaaaagagttcatcactgacaacggcaagcagtttgactctaataagttcagagaaatgtgcgaagggcttaacctggaaatcaagttcgtgtcagtcgcgcacccgcagtcaaatggggcggccgaacgtacaaatggcaagatcctagaagcactaaagaaaaggctcgaggggccagcgaaaggcaaatggccagaggaaatgctatcggttctttgggcccttcggacgaaccccacaagaccaaccaagtttagcccgttcatgcttctttatggcgatgaggcaatgaccccagcagagctagggactaactcaccaagggtgatgttctctgggggcgaagaggggcgcgaagtatcgctcgaactcttggaaggggtaagagtcgaagcacttgagcacatgcacaagtatgccacaagcacttcggcaacttacaacaaaaaagttcgaccgacggagctgatgcctggtcatcttgtcctaaggaagaaagcgaacccgattgctgttggcaagcttgaatcaaagtgggaaggaccatacctcatcaagcacaagtccaggacgggatcttttcgattggcgacactagaaggtgacgagttcgaccattcctggaacgccgcctctctcgagcgcttctatgtctagaatgggtggcacccaaatcgccaacttgtaaaaatgtacatatcagccctttggcattatgcaagcccttcggcactatgtaagcctttcggcaagaaaaaaaaggaaaaaaaagaaaaagagaaaagaaactggatgtagggctattatccaccacagaggcccgaaccagtataaaacctctgtgtcctccgccttctttttatttttgtgtgattgataatttgtggaaaaaccccaaggcaaacgcctgatcagcgaaaaaggccaggggggaaaaaccccaagggttcgcctacccaccagtaatacagcgccacgtgtcgcaagggtaggcgaaatggtaaattcccaccaaccgagcagcacagtaaaaaaaaaaggcccatgaagggaaagcccaatactgtttctttcaacccgagaaaagtaaaaatatatatatatgtatatgccaccggccgcaggaggcgaagagcggcaaaataataccagtcgcacaaataacaaaccttattcgcaggaacaatgtaggtttcggcaggagcatcggtcgaaagggggcgccgcataccataccacatggtttgcacggtctcggccgaagctccaatctcaccctttcccgtgaggggcttgttggcggatagcatgaggcccttcgaccaaatctgccgaaacccgtggcgaagactatagagcaagaacggtgagaggcgaggggtcgtgcgagtaccttgtcaagccagaggtgtcccaggcgaagggtgcaaggcgaagagtatctgccgaaggaagacggcttcgccatggcaagttcgcccctgcgagggctgaagaagcctttccggcccatcaagcctaggggctatagggtcggcgatcgcccgacggcccatcaggggcccatgagcctccgtaacattatgtacccctgtaaattttcctttcgtaagggcaactatgtaaattcccccgtataacctaaaccctagtagtaagaatctgtaatagggctataaatagtccccctagggccatgtaatggggggatccaagtgaaaaattctaaatttaatacacttcgtttctttccaaccactgttgagtaaccacgtctttcgacgtatgcggttgtcgtttcgacaatacttactttcttaataaccgtgtccaactttaaaaatgcttatattctaggacagaggaactagttagtatatagactcacatcgaattgtatagggtgagatataaccaactaaaaaccgacttaaatacgaatgacgtacgaaaattctaaccaaaatatctttattttttataatactagaaaaaatacccgtgcgttgcaacgggtaaaaacatttttggattgctatacattatactctttgattttgggtcaaaaactcattttcttccttccttttcagtctcggtccagcccgctacctccctcctgcttgactgtttctcttttgacctagcccacaagtagaactataggcctagctcacatagtcggctgccatctgcttctctttgacctagcccacaagtagaactataacctagctcgcatagtcgactgtcatcttcaacctccgaaagacagtcccgtgtagtacgatgccagaaccgatactcccatcaaattcagtcgaatctttcgattgagggcttttgattcactcaatctccttatgtcgtttttatcaaaattggagtgaatccacaaaactgtgggatataaacagtgacttctaaataaagatggaatctggtgaattaaagcggaactgaaaagaaaaaaaatggggaaaatgatgatgtagtagagggcatttttttacaatcaaatagaggaggaaaagcactaggagattgatcaatgtggcggtggtgctaaggttcggcccgacgaaaaaaaacgagtagataaaaaagaatcctcaccatatacgcacacccttccgcataaaaaaaatatgaataaaaaatagagacgaaaagaaaatggatgaataaaagggaaaaaggcgatggcaaaataaccggaaagaacagtggataaaaaatacggatggaaaaaaaaaagacgaaaaaaaagaaaagcgaaaaaaaggaaaaaaggcagataaagagacgaactgataccaatccgtttttccacatgattttctttacagtcggtgattttttttaacggtcagcctttttttttacccaaaattttttgctatttttttatccggtaccaatcggacttcttatttcctctgtttttctttcgcgttttttatggtgtgttttcttttccgcgtgcccttttttatgttacggattttgaggagtagagattaaaaccgaaaaaaaaaactaaaaccgactcaaacacggatgatttatgaaagtaccgacaaaaacatctttaatttttataattgtagagatcagaggtaattcctccgtttcacagtataagactttctagtattgctcgtattcatatagatgttaataatctaaacactatatatatctagattcattaatatcttatataaatctaggcaatgccagaaagtcttacattatggagtatattatatctcattagtagagtgatcgagatcaatggatcaactgttcgttttatgaagcactgtagccataatactcgaaattatatgtcatatgccaaaatttataactattaccacagcattcggatcatgtaaaatttcatcgagattttaatgactgtcggattatatatgggttaaaaattcaaatttgggactcagatctttggtcaggccggaaggccccacctccgactctccgagcagcaaagctgcaatgttccgcaacaaagtcctcgtgcgcgcccgcgccgtcccctccgcgccacctcctccgttcatcctccgacaactctccttccccgccgccgtccccgccctcgacctcgacatcctctgctgcaggctctcccgccgccaccgcctcgcgtgcctcccccagcccccgtccgacgtcctcgttgtctaccaggttcccaactcttcgcgctagctcgcacccacccgaaaaaagcgatgtgtgctcgtccgtactgttcttgacggcgagtttcgtgctgtggctggctggatgcagagatgccagtcttgcgctgccgcggaggccgtgtcggggatcgcggaggcgttcgagggtgccgcggtgagcgcttctatcctgcgcccgccacctgctcgacgttttgctgcaccgagtaatggttcgtgaggatgtgctggcttgttcggcgttggacgttgtaggttggcgaggaggaggaggtggtttgttcgggctcactggttgcgaaagctgtcgagtgcgacctgcgctccctgatgcttgagcatggatggaggtgtcttggggagagcgtgtatgtcctttcgacgtttgctgatactaaggagagaactgaccaatgcacggtgaacgtggtatcgtaaatttctccctatcagtgaagcaaccaatgtccaaaaacatggaaaaatatttacatttctataatgctgcatgttagtcctttcatttctctccaaaaagtgtcatgtgatttcttgatatgaccatgtgattggatatgtgaagcaatggaggaaaacagtaatgcaaaaatatatcacaaatcatgcaacagcaattctggtcactttctttctacacaagcccatttgcttgacttcagcacagtttagagtaatcttgatgcaaatcaattaaactgactttgtagctaattcagcctgtaaatgtgttggaataaatattaattatcattattttaggtattaattagagttgtttttgtaggatagttttgaatatgttttagtgcatcacataataaattgaaatgtacaccctatctccatgatatgctcatgaaaccatagttgccacctcattgcaattgatttatcaaaacactatatgctctgagtattaatccatcatacatatgtactgctgtgccacatcaggggtccaaaagcccaagtccttcttgtatagtttatttcagtgaaacaagccatgtaaacaatgtaccaagcaagctgtgccatatacccatatctgtgatccgaaagcccaagtccttcttgtatagtttatttcagtgaaacaagccatgtaaacactgtaccaagcaaaaaaaaaaatacagagattatactgtgttggattacaaaataaaaaatagctgccatgccttttgcaccctcttttttcttgcagttaagctatttaattattcggatccactattttctgtcctttatcatttaccttgatgacacaaacttgtacatttgttggtcgaatggttgcaggaagtcaagcttgggagaaatgatgatattgaatttgctgtctcaccagatgcacttcggtttacaacacctaaggtattcttcatcttttacttcttttgccacaacagcagaaaaaaaaaatacagtgaacttacacgttttgctgctagttctctgattttgttagctctgatgagatggaaacatttgaaaacggcaaggaagtaattttggattattgtaatttccgaacagcatgtactactcttccaacccttcaggaaggccatgtgataggtaagctaaacatttttgggactattattttttggtgctaagaaacatttataatttgtcactaattgagcatttcttctttatgccattcctctgtcaagccacattttatgtttaccactgaggttatatagtgtgatagatttactccccccgtgccttttttcctcaaaagacaagaatgcatctgttactccttcctccggccattgtcttcaccactctactgcacatgatcagtgatgtgagaagcaccccacagcgacgccaagcagagaagagcgatgccagaaagttaaaaggaaaatacagcatccatccctgcccagcatggtggcattcgtagctttcacatgtagtcacgcagatccaatcagcatacagctctgctcagctttcatagcttttagatccataaaagcaaaatgactaaaaacaaacaaatgcatatatacacatgatccttgcaagctcctgcttgtgacgagcacactgaaacacaaggctagataaggcaggcaaacagtaccaaagactttctttttgcttaggcagtcgagcgatgcagaagaacttactagccatcctctctctagtggtgttattagacatggattagccctggggtccaaccataaaaaactgaacccagcgcttgagctggtccatggaccgttatttcttctttttccaaaaatggaccgttcaagcagttgaccagaaaattttggcttggacagatggtttctcatccaactgaccaatgtctgtttcttcttttttccaaaaaatggatatgaggctgtggctcaaacccaattcttcattgctgttgcttgcagtcaatgcaatttaatatagcatcgcgtaatatatggcatctgcagtccaactggtgacccaacagttagactgttgaccaagtgaccaagtaccttatcctggtcgatacccaatcagtaagtaataacactgctctctggcgggggggtggtggagaccaggttgccaggaagtggttgtgcccatggcactgtcagaggccctgaaggcctgaacaatgagaatggagtgttgggatacgcgtaggctatgatagcataaattaaaaaattttctaccgcgtaaaccaggaaccatgcaagtattagatcatagatcgttaccactcgacgtgctgtgcagcggaagtaagcgctaagaagccgaagaaacgtcggggacgtagcgtgtgtcgatgtagaggaagtagtcgatcgcaacagcccaaccttctcgtgcgttctcctcgccgtgttcttacgccgatcagcaccgccagacagcggcgcctctgtcggtatccacacgtacaggggcagaacgccacgcgcagatgtgctagcacccgcgcgcggctagggttttgctcgggggaagtggcagctagggtttctcacgtgatccaatcaatccgccggtcacaccccctcataaatttataggatccatgaataggcctccaaggctcgtaggactcctgttaggattcctatccgaattaagcttatattggattcccatccaatccccttattccggcccgttaagcgtgcgaccttgtaggtttatgtacactcggctgtaactcgaa

SEQ ID NO: 23598 - DNA, 515 bp, Oryza sativa
ccccctccccctcggttccctcctgccttgcgcaacgagctagcaccgccccccaccaaccttggtgccagaacggttggtgtcgccccctcccccttagctcgcttcctgccttgcgcagtaggctggcgctgccgtcctctccccttggctcccaccttccttgtgcagcgacctccctccctcttcgactcccctgtcctgccttgcgcggtgggctagcgctgccccctccctccttggtacgtctcgtaggacataaatgggtatttgttcgaaagagaaatgagaataacgaggtagtgagatacaaagcaaggctagtagctcaaggtttcacccaacaacctggagtcgattacgaagaaacttattccccggtcatgagcggaattacctttagatacttaatctcaatggcagtaaatttgaatttggaaatataattgatagatgttgtaactgcctatctctatgggaacttggacatgaacatttgcatgaaggtaccagaa

SEQ ID NO: 23599 - DNA, 885 bp, Oryza sativa
tatggcaatgtgtaggtcgctggaactgaagatggtatcaaggagccacaggctacattttctgcctgctttggtgcagcttttataatgctccacccaactcggtacgctgccatgctggcagataagatgaacaagcatggagctaccggatggcttgtcaacactggttggatcgggggaaggtaaattaaactgttgacttgtttttctgatattatgtttactatgattactcaactaatttgatgtagaggctggattgaattccattaaaaaaaatcatcaactaattagcgagagtaagtacgtacttcgagaattgtaaggatgacgcttgtttgaattgcaattagggatttatatctcaaaatttcaaacttgtgatttaaataataatttatagcactcaagtaggacatataatgtatggtctgacaaacctaatccatttgagtatagtaatattgaaatatgagctctgatctatggtggaggtagaggtatatggtgttattaatcatcaagagatataatacctctactaaaaggtatatacgtacctccaaagcacagaagaaaaacttgcataatcttggcctagacaaacttacccacatactatgtcacactttgtggttgttcagttatggtgtaggtgagcgaatcagcttggcctacacaaggaaaatcatcgatgccattcactcgggtgagcttttggctagaagctacaaaaagacagatgtctttggactagacatccccacaaaagtggaaggagttccatctgaattgcttgacccaataaataccgtaagtccataatttcaacattatatatttttgcatgggatttatgctgcagcttggccaaccattttc

SEQ ID NO: 23600 - DNA, 18280 bp, Oryza sativa
cgcttttttcattgaatgaacagatatagctgaagtcaagaaaagaattattgctaaaataatataatagtatggaataatatgaaatacatgtaccctataattagtactccctccgtcccaaaatgttagcatttttagcatagttgcaaattaaacatttttaattttgactattaatagcaaaaaaataaaaaagatcaataatgtaaaattgatgttactagatttatcattaaagaaactatcataatatgtaaattttttttatttgaaacatcttacttttatagatattattggtcaaaataatatctcggagaccgtgtcagagtccaaaaaatacttatcttttagaacggagggagtagttcttttgtgttccgataaaaattgcttgatgtgattgccagtgacatggcatgaaaatgatggtatattaccaaccgaagaaaggaaaagctaggcgcaacattcaaattttcagaaataaccctcacactagagaaataaaactaaactgaattctcatgaggaaataaaactaaactgaatttcatgagggaatatttctacttttataccttgcaagagggaaaaaaaagagatcataaaatgaatgacaagctgaccggtgtgctctgccaacattttaattaactgcaccaccacttttatggtttattgtgtgttgtacccatagtaagtacctttattacgtggtgctcctttccaccatgtaatggcccttggtgaatttttttgtcacatgtaataccatctctcgtactaattgattatatcaatgttgtcataagtgtcttactcttagtttcaataaccctttttacctgcgatgcatgtctatctttgtattatctttagagttacctcgtaaccattagtttgtgtcttgccgctgaaagaattgtttttaaagaccctaactattactccctccgttttcgttttagaccataagtcgttttgactttgataaaaggcaaactgtttcaaattcgaccaagtttatagaaaaaggtagtaattcaacccaagataaatatattaggaaaatattttttaatcattgatttttggtggtgtaaatattattatcgttttagtgtgtctagattaacaaaggcgttcaacatttcaaatgctaactgtccatcgtactgtttatagctctacctttttgtacgctcctttctccaaagtttgttgatggtacaaaaatctagggatatatagttttaaaaaagagaatataatgctttgtattggctagacacaaaatgttcacaggtattatcgtgagctaataagtcataaacacaacttctcatatacattactctgaaaccttttataatatatatatgtcaccatcctcaaaatgggcattttatttagttttaccgtacaagactaggtaccgagagatgccatattttagtgttaatttacgatacgttttggtactttacactggagaagtatcatgaggtatcaaaaatttacactaaaatgagtggtagcttgagatacatcctcgagtaacataaaaaatcccttttatttagtatacattaagacatgctactactattattcaattaaaataagaaatttggtcctgcagcagcaatctcatcagccagatctctaacaccacctttcttgtaatttgcaaataccttgaaatttctcttgaacagatctgccaactttagcagtatcaacttgttctcgccagaattttgctacgtcatccgtatttgaatcggttttaatctctactattatttgaagatgattctgtactcaattttcgtctgtgcctctctactgacgacacatataaaataaaccggactgtgacttggttcggactcgaaacatacaaggaaaagactaatcaagaaaacactaattacttttggtactctagccgctaatgactctactaataaaccgtgactaacctatcaacactggaattaaaccaacatatcttataactacttcaaaaattaatttcccgttcttcacatcatttttttgtctgatgagtccaatcgaacgatggcctccgttcccacacgcgcgagtaacacatcacgtatgatggataaaacacaaattcaaacgtagatacaaaatccaattggacaataaaaaaaaaaagaaaaacaagaataataataataaatgcacaaatcttatcttaatcttcattgtcgcctgatctgcccgcggaagccgccgacaccactgtgcccatcggatccgcccgcgggaagccaccgacgccgcctgatccacccatggaagctgcgggaggatgccgtcgccgccatcgccactgctcatgctgagggagggcaccgtggccgctgtcgctcgcagtgggggagggcaccaccgctactcgcggtggggaagggcgccaccgccgtcgctcgcggaggggttgtgcggcaccgctcgcagtgggagagaaggggaatgaatctatggttagggtttcaatagggcaatgttttagtaaatcacgagtgatcctaaccgttcgatcaaatctgacggctctcagcacacctacgccgacttgaaccgtggccttgcacatgggccctgtgcacttaacatgccacggtgtggaagagagataggcatccttctaattataggtctaattatgtttattttttcttagccgatttaaactatttctcaattaacaaacttagtttaagctccatttcgagccattaaaaattggtgagatttaatatagtttttcattcttcatactaaatatttctagctaaatggagtcaccaaaaaatgtaattatttatttgtcatgatattgaattagaattaggtatagatttgatacattgtttatgtctgggagtatcccatataattcccatgaaactataaaattaccataatcattatcataactttagttttttcctttgcaacgcacgagcactttattctaatataaaaagcagcagttgtacttttgctaggtgcacccagggaaatatacacaaaacatcatcatcccattcctcagcaatcccatctatttatctaacggctgaaaaaggatgagggtgtcttctgtcttacagtgctaacatgaaatcaccgatcgattacccatcccaacccatcgagccccaactcctcattgcgctatgtacgccgttgcacctccggcctcgcacctacggatccgaagctgccggcacactacaaatgaagctgcgcctcctacctccttgccatgggtcatgagccaccggtggtggcgccagcctgctggcactttgtgcctcgccggggtcactgccacaaaaggcctcactggtctgcaactgtcggcactccccgaggcccaagcgaatcacgccatctccgtgattggcacctcctcgccggacaccgcgtgaccccctcgattcacgcccaaactccggtcggcgatctcctcttgcaacctaagaacacgcattggcatcccctaatgattcgctcccgtgcaccggtaactccatctcgatcctcttctcctccgtgattccctcatcatcaggactgcctgagttgccattgttgcagaatgacagatcaacgccaccttctccaacggtacgcaccatcttctcatctaccgccgatgcaccctcaatctacatggccacggtcgacacctgctctccatcaagaaaccaccggccaactcatgtgagtcattaaatttatcttgctgttttcatctttgtagtcgactgctacgaaatttattctaagttggtattgctaaccatgggctatgtggaagaactagattgattaggaagcgttatcacctcccgtgggaggccgcacgaatatattgattgagccggcaaaacgcggcgagagttacagggagtttgttacataggataagcaacacaaaagataagaagataaccaatctaatcctgaaacttatctctactctaacagcccccctcaatcataactttgacaagttaagattgtgctgaaattcgcgaagtttctgaacactgagcggtttggtgaagccatcagctacttggtcattagtagaaacaaatctaacctcaagaagcttctgcgcaacccgttctctcacaaaatggaaataaacttcaatgtgctttgtccttgcatgaaatattgggttagcagacaaataagttgcacccaaattatcacaccacaatcttgccatggacggacattgtataccaagttcctttaacaaagtttgcacccagattacttctgctgttgcattggccaaagccttgtattctgcttctgtactagatctagatacagtagcttgtttgcgtacactccaggatataagattacttcctagaaatacagcaaacccactagtagatcttctatcatcaacacatcctgcccaatctgcatctgagaatgcatttacaagcatagactgagatttctgtatcttgagtcccataccaacagtacctctcaaatatctgataattcttttaacagcagaccaatgtgtcaaagtaggagagtgcaagaactggcataccttattaattgaaaaggcaatatcaggtcgagtcaatgtcagatactggagagctccaacaatactcctgtaattagttgcatctccaggacctaaaagactcccttcctgtacagataatttttctgatgttgacaaaggggttggcgcaggcttacaggtcgacatacctattctcttcaatatatcatgtgtatatttgtcttgagacagaactaaaccatcacttatcttctttacttctatcccaaggaagtagtaattaagatcacctagatctttcaaggcaaaatccatcttaagattatgaagcaaagagctaacagcatcttgtgacgaacttgcaacagttatatcatcaacatataccaagacaaagatagtcacactaccttttctatagaaaaataatgaggtatcagcctttgaaggactgaatcctaattgttgcagcttcatgcttagtctagaataccaggctctaggggcttgtttcaaaccatatagggccttgtcaagtttgcaaacatagtgtggcttagatatctcttcatactcaggtggttgtctcatataaacatcctcctcaagaatgccatgtaaaaacacattcttcacatctagttggtgcaaactccatcctctagacactgctattgataaaactgttctaatagtggttgcctttaccacaggactgaaagtgtcttcataatctatgccataacgttgtttaaaacccttagcaactagccttgctttatattgaagatgcacttaaacccctagtgggttttggtgattaatgacaaggtggttaaaggggactaacgtgtttatcaagtttattcacaggagtttagtcccaaagcaagttgtgatagctaagaatgcaaggagaccccccaagttggatgttcctaagtgcgaaaaacatcgaaggtgattagactaggtttttctctttcgaaattgagtttaagaaaaaccgtactattaagaggggtttcaagtgtggttctagggtatacaaagtgctctgagtcatatccatgagtctaaaggtttttggaatcttttttttcttggaaatgattttccccgggacagagaggcttacccggaggttctggccagacctccggacaccaaagtttattttctccccgggacagagagggctacccggaggttctggccggaactttcgggcaccgaagtttagctagatttttttttcctgcccggaagttcctggcacttttgcccggaacctcctggcaggtttccagttcaatcttgtgagtaacggctagatgacgtcacctagccgttatatatatggatttcgtccccaggtcaccctttggccattccacttcagttctttcatgttctaggttttctagccactcccaagcttcctttgcttcctccactcaaatctacagcctatcttgtgagattgagagattagatagagtgtaggagtgttttggagatggcttgaagattatgtttgtttgagcactttggataccttgtgggcagtcacttgggcttattactcttggagatcttctcctagacggttaggtgttgcccgtgagcttccaaagatcttgtggatgtcccgggaaagtttgtgaaggttttcctcatctccgcaaggaaacgaggtaagtgagtaaagattcttgtgctgagttttcagaggttgtcctaggtagagcaacttgcacttgtggtcttttctagaaggaattgtgagttggatcttggtggtcactcaattctagaaaatgacctagaagtgttgagttgaaggctgtggacttcttctgggatctttgcataagtgaggcaaggggttaatcgagacccggctctttgagcacctcaacggagagtaggatccgtgtgatccgaacttcgggaaaaaatcgcctttgtctctcttgtgcatgatctgtgtttgaatctgctggtatcttgtgatttacatcttgtgcaaccttgtgcctaattgtctatagctaggacctgttttgcctccccaaattttgattttctctgttgcccggaagttcctggctcaagaactccggaagttccgggctgctcatttctgccaggaagttccggtgttcttcaccaggaggttccgggcactgttaatttaaccgctgcgattgttgagaaaatttcaggaaagcctattcaccccccccctctaggctacatctctgcgcgttcatatatctatctattgtgccatctgcttttcttttaaccttgtacacccacttgcaatcaatgagattactaccatcctcaggtggaactagatgccaggttttattttgtttaagagcatcaaactcactatccatggctaccttccaatccttatgttttaaagcctcttctagactttcaggttctccagtagatgtaaagcagccatacctgacacagccatcagtataaactttgggcttgtgcacaccactttgtagcctagtgtgtggtcgagggttgtttgccgctgtatcctctgccacagaggatcttgaaaccagctcttcctcatcagtgcgcgtaccagatggcgagctcacagtggtcgatgcggcatgcggtgagggaggtggcgacggaggattgggcgacgctggtgcagaggacggcgaggcgagagaatttccccctgcgctccacacgtcagctgctggatcatcggtcgtggcagacgatgattctgacgtcgattcagcacctgcaacggagttagtagcagccgaatcggtctggtgctccgcggcatctattgctgctgatatttcatgtgaaatctgcaccgaatcatcagcaaaactcgcagaattttctccattagacatattttcaggcacagtattttgattagcattattaggcacatggtcacccccagaaaaaggaagaaaaagactgggagtaagatcaatttctttgcgaagaagtgcaccagcattaggatgaagctttgcaaaggggaacacattctcatcaaaaataacatcccgagaaatgtagatgcgaccggtggatacatgtaaacatttaaatcctttgtggagagggctatagccaagaaacatgcattgcgtggatcagaaggcaagtttctttgaattgtagggtctcaaattaggccaacatgcacacccaaatgtgcgaagggaagcatattctggtttttgatgaaagagacgctctaggggcgtatcaaaattaatcgtcttggccggagtacgattaataagataggtcgcagtgcaaaaggcctcatcccaaaactttagtggcatagacgcatgagcaagcaaggctaaacctacttcaacaatgtgtctatgtttgcgctccgcagcaccattttgttgatgtgcgtgagggcaagagaccctgtgagagattcctattttagtaaaaaaagaatttagtttttcatattcaccaccccaatctgtttgcatagcaattatttttcgatccaaaagcctcccaacaagactctgaaattcttgaaatttttggagtacctcagacttgtacttaaggaaatatatccaagtaaatttgctaaaatcatcaataaaactcacataatagttctttctgccaactgaatcagtggcaggaccccagacatctgagtacacaagttctaaaggaacggaggaaatactgctagacttaggatagggtaattggtgacttttggcttgttgacaagcatcacacacagtttctttattggactcgctagaacacaaaatattatgcttcttaatgacttgttgaagaacaaaagaggacggatgccctagacgactatgccactttgacgttgagggtttgatggcaccatatgcttgcttccttgtatccacggatccgggaggaaagggataaaggccattcctacactttccttgaagaagaggtctcctcgttgttttgtccttaaccaaaaagaatttatcatgaagttcaacaaatgctctattgtcagatgtaagacgatgaatagaaactaagttccttttggcttgaggaacataaaggacatcattaagattaagtgcccgaatggaagtaggaatctgggtgtgaccaatgtgactaatatgcatacacctgagccacttgctgtatagatttgttcgccatcattgtacctctcacgcacggagagcttgtctagctcgccggtgatgtggtctgtcgccgccgtatctgcataccagttggtatcgatgttgtagccatggattgctgcagctgcactcttctccggaacaaagtcctcgttgtaacggtaccagcagtcggccaccatgtgaccaactttgccgcaaagctggcaagttggacgattgcctcgcccgccaccattgctaggtggtctgccgccacggccacggtttccgccaccgcgaccgcgaccgccgccgctgcgcccttgttggttgcctcctcatccccgcgaagccgtgttcatggagtgttgggccgcccgacgactcaggcgctcctcaaagctgaggagttgagtgtatgcgtcggcgatcgtcactgctttagtgcgcccagtgatcaccgagaccaccgggtcgtattcttcatcaaggcctgccaagatgtatgcgacaatctcctagtcgtccattcgctttccagccgctgccatctcatcactaaaagacttcatcttgttaatataatctgtaatttttagattacctttcctggttgtggtcatcgccatctcatcactaaaagaattcaataatctgtaatttttagattacctttcctggttgtggtcatcgccatctcatcactaaaagaattcatcttgtggtaattttcagtctgggagcacagcatgttctctagagtcctccagagctcggctgcagtttctattgacaccacctgtgtcaggatctccctcgcgagggaggaaaggaggtagctcaagacttgttgatctgcaaccacccacttggtgtactctggattggtggctttcaccaccttctcgccttctttgacgtcgatgagacgggccggcggcactgtggtgccgtccaagtagcccatcatctgtgcgccgcgaacggccggaagaacttgtgtcttccaaagcaggaagttgtttcttcctagcttttctgccaccggttggccgaacagagaaggggacgccgttgccatgacggaggagctcgccattatcaatctagatgagtttgaggagtaggctctgataccatgtggaagaactagattgattaggaagcgttatcacctcccgtgggaggccgcacgaatatattgattgagccggcaaaacgcggcgagagttacagggagtttgttacataggataagcaacacaaaagataagaagataaccaatctaatcttgaaacttatctctactctaacagactattgtaatgcaattctccaattgagaaagtgagatgctgatggcaatttttagctgaccggacatgctggaaatctcgtggaaacagcaagcatggtaacatatttctgtcttttacccatcccgagatgcttcaaagctattcttttttttggattaatgcgatctctctacatatatttctgatgttgatcttcgccttattcatttcgtgctcttccttctactgcttggaatcaggtattaaatattttctttatgcacacaagttggttgatgaaactacccaatgcggacatgcactggaatgcttccctcgcattctacaactaatactgttgtgacaagttgggtgttgattattacaccaaatgggttgagtaagtgtactaacaaatggagacacaatatatgaggagggactgagtattctcgttcacgttcttttcactacgtacaaaagcctctctcttccctttatatagccaattagtgtaaggcccattagtgtgttgggctggccttcatgggccaaaagcccatgtttctcaacactccctcttgggctttcaccagccaccacatattgcttatgcttcattaaaacggctcaaaaacccagtgggaaaaattggagaaagagtacataacatatgttttgtgtgttgcacggattgcctagttaaaaacattgataagaaaccgcgggaaaacttatctatgggaaaaagagtacgacccacccaattattctttattaggcactttctcattctggactaagtttgacgagtgagtgaaattctctccatgaattttgcacttctctaagtcccatcatcccgatccctcgaatgcatctttcaaaaggggttgccagtaatgatatagtgaataaatctttgagattttaacgagacttagtatgcaatacttcgattttgtttgtcttatgcagttcatgagcataaaaggacttggggttgatatgcttggtgagattgcttttcacttaacccatttgtacttgtgcgacacacgctgcattatcttcatagataattgtaggggtctgggtggtgttcaattcacatgattgctgaatgtggcgaatcatcctacgaagccatacacattcacgagagccttcgtatagtgcaatgttttccgagtggttcgtcgaagttgctacgagactttgctttgacgattttcaggaaattgtcgttcctccacataggaaaacataactggtctgtgacttggctatgtgtggatctgataggaactatctttgtagctccagaatgtttcagtttatgttcctacctattgtctggttataccaagagagatctacagtctaatgaggctactatgaaatatttactcatgggtggggtaagctcttctattctggttcatggtttctcttagctatatggttcatctgggggagatcacaccgaggaatcctaccttccccaaaggtagaacccctctctctttaaaacactatacatttagctacccgaaaaacgaatggtatcccatattcgggctggcctcttcaaggggcctccgctcggggacaaccgaactccggtcttacctaccttcaagtccaatcttgggtaggcactttaggcatgtcctattccctggaccagatccgaatccaaaaatgcataattgatgtcagcttcgataactgatatatacccagcatctgcatatcctacttaggtgaggtcttggttctttctgtagaacagtcccatgtccttgcttcctttaagataacgaagaatgtccttgatgcctttacaatgtctcttagtaggctctgtgctataccctgcaagtaagttgacgacaaatgctatgttcggtctttgcacaatttgcaaggcacatatgtgctcctattgcactcaagtatggatattctgatccaaggacttcctccccctcttcccttggtctatacggatcttggtctacttggagtgacctttcgaccatgggggttttcgaaggatatgccttttcaaagccaaattgttccaacactttctgtgtataggtcgactagtgcactgagacccattcgggggtatgctcaagctgcaagcctaagcaatacttggttttacctaagactttcatttcaaactcagattgcaaatatgagtttgcttcttcaatatccttgactgtcccgatgatgtttagatcatcgacatatacatatattatgtaaaatccatcatgggatctctatataaaaacacaagggcaatcttcataattatttcccttttttctgaggaaattgctaaggcgattataccacatttcccctgactgttttaattcgtatagtgacttcttgagttgtacactatacatatttattcttgccctgtcttagtttgggacaaggaaaccttctggtaccttcatgcaaatgttcatgtccaagttcccatagagataggcagttacaacatctatcaattatatttccaaattcaaatttactgccattgagattaagtatctaaaggtaattccgctcatgaccggggaataagtttcttcgtaatcgactccaggttgttgggtgaaaccttgagctactagccttgctttgtatctcactacctcgttattctcatttctctttcgaacaaatacccatttatgtcctacgagacgtaccaaggagggagggggcagcgctagcccaccgcgcaaggcaggacaggggagtcgaagagggagggaggtcgctgcacaaggaaggtgggagccaaggggagaggagggcagcgccagcctactgcgcaaggcaggaagcgagctaagggggaggggggcgacaccaaccgttctggcaccaaggttggtggggggcggtgctagctcgttgcgcaaggcaggagggaaccgaggggggagggggcgccagccaatcgccagtggcagaaggggagccgaggcaggaagggtaggccgctctggtttatcgacgcatgaggggatgccaacgctgtgtcagaggggccagccaggggggaggacgctgtgacatggagaaggccacgatatgggcttcaaatactcaggagacaaaaatcgaacctaaaaaaacatacaaagtcactctcatacatgcacgtcatacttccttgatgccgaacaaatacgataacttttgtggatcaaaacacgagaaaagttcaatggcatcatcatcaacttaaagtctcaaatttaagtgttttgcaccatgcatggcatactcgtgcacatttcaatgcacaacattcaatactgccattattacatgtcttagggaatttaaaaatgtcctcgacctccaactgaactactaggtgcaacgagtgcattgcgccttgctagtggcctctggaccagcctccttggcatgttgtgccctatccacctttcccgcccgttcctttgcacgctcgttcttctccgcaaactcccttgccatcttcctaagctccctctcctcattcctcttcctcttagtgttctctatagccgcaagtctgagacgatgattgagctgttcctcttcctattcgtgttccctatgaatcatttccgtattgtggggatcaatctccgtgtcaatccatttcacaaagtcacacagaggaggcaatgtcttcggtacctgcacatttcacgatttaaaggatcttcattacaaaatacaatgcttttaggatcgcaacctcagaaatataaaaaattacctccaccgtcttctccacatttcttttctttttctttgccttaggcttcggcttaggcttctctagattgtacgcagagttgcgatacatccaattcctttggtggtgtgtcttgtgatcattgcaaaacgacattcgtcaccacaccaacacatgggacggttagtatccagtggaggtagtttcctagggcaataacccgctgcatccttcctgaacattctacaaaaccaaaattgtctcccgctacgtaaattacattgaaattttatcaatcaccagccttaaaaactaattaacttgacaagcactcaatacccacatatattaataaagtaagtacattaaatttgtcatttttcatacaaatttataaagttatatttaatttcagtaaatttctatcatgcgaccaaatttgtctatccttcatatagtacatagcaacaaatttaacctaaatcaattttttcatacaaccatctattcatgtctcaactaaaaattatcattaccacatatatgtacttgaaaaaaaatcatagcacgaacaagcacattgcacatacctaacactacaatcatcaaatccttaatttcaatggtcaaaataaaaaaaaatgggcaaaaaataggttctagcgttaccctccgatctacaaatttcatcgattaaaacgaaaaaaagagggatgaatggagtattatacctcgctcttcgattttcctaagaaatcccgcgaaaaatggctccaaattgagtagatttgaggaggagaggtgaggggagggggaagagagaggagcagagccacttgggcttggatagggaggaggggcgaatgggtggggagggctgggaggtggggcctgcgtggttaagtacgcacacccccctcggggggtgcacgcttttgacggtcgttatagaccagtttcgaccgtcaatataaccaaaataaaaggagaattggctatgcttgtaatacatatttattttagaataatatattttcactcatacttggagtattatttgtttgcagagattagtacataaatgaagaataaatgaaggaaaactcactcctaagcaagctcaaggataaaggagtccacaggtcaggtataaccgtcctgaaacccgccataactgccagaactgccatgaggacccacctatcagcccctctaccaaatctggaggcttgctgggccggcccaggttcggccgaaccagggattcgcccaaatcctggcagggccggctcagctcggccctccacgtggatgcttcagatgcacccccaatgatgtttgtggggcatttccgacaattccaactgccataaccgtaattgggaggttgtataaaggggtcacttccttcacttcatcacacactcaagcaagaagctttgatccctctgtcaagcttagtttagtgctctagtactaagtggaatagaataggatagttctcggagtcctcgagtcttcggaagatctcggtatggctctagtagcttttctttcttcttttgtaagacttctggaattaatagaatattcttctttatataccttcgacactttagtttgcccgagtactagttttactttagatttgtgccgatatagttgtgtgactggcctaccagagaggtgcagtggtgtgggtttaatgttcatgcaaatgattactctatattattctagagggtatagagtagtatttgataatgtaagcatggtgcttagattattagatattattaattgggcatatatgctgcgggacagtagaggtgggccgctgatcgtgatagctcagtacgggtattcctccacattagtatatattcctaagacaattttctgggtgggtactcctccgtatttagcctcggttggacggccatgataggttgtcgtaagaaactcggcaacccgggtggtctctcgaagcaccaggagggcgttgttaagggggtattggtcaacacaactgtatactagcaaatgtgaactaaagttgagtgtatattagaagtataggaatgactacttttctatttctttttccacgttagtctagaattatttaaatgagagaatctaagtccttctgcttcgtgtcaccctacccatataattaaagtaacccttgcatagattttgatatatatgtaatgtatataagttattagcaaagttctctcttataaatcttcccttgggattaaacaaatacgatatcttgaaatacttccgggtgaaatgctataatggtatatccgtgcgcttgcagattacttctataaccataaatataccagtgctatttttgcaccgttgctggaaattcatattcctagtaatgtcgttaagaaataccaacacacgccagcggtgttagtgctgtggtggaggggcggcgctagcaatattggtgccgtcctcctgccacgtcagcacgtggctgctgtgttggtgttgtccagttggaccacgcgccagcgactctagcgtcccaaaaatgattattcctggaataagttttccaggaatgtatttctaaaataagttccaaggccctcgatccgtgtgcttgcgcatgattcgtcagaggtgtgtttctttgcatactggctcatttcactttcactttattgtatgttccctacatacatagtatttcttcaagacaaatggaactacattattcaatacatatatatgtgtaagaaatgctagttcttcttttatatattatgattttatatattatggtagttgaatgtaagccgaaatcggtaagtagcgaccgccaacactaggttagaacaacatgactacaagtggcatgtattattgtttttaaacaaataaattattatggaattttaagaagcatccattattgatagaaaaacaatgatgataaaacctgcgtatgaggggatcaaactcagtccaatcggcatgctctagcagctccccacaagatgagctacattttgttcttggcttgtattttttttcgcaaacgcgtaaaaggattgcacgctaatataatagacgaaaagagtttaattacaccacgcaatcagccagaccagcttatgctagtgaaagggagaaaaagcaaaataaaaagctaaagctagagaaactacgacagctaagcacaaactccaagtagcgggaatgggcctagccacgctacactcccaacaagtccccaaaagcggcaacgctagctaaagaccacagatggccctccaaacggatggactccaggaccattgagacgaaagagagcgcggagtcgaaaactctagagttccgtttcttccacacctgccaagagaccaggagcaccagggagtcgaagtcggcgcatagatgctcaggtaagcaggccctagaggatagccaacagtcctggaaccagctgccacagggagagagagggcagcccagccagaaggcgacaacacccagaaccagatctgctgagcgaacacgcagtcgaggaggatgtggttcgctatctcaagatcctgagagcaaaagggacaggccgagtgactatcgataccacgcttctagaggagatcagctgtccagtagtgccactggaatgcaaaccaaagaaagaatctgcatttagcattaaaaaaaatactacattcgtccgaaaatataagaatcaaataccgatgatacgttttcctaatgtaacgtatctggatagggagtgtatgaagcctgtctagatacgttgtctcagaaatatcccgtccgatcctagaatcttgtattttgagacggagggaacatgagacggagggaatgtatgttttagatcgatattttttgttatttatgtttatgggtggaattgttggctgtggcaggttttgggtggcataattcatgtaccatacatatattttaaaattttgtttatgtattttacatttctttgttaaaaatcctactaaatatttttaaagtgaaaatatatctctcaaaattagcggcgggcaaaccgcgaacgttacaaaatactaaatattatggcaaagtccctaaaatcctagttgccgaaaaagcggccacttttgcgagtggagcgttacgcaaccatccacaaccaaaagagaaacagaaaaagcaacagcatttccttcccgtttcttcccccaatctccgatcgaaatcccttctactccctactagtatctcgtcgatttcgttccctagccaagcgctccaggtcgtaaattccacccaaattcgttgcctcccccactacccaaccggggcgcagga

SEQ ID NO: 23601 - DNA, 16092 bp, Oryza sativa
gatgccagggccgctcctggcgccgtacgaccaccaccaccgtgggggtgggccagcacagcggctgccaccacggcggccaccccagccgatccatgccgcaggggagttcccgcctgctatgctgcaacagcatccccactaccatggctggggtggaaacttctcgtatggtccacctacccagccgccggcgccggcgccgccgtatgttgagcaccagaaggctgtcaccatccgtaacgatgtgaatctcaagaaggagactctccgggttgagcctgatgacgagtgccctggacgattcctcatcaccttcacctttgatgccaccgtcgctggaaggtgagatttgtgatgcttgtttatttatatacgtacatgtgatgtactactccatacctatacatacatgttgtaatagtgtagcatataacatgatgagctgatgaccgtagctgtgatatctacagtttcttgttaccattgaaatgttaatgtttgttttttctctcatgttgaccttgacctacaatttcatgttggctccttctatgtgttttgtcaagaattttgatgttccctatcttgatgctgatgttttgtgagattcatctttctctatattatgtcacactcaccaagaaataatcgaactaaaaagggaactaaagaatcgttgtagaactgaagtacatttctagcagattcttgtagctgaacagcttaatttctaggggtgataaaggtcattgtggaaatttatgtttttatgggtccatgggcaccctagaattttagttggtacagtatttgtgtttgtgaaccaaggagagcccaacaaatatggaagtagagctgacattatactctgggatgctaaggaattgaggaatttgagcagtatgttcagatcgacaccatgtaggtggagtttcgtttggcttaattggcgaagtttattacaatggtgcctgattaagtgattattttagtagttccatgatgtgagttcgttaatattaagagtcagtttgagttttaatttgagtcggtggtctatatactagcagagtgttttagcaaatgggattaaccaaaggccatattattgtagcattattggacaagattcgcctggcctgctcggttatgttggttttctgcgtgtggttgggcctgtgcacgttggagtccatgctggcttggtctccaggcccaataagtctgctcatagtctttgtgcagagattagattagtttttgctctcgtgtgtttgcctatgtttttgcccatcgtgttgatgtgaaaagaaaggccgtacctgtgcattgctccatgacatgacccttagttcctgctggttccatatattggttaaagttttgcacttttgccatactactaattatgttggttctgcctactggagtgctagccacggttttggtttacttcgagtgctttgttgttctaaccttaatttgtgtcatatatatttatgctttttggactcttcacattgcatccattcagagtaaaaaattgctgctctttgttggtaccgtgaaagatagaggggaatagggtacttgctaccgggtgctcaccatattttgatgttataacttactgacaaacaaaaggatggtaacaataagtgacaagcggcaaagagaattacaacttccattatctttgaaccatcaaaagtgaatgttcacttgcatattgaattctgtttacagaaaattaagcccaattttttgtgggctgggcccttcatggaccacagttggccatagttattaattctttattatgaattttcatgtcatattataggataaatatctgtgaccaacatgccatattgtagaaatgcctaaatggtttcccagcataatttttttttatcaattcttgtagtttgtacgttcttaatatttttgtgggaacttaagatgacattcagttagaagaagtgaatttgtaatgtaggcgccattgctctatatcatgtgtgaaagcttgaactttggagtcaaccgtttacctaattttctggatgatctaggttttgctactgaaatcaaggaattagctgccccagttagtggtgaatgtaaacaatgtagctgttgtttagccaagggcagtgctaggatgtacagaatcatttaaagccatcttttgttaggctttgttcggcagcagttgattgggagaaaacccccttgttatccgtgccttcctgaactgctaagtggtgcattttttacaaaagatttctacaggaaaattgctttaaaaaatcatattaatccatttttcaaatttgaaataattaatacttaattaattatgagctaatggctcaccttgttttgcgttatcttttcaatcttttccttttcatctcctctcaaacacacacttagtcctcactttgttttagaaaaaaatagatcatgcttttaagctatcatattgtgtcttgttgagttattagtgtgcatcttttatggagtagtagaaaaatatcccatgcttgtagttagcaatggataatcagtatcatctccatttcttgctttgtagttcgttacctttagaaacttgttttctttcctgtttctgtcttcggcatcttttttactgttcgtttttctcctagtacctttgtagactggtgtctacattagattgtattttgaagatcaatgtgtagggacaggaggctttattttaattggtaatcactagtttattagtggtgctaattgtttgttcaatcggtataatatttttatggtgatcaaagttttctttgtctgtacattgtccattacatgagttgttctcctctgatgtctaaatatatatttttgcaggaggtgtgtaatcctttactctatctctatagctgtgcatactgtcgactgatttgaagttacttttagttgattttaacttgtgtttcttcctttttttaatgaattgtgtttctttgttgaacagcatgactgtttacttctttgcaaaggaggagctgaactgtaaccttacagcaacgaaagaagatttactcaagccagtcactgtaacatttaaagagggtcttggtcaaaaatttaggcaaccttcagggacaggaattgacttctcgttgtttgaagatgctgaattatttaaggagggagagatggatgtatatccacttgcagtgaaggctgaaacaacattctcaattggtcaattctcagaaggggaagaacaaaagtcacaaactccaaattcacagatcacccaggctgtatttgagaggaaggagaatggggattaccatgttcgtgttgttaagcagatcctttgggtcaatggcacgagatatgagttgcaggagatttatggaattggaaactctgttgaaggtgacaccgaagggaatgatcctggcaaagagtgtgttatctgcctatcggagccaagggatacaactgtcctcccatgtagacatatggtaagtcttgaaacaggctcttgagtttatgtttgtcctttattttactttatgctgaaattatgtcctacaactcttctgttcatgttttacatagtagatgcctagatcgtcatcgtcgtgaaattttcggaatgacaaacccttttgacattttccttatggtgcagtgtatgtgcagcgagtgcgcaaaggttctgaggtaccagaccaaccgatgtcccatctgcaggcaacctgtggagcgtttgctcgagatcaaagtcaacaacaaaggtgaagagcaacagcagcagcagataccacaaccaccaccacctccttcaaccgcgcctccgcaccaacagcaagagtcgcaagcgtgatcgcatttgaacttcatacatattacatacactacttgatgtctggtttgctgcctccatatatacaggagctccccttgaataagtggaaaacagggagaagacatgtgcgtttttagtatatgtgagcacaaaagcttgctgcgcgcggtggcttgcaaacttgcacttcagtgctgggtgtgctgaggatgggttagttaataccctgcatccatgaaaacaaggtttgtacataaattctctctacttgtactactgcgacagaaattctcacgatttgtattactgcggctgatggaagtggagtgcgtgtgcggtattggctatagttctgtcgttaacttgccctttgaggcaacagtatgcgtgtaattatctggcaattactcccatcaaacaagagctaaatggatattatttccccgtcaatggctatctcatgtatcagcgatcaaatatatctcactctggtcctgtgacatttcaagtgtcgatggaaactgatcaagagaaatatttgttgcgggactttacgaagactaaagcaaatcaaatcaaacatacaaagaatattgaattatagttaaaaaaaaggacagcaaaattatttgtggacctgctctattacagcccgtaacgaatataatgctaaaagaacgtatgatatgcaataaacactttggaaaggatcgccaaatttgatactatattaaattacacagtaattaatgtttgtaatgtacttcctaagctgtacgacaggaatactattactgtacgaaagaaataatatttgtattgcacagtaattaatgtttgtaatgtacttcctaagctgttcgacaggaatactattactgtgctcccttttctttttctgaaacatgcctagcttaattatattattcacgttgccacgtacaacgacttttcgtcaggccggcgaatacagctggccgaagtatattaagagaaaaggagaagctatacaacataccccaacaacgggcacacgctcgtagtgtgtcaaagcaccgcctttataaacttatttacaagggctaaagtctccctaatgagtacacttgggcctcggtcgtcggactaataaggccggccgacctccttgtctcctattcttctgccatggtcgcacgaagttgaggcaccatggaggcttttccgttgaacacccttgcgttactctatttccaaatcaaccaaattacaaggatgaccctgacattgcacgtcttgcaatcaattttagcaatagactttcaggtggagaaccaccagcttggaaaatctaaggacggcgcacataatgcaagtcccaagcaatcccatacccactcccacatttgctgcgttaaagagcagccctaaaggataagttggcaagtctcgccgtcgttcgagtagaggtggtatactagcgcgaggtgccacccacggcgctgcaggttgtctgcagttaggcaagcgctgcgtgcttcaaggaacataaagaacttgcgtctcaccggcacaagagacttccagatgatcctgccaagcgggcacgccgtccttccgatcgacagtagcgagtaggctagctgttcgcacagagaactcgccatttgacgccgccttccatacaaccacgtccctgctcgtagaatcgagggagattcttgcgaccatatctgaaagcaccagatactccccaagggcttgtatggataggccatctctaatgtctgcgaccgaggaatgtcatggagggcagaggcaaccgtaattacacagtacttgatgaaggagaagagaattggtactatgttttgcgctgaccgacccaccatcatgcagctatttatcctttcaacttgatgcctgatgcgaaactgtgcaacaccttttaatcggccagcggcgcaaaccttgtccacaagcactccggctgtgttcggcacaacgaaatccacatacaatgacttgatcagtgaagcaacagcgcaagctgcagcatgacaaatggcctgaaagtagataaataatgttgctaacccacggcataccgttggaacgacataattattagtcggacccctcagccctagtgcgcatggtggacgcacttcagcttgcgtgcatactgtacatcttttttgaggggaagcaattcacgcacactagctaactactactccagtagctagttctcctcaccaacttaatgtacgtgcatgcatgcatttgccatgggtgacatgacaagtgctcctcactcacacacccctagattatgaatgcctgtccttttgattgcacataactataaacttctctataacggcgtgcttagtcatttaagatgctgttgttatagctagactcagtggcatgggctgatgcctcactatcttatagtatgaaattttttccatcccaaaatatgactatatgtaatagtacctcgaaaatatcataaagtatctagcatgatacatgtgggtagtagatcaagtacatatccactttgatacctatgtgtactactaagtatcgtaaactatctagcatgatacatgtgggtagcagatcaagtacatatccactttgatacctatgtgtactaagtatggtatatgtgggtctgaattttaacatgtatgagtacgcagtctgatacctaggtatcacgtataatacctattagctctggtatttgttgtactaagcatgaaacatatatgtattaggctgatatatgtgggtacctacatatacttatagatatttttcccaaggttcttgtcatatttgattccttttttttactgaagaaagccggatgtagaatttggacaacttgtttattcaatactcctttctaataagttccagcaccctaacaccttttggtgattgagatcaaacacatccaccaacaaaaaaaaggaggggcgatacctttgtcgtagtcggcagccatggtgtcgtcaggggacggaggtatgcagcggtggagaggagctgacgcggaggaggcagcatgcgcaggtgtggggagtagaacgggaggtgcttgggaggcgcatgggtggaacaacgcggtagagcatcgctagagggataagcgatgcggccgcgttggaggtggttccggggagaaagtggagtggagatgtggagggaacgaccgagagatgggggttggggggtgggggaggggggacgcgtgcgtggcatggatcggggctgcggcagcatgcgaaggaagagaaacgcgatctaagccgttggatttggcgatccgacattccgtatttcatgtgtctatcaagtttcgagtcaccatcatcactacgttttttttaagtagtatagatattgtgacactgtgtgatcaagtgctttagtaggctcagtgtatgaagtacttcgctaaatggcatcattctgcattcaggcatcaacttctagagtttcagacatgacgccactgaagttgaacttgaaatgagtgaaatgggctacaagctacttcacaatttcttcattgtcttgatttgtttttcagtatgatgattttaactagaagatttgagctagcataatgtcaatagaagcacgcatgctatccagcttgcagcttgctgatggacgtatgaactagttcaaaagaaaaacaacttctaccagttactaacattgcgttgaaatattcttatttacagcaactccctcatcagtcttcagaacaaccagaataataaatgaatcccataaactaattaagactcgatctcgtcaaagttccatcgacggaataatacatgatactacgtactatcttagagtagttaagcaaaggtatttttttcgataatggaagctttattaaggctcagccaaatacaccaagatgatacattccaactgagcccaccccggcctctgcataaaatgcacatagccaaacaaaatagcaaaaaagaacatatctagaactccatcacgagaccgagatattaatgactatctattagatcaccacagatactcctgggttaaaaactcccgtgccacctggcccaaatgtcgcgattaccactgtaatagtatccgaagacccggtttgtgaaggatagcccaggtgcgaatccaccgggtgactaaagtaataacctataaaggagaagcaccaacttgttataaaaaattaccctaattctgcttatcaaaatggaccaataaatagctgttgcacccagtaaaagtagatttctcatgtctttaggaaacatgtaagccaacgcccaatcatatgaatcacatttcgtggaggttgtaagttataagccatatgaataaccgaccagaccaagcgagcaacatgacattggaaaaacaaatgttgaacggtttcgtccttataacaaaatcaacatttcgtaccacctttccatttgcgcttagctagattatccttggttagagttacaccctgacgtagaaaccaaaggaaaatcttcactctaagtggtaccttaatcttccaaatacgtctattgatattcgggatacccatatgaacaagagctatgtaaagagaattgactgaaaagaccccataggcagtgagaatctagcgaaattcatcttgctcttgtgacaacaccaaatcagctatgcgaggtcataagttatgccaagcgactaattttgctccgattaattctcatccccatgaaaagcttggaggattttttttgaaagatttgtgagatagttgactgtttatgcctagctatgttatagagacaaggataatgatctctcaagaaggcattacccaaccatttatcctcctaaaaccttatttgagagccgtctccaatacaaaaggacccaaacctaagaaaatcttagttggctttcataagactagcccaaaaaagagtatcccgctttccaaaaagcctgagataaaggttgtgatcccaaatatttattgcgtagcatttgttgccactttccgcctatggtgagcaatttgtatagccacttgctaagtaaagctatattctttattttgaggtcgtgaattcctagcccacctggatctttgggatgacatataatgacccacttagcaagccagtatttattcttatatccatgcccatgccaatagaatctagatcgaaggtagtcaagtttcttatgtacccctgtagatattgtaaggaaaggcatcatatacattgggagactactaagtactaaattaatcagagtaagtcatccttccaacgagagaagttttcttttcacccgagtaagtcaccctcccaaatctttcaaccacttctctccattcctcatttattaacttcctgcaatggatcgggatgccaaaatatcggaaagggaagtagacaagttggcaacccaagagttggttatattgatctttatattcaagtgcttcaccaaagcaatacagttcgctttaatgaaagttaatcttcaagcacgacatttgctcaaaggctagaagcaccgacttttgtaacgccctgaaattaccctaatatttaaatcgtgtcttaatgcattttctagaaattgtaaaagctaaaaagagcctataacaattaaaaatcaccaagattgaattcaaaatggcttgtgggaatttttcttaaattctcatgcctaaatattcttaaacaaattttacatgaattttcagagcactctaaacaattttaatgcaacaataacctttctcagagtgtttataaaagaaaaattaaaataaaatcctctcctcctcttgggctgcttccggcccatctctccctctctccctctctcggcccagcccagccgccctctctctccctctcccggcccatccagcccagctgccggcagtcgtcttcctcctccagccgaccggccgctcttccctgtctcccgcacagaagcgccgccactgcctcttgatctccttccccggccgattcccctcccgattgagtgcaaaaatcggttcctctcctcctcttcaattcccccataatttcccactccatcccgcattattcgcagtggattttgatggcgttcatcaatggtgagctccactgtggccggtgtcgatctccctccctggcgcccttctccctcccctccggccgataaaagggagccccaacccccttctctctccccacacactgcccgttctcctctccctctccacggccgccgcgctgttctcttcctacgccgccgccgtcgcgcaactccggccgcccctcgccggtggacggaacctcctcggagcccggcgtcgccgccatctgcttcgccgcttcctcctccttcccgtccactcctccgtcgagcacaaggaccacgggaacgacgacaacaccgacgacccgaagctcctcgtcgtttctccctcatcgccggcatctccgtcgagctctcgccgccgcgttcgctcggtgaggaccgtcacctcctcccctttccgtttttcccctttccgcactctgtcgcagcgccgccgcgccgttggccgtcgccggcgagccgccagtttctggtgccactcctgcccggctgtgcctgtgcgccggtgcgccgtgagctgcccttgtgcgctcggctcacgatggaccgagcggctggcaagtgggacccgctcgtggacccggtccatgtgcgctctctctttctgttgcaatagatcaatttttctttagaaaaataattcacaaaattgtaaattttcatttaaacaacacctaaacttcaaacggtcatatcttgaccgttcgaacttcgaatcgacccgttcaagtctctaatttttccctataatgttaagaacctacttttgtgccttgttgtactattttgatggtttctcttagcctagtttcttttcccttgtcgcgtagattccgttgtcgtgccggaagatctgttgttcgtcgcagtggaccgcgaagactttgtgagcaatcaaggcaagtcatatcataccttgaacatgttgaatcctaatgttgtgaaaattatattgttttactattattgcattgcttttataacctatatcgtttactattgtttttattagttattattcctattatccttgttatagccatattgatttgatatccatgtccttgagaaccctaggtaaaataaaatgactagtcaagtaccctatatgttggacttactagttactttaggtttatgcttagccatacctagattcaactttagaatttttggataatttgggatatagtaatctcaacttaaaatcttgattaagtgctagatcatcaactaggtagttgatgggtgggagaaatggtgttttctttgcgaaaactaaaactcgttttggggctctctcgggcatctgttgcgaagccttatcgtacaaccacaagtttgataggtaaggcctgaccggaagtttaatctgtctcaagatagtgaaactcaggagctatgggttgtgggtcggtctctgaccaagtggtgcccagtcgcgacggccaatcccatcctaaggaccaggggatcggtaatcaggaggcgagtgctttagtgggttccactgaagggtaaccttcaggagtttcattgtttcgaggcgaattatatgaaaggtcttggcatggtctccgtccgggtaccttcgagtatcgcggcgtatggtggacatgacgaggaggacgtgccttgtggctaaagttgtacacctctgatcagagttaaaatctattcgaatagccacaccctcggttatgggcaagcctagcaatgttactccaagttggtcccgactttctaaaacttgggaggatggattcatgatggttttcagcaggtggtttaacctaggctggttgcatgggctcgcaactttgtgaactgtataattatgacttagatcaggatcgtgttttaaactttgctttaaacttgtgaactattggaactatggctttatgcaaaatgaacaatattatgccattcctttgttacccttatgcattattgtgcacctccggtatggcttactgagtaccgcgtggtactcattcttgctcacctctacttcagaagttggatgctttggaggagaaggcttggactgctagctcgtaccgccatcaagtgcctgtgtggatgctgctttcgtagacttccactatcttttttgtttatctttgaatgtaaaggcctatgctcactgtttaataaagtactctatttatgcttttgcaagtgtggcttgtaatacaacaactttgttattgtaccccgccttcctgggacggggattaatacaatgagcgtttgggaaaatgggtgcatttttccgggcgtgacaacttcagattttgagctttctgtaggtcatggttcataaaaagcaccatgtcatcggcatattgtagtacggacaaccctccatcaatcatatgcggtatgagtcatgctttgagcatgtttatcaaggtggctaacatgtcagcaaaaaagttgaataggattggagagacagagtctccttgctgaatgccttttttaatccggaaaaaaggctcgaagtcataattgactttggccgcaacaattcccctgggtatgaaagattcgatccaagaaatccacttgggcaaaaaacctttcattcgtagagtttgtagcaaaaagggtcatttgaccatgtcataggccttttcaatatcaatatttaaaatcaccccattcaaccttttcttgtgtagttcatgtactgtttcatgtgtgatggctccatataggatgtttcacccacgcatgaaggcagtttgagttggattcagtacatggtttacttccgagataattcggtttgtggcgaccttagtgaataatttataactgacattcaacaaatatatcagtctgtactattggattcgatttgcttcttcaacttttggaattaaagtaatcaccccaaaatatagataaaaaatgggaagactgccagaatgaaattaattaaataaattcaacaaattatgcttgatgacatcccaaaatttttgtaaaattaatctgggaaaccatctggacagatagcttcctttgtttcttcctcttagaaaagggcagtaagaaagtcattttcagcttatgtaacctaaccatatcatcagatatgctctcatcaagtgaaaacaaattttcctcaggtggtccaaagagtttcttgtaaaaattcgtaatgtacgttttcaacgcatgaaccccctgaatttttccttcatcctggtctagaaagaagatcctcttcttcctatgtttgccattggcatcaagttaaaatattttatattattgtcccataggagtgcatccgagacttttgagcgtaggtaccatttaacctcctcttcacgaagtaggcttgcaagattatccctcgattaatcaagaagattgttttcttgatccaaaaggagtcgaacctctgtaactatgtcaagtgactcaatggcctgttgtagatgagcttttttctgttctaaaatgccattggtatgagcggaccaacctataagatgtctgcgtaaagcactcatcttattattccttcttcgggctacatcccgaccattgactagcctattccatacttcgataacacattcatggaaatcatcccgcagaaaccaactgagttccaacttgatctgcttaaggttaccattgaaggtcgcttcccctgtatcaaggaatagaggtgtgtgatttgacacccctctatatagtgcatgaaccgaaaccagagggtatttagattcccaatctgtggaagtgagaaccctacctagcttctcatatgttagtgtaggaagcaagtttgcccaggtgaattgcctgcccattagagtgatttctcataagtcaaagctatcaatcacctcaatgaagagaaaggccatcgagcgttgtatcgatcattgttgttttttgcactactttctcaaaatgttgaagtccacccccccccccccaaaaaaaaaagggtcggtggatgattttgttggcatgtacttctccaagaaattggatttaaatccaacttggactggaccataaacaaccatcaaaatccatttaaagttatcctcctattgttaagatgaaaattaacaaaaagaaatcccctttaataattaaagatagatccaagacaaacgcgttaattccaataagtataccccttgatctttctttaggtggaagacaatgccagacaaaatcagcacctccagaaaggctatctaaatttatctttgacattttaccctttcttgtctcaagcaatgcaatgtagtctaacttttttttctctaactatctctactgcaaacctatatttagccaagtttgaaagacctttgctagtccaaaaaatacccatcatgaggaaatcattgtagagttttttggatttttggaacgagacttccacaatttcctttttgaagatgatttggtttttccagtgaaaaccaataagtcacaaattatatcaatctccgaaatatcttttactaagcgagcgagtagggcgctgccaatattgtctccctcgtcatcacttgacataaaaggatccacctccgacaaaagaatattggtttgggtaatatcactagacttgtttgctactttagttctatctacctcaatatgtttcaaagcatttatcgagaaagaaacaggaacaatagaagcacccaaagtaactcctaaagatctaagattggcaacgacattatcaagaggtgacggtacagaaagtgaagggctagtaccaataccctgatgaagggatgcattatgggaggccgagtgcagctgagtagtctgtgccgatacctcctgtgcaacaaagctatcatccatattgtgccctcttcattgccttgaccagtgaatcctcatcccctctggccatgccatccaagttttcaaaattggatcgcgcactatagcagcggcgtgtggaatttgcaaccttgctaccccttgcatccatcaagcggggtacaggagatggagaaaagactttcttctgagaaaccagagaaaggacagcagtattccttgctgctacagctgcccctggtgtaagcgaatggaggtgtttcgaccctgttatcggcatgccaagttgctagggtggagaagggcagccgaccggtttaggtgtgcaagtttcaaccataattcttggagtaggcctagctgcaatgtatgctttcccatcaataacacacaggtcgaggtgtggtgaaggccagcactttccaaaaggagttaaaaccagctgcatggctgtgaccttagacgtttgctcctttcgagaggttgaatttttttagttctttgccttcttatgtgcctgatctggacgaccatcctttgacgagtcatcttgatcctcctgtgcatcccatcattatccatatgatcaaactctaagatctgagctaggcagaaattctctttcaccaaagtataagtaatagggtaacccaatttccaaagacgacatctgttgtgatcggcaaaaccacaccgctatgaatgagaaccttcatgcgaatcaccccatacgtctataggtgagcatgtcaacctcctatgccggaatcacattgtgacatcccggaccagggattaataggattaatagaatactcatatcaataagttgcaactttttccggaagctgatctcgaaagaactctaaggttaagcgtgcttggcctgaagcaattttgggatggctgactgaccgggaaattcttcctgggtgcacacgagtgaggacaaagtgtacaaaaaagacttgtgttggacttgtgttgggccttggagaggcggggccttacaaaatggtatcagagcagcctctcacggtttcacggccgcgtgtgtcgcacaaaatagtatcagagccgctgccagatgtaaatgggcctggcctgagagaggcggggcgttacaataagtgggcctggcctgggagaggcggggcgttacaaaatggtatcagagccgccttcacggtttcacgggcgcgtgtcac

SEQ ID NO: 23602 - DNA, 5744 bp, Oryza sativa
atggtataagagccgctgccagatgtaagtgggcccggcctggaagaggcagggcgttacaaaatggtatcagagccacctctcacggtttcatgggcgcgtgtcacagaggggacattcctgacctggggttgatcgacggggacgtcgatctctctgggacgttcctggcctggggttgatcgacggggacgtcgatctctcttaagggggtgaggatgtgacattccggcccaaggtttaataggattaatagaatactcctcgaaagaactctgaggttaagcgtgcttggcctggagcaacttcgggatgggtgaccgaccggaaaattcttcctgggtgcacacgagtgaggacaaagtgtgcctaaaatacttgtgttggtttgtgagggcaatgtgttggtttgtgagggcaatttatgaacctatgaaagctgccagatgtaagtacacacatcatcagtagctttccactctattattgtcattgaaaccccatgattcttaagacggatttcaacgtcatccatcctctttaattcctcaaaagaaggggaggcaacaagaaaagagttctcaccatgagggacagcttcccacatccaatccttccttattcaaagaggtagctcagcctgaactattttccttgacagcaaaccaccgtgaatggagaccaaagccgtgggagctgttgggctgactgcacattcattggcaagtccctaatttggagaaatcaaaattcaattttcccaaacccaaaaaatagccagtaggttatggtagcttgagtaccgggcacttcttagctagatgtgattccctcttgctgcaaaactaatggccagcttgagtaccgggcacttttcagctagatgtggttcctttttgttgcaaacctgtgccctgtggccacttagttttgccccagtgacaacgaggcaccccttttattttttttattttttaatttttgctttagctatcgcttgagcaccctctgcctgctgcgtctattcctgctttgctgccactggcgcggtgggttgcagcagtgcagcttgttgtgctgtccgtggctgctctccctgatcccggaaacaaagtgcccctgaattgcttccatggggaaccttccagaaggactgatgtccgtgagcagctcctccttgccagcgaccaccaaaccccgatctgccggcgttgctgccccagctctcggaaaattgtgcggtcgctgaaattgacgtgggtggtgccgatttgggccgtgctggtttcgcggatgaaactgctaatgccttaccgcaccatcctctcgccgctgccctctagtcgtcgtttcttcacacgttctagccgccatttccgtgtatgagatcttcccctatgctgtgtttttcagtagagagatagcgcatctgtttagacgaaaacaggctaaagactttccatagtacccatcaccaatcgggcccaactgaagagaaggagtgccagattttgtggatggtttgttggaaagaattgtcaccgaattggatcgtgctgaacttgtttcaccgatgcctggcacgccctcacgcgaacgccaagccggtgaaaccacctactctatctcatgtctacgcgcgtgagcactttgtatatgttttgcaaaaggcaatattctccaagcactgccgattgcaccggttgtggatgaggtagtggcttccatggatgcatcacccatccacggcggcggcgatcggagttttgcaactttggtgaagacccccgagaaatatctttcgtacacagctcatccgtatttgaagtagttggcgcaccgggacatgtagtcccaaccactgaacccgaacttttatgttcccaccaccgagaagcagatatcaggaagccgatctcttcccaaaagttttgaattactccctctatttcacaatgtaagtcattctagcattttctacattcatattgatgctaatgaatcttagacatatatacctatctagattcattagcatcaatataaatgtgggaaatgctagaatgacttacattgtgaaacggaggaagtagcaaagatttggcgtcatggaaaggagataccgaattcatctcctcaaccttcatactagctgataacgaattactgaccagatgtacagaatcaggttgatgagacgaactggacatggtcgagagatgatcaagtacttcgtcatgttcttgatcgcaaccatccagagaagcaacatctccttcctcaaaaacaacggacaaactagagaaacaagaaacatccggtgaaggattcagagctaaagacgatggcgacgaaaagtgcaccgcgcataaaccttaaaacctgactcatctcctccatcgatctgcacatcaccatctgcaacaacagaaataccttgtcccgatgcagagggtacgcttgacggagcactccttaccggctgtacatcatcgcagagttccaacgtcgaggtcagccacgcccaaacgagtccctccatgggttgtgtctgaccccctgtgatggctagaggcctagagcaccattttcagccagtcctggacaagaaggaaccgccgccggagaagactcattcatcgcgggcagtgaggaggaatctcagaggtggctccacaggatcattgatccgtttttgtggttaggacacagcgccgacgaggacagggtgcatctgcacgaaacgcacgacgacctgctagccggatcgacaaatatcagacgagaaacagtggccggatctggacacaaaaacgcgccagaaaaccggaaggaattggagcctccgaaggcgaagccccgatgaccctcccctgagatcgtacaaacagtcgcccctccacgaaacccggatttaaaaattcaaaattcaagatttttttagttcttaagcaaagccatagcctctgattaatttgttgggtaaaatgaagggtggagtgaaggagcagcgaatatatacagcgcccaacaagtatagtgataaaataattactatctgtatcatttccaccgcccagcatgctgttatactccggcctcccctcctgtactgggttggtacatgggttgaacctattacgctggagtggactgaatccattcaccagaatggtttggggtggattggacaggaattcaaagtgggttggattggtttggctgttcgaggaagagaaatggattagtgtgttgctttcgtgaggagatgggctggggtggattcgaactggattcctgccccactagcaggccttactggcaagccaaatggactatctcgaactccaaggccagcaagcgacagacggtgaacctctgaaccgactgaacagatgcagagttgattaaagcacgttggatgctattaaaggtgtgtagtctttattcttaatctccttaatctgtagtagtaatcagcagccgtcggaagggaagtggaaggctagcaagggtcgaagactcaaagggtgccgcttgcaccggtcgcttcccatgcccgtgcgggaggagcgctagcggcggagacctggcatggtgctccattccaggcgacgaaagcgtcacgcttccgtaggggagagcgaactggctagggaaggggagggaaaacgcttctatccggttgtcccatctcgaaaaaaaaattggacctctcgctattactttgatgtatgtggcctttttgtcagatcctacatatgcttccttactaagcagcatatatgaaggagagaggacacgagatatttgcatgtacataatatccttttagtaaacttgaaaatgatttttcttctagattacttatccaatttatgatccgattacaccatggtatttgttacaattaaatctttacaacaagaactcacatgactatattataataaaaacacacatatgtttcaaccaattcaatttaatgtttcacatgtgagaataagatgtttcagctgacattttattatgttgcacatattaaattagtgtcgcatgtatatatctttctatattgtatcacatggtgctatttgtatgtttcagtaagtagtttattatgtttcactggtttatttgtaaatgttgcatatgtgttggttgagtgtttcaataagtattcactagttaattaaaaatatttcacacggtatcattcatatgttttagcaaatatttaaaatgttgtaaatattatacgattggattatactatcatatttgttgcaattaaatctttataacaaggtctcacatgattacattccgataaattttaattttagcttatttttgtgttgcggttgattttttccgaacgttgcacactaatttatttggatgctccaataaatatttcccgatgtttctttagttcattttgcaaatgttgcatgtcatattatgtataagtttcagcaagtgttactttatgtttcaatagttacaactcgatgtttcatatacatgtgctatgaaaatatttcaagaaaatcaagtctttgtaaatatatagtatttatcatactatcttcttttgtgtttcatttgttaagattcaatgtttcatgtagtaattattagtgtttcaatgatattaaatattatatctctttgaaacattattagaagcgagttgaaacatttgacctcgagtgcggaaacattttttataaccgatgaaacaacacatttttaattattttttatcaaaatataatcatgttggatcttactgtaaagatttaattgtgatgaatacaacggtgtaatcgaattatagattggataaataattgagaagaaaaaatcatttgaaattttctagcaaagttggtttatgctagcatttgatgggagagagaggagagagagtagttaagtcaccatacacaaaaataataaagtaaggaagcaacagtgcatagctacatacatggagcagaaccatgtgagtagcacactaatccagagtagcgtccaatttttcgtaatccatcggacgtccgatctctagttctctccgaaggggaggagatggatgggctcttggtctgaattgtgtgtgaattgcgtgggctatgtacaccaatgggattttaagcgtgcagagcaggatctagaccatcaagatttgatccagcagctatcatttatttggatgatatgaatgaaccacaatatagaaaattgggtaaaagtaaagtacacggtccttaaaattgtaaaggtgtgtcatctaggtcctcaaactctcaaaatacacaagttctaggccccaaatcaccacagtctctctagaatcctacatgacgttgatatggcatgtcacacggacatgacgtggtataatcttgactgacaaaatgggactcacttgaaaatttcccttttcctttttttttctttcctttcctttttattttactttttcttctcattctatttttcccccttctccttcctctcactgcaactgtagtccatcactgcacggggtggtagggtcacagagaaaacgaacaaaaggaagaaaaaagagaaagagaattaaaggagaagaaaggaacaaaaaagaaaaaaaggaaaatttttaatggatcccatttttcagtcaagatgatgccacatcacatccgtgtagcatgctacatcagcaccacgtctagagggacctagacgac

SEQ ID NO: 23603 - DNA, 752 bp, Oryza sativa
ttccataaacctgtcactcatgcaccacaattttttttaaaagaaacattacaggattatatcaccaaactgcagccacaacattcaatattcatgaaggtgtgatagccctagcctaccttatcaagggagttcaagtagtcaacagctctctccctgttgatcagaaaggtttgctcgtccatttcaatgtttggtgatccccttaaataagtgaaaaaaaattatttgttcgctcaactttatattgtatggactataaatttggaaatagttttttaagtgtttatcatttgctctggtcagggatgcttacttgccccaccacagatcatctgttgtttcatccttgacaacacgcttgtccctaggtgatcgaccggtctttgctcctgatagcgtcgctaacgccccactggatgtgatgaatgaccctttctcatatttgattgcatgctcataaagttctacacagcaaagaaaaaaaaaaaaaaaaaaaaaaaaaaaccccccgagagagagaggttatgtaaagagaactcagcatagtaagatgtggattttctaaacctgtgtgcatgctaattagatgagacgtaagttgtaatgcatctatcattctatcaaattttcattgctgaaaaatatggattacatatagaagcaaataatagaaatagcttttacggagtaaagtgaaccgtttttaatattttaggatgtaaaataagccaaaaaataatttaggagtt

SEQ ID NO: 23604 - DNA, 676 bp, Oryza sativa
taaatcacttttaataattgactaatctttgatcatgtagctagctagtgctttgctactccgagtccatgtgctcgacgacgaagctgcggatgaggcggacgagctcgtcggcgcgctccgaccacggatccacctcgaagaagccgtgctgctcgccggcgaactcgacgaacgccacctccttcccccactcctcctcatccgccgcgcgtagtgctcgttccggtccctgaggatgtcgtgctccgccgccacgacgagcgacggcgccatcgccaccgcctccagccccggcgcctccggcccggcggggttcagcaccgggtagtccctcgtcgcgccgcccggcaggatgaggcgcgcgtacctgtcgctcatctcggcggtgaggaacgcgccggggcggcactccagctcggcgcgcgtccgcgtctcccccgccatggccggcatgaggagaacgtgcccgcgcagccggacctgcgggccgagcccggccttcccgaaccgcaccgccatgtggtgggtgatgttcccgcccgccgagtcgccggcgacgaacacccgggagaagtcggcggcgtcggcgagccacgggtcgcgcgcggcgctgtcgcgcacccacgccatggccgtggcgccgtcctcctgcgcggcggggaggcggtgctcc

SEQ ID NO: 23605 - DNA, 27394 bp, Oryza sativa
ctcctcgtgcttcacatcgtcaaacggtcaagcgaataatgaggtatttgaatcatacacttgagtttggaatttggtattctacttcatcttttatatgcttgagtgattattccgatgctgattttgctggttgtagagttgataggaaaagtactagtggaacatgtcattttcttggtacatcatagattgcatggtcttctaaaaaacaatctagattgcatggtcttctaaaaaacaatcttctaaaaaactgtagaatcagaatatgttgctgctgctagttgttgttctcagatttttttggctaatatcaactttgaaagattattgtcttatttttgagaaagtacctctcttttgtgataatactagtgctataaacattgctaagaatcctgtacagcactcacggacaaagcacattgatattcgcatttactttttgagggatcatgttgagaagggaggagagaatccattatatgccactgactttgtcacacgtctacgatttgccgctgattttatcacgttctacaatatgccatcgacttttgcttaacttctacgatttaccatcgccgtccagttagcctccgttagtactgtacaaatttgtcgaaatgaccaaaatacccctaggacaaaaatttccaaaatttggataaaataatcgaaatatcatatggagggtgagctcggcgtcgccatgtcgaggccatgcgtcgaacacagccgacgccgatcactctctgtctctcccgcattcttgagcggtatgggtgagagggtatggtacgataataatggcaaaactgtcattttgtgtggtttctctcctatcaattgggtggcttctagtgtcctgtagcaaattatcgattttttttgagaattaatattatttttatggaaaatcgcaaaattagtggccatatgtggaaaatcgcaaaaataggtccctatcgaacgggggaggaacgacaggggccttatcgaactgccagccttcgattggtacctgtcgaactgcaaccattcgacaggccggcctatcgaaccggggttgttcgactgggcccaccacccggtgccgcacggcctgtcgaacatggggagttcgactggtcccgccgcctcccctgtcgaacaataggcgttcgataggtccctttatatcggcagcccgaacccaactttctctaaaccgattgaggaggaccacatcgccatcgtcgccattcagtcgccactgctgtcgctgtgcgcgccggagggagtgaggggagggtgtgggcagctagtgacaagtccggggcggcgccggcctggagggcagtgaaggcgacggcttgaagtggcgacattgaggtataaatttgtaatccctaagtatgaggcttacgattttttaatcttatagaagaagacttgtgatttgttaattgtttatcattctccaatgtgactacatatcatatgatatgttaacatttgtcagtgttaaatgtgagtagagatattaaattagtcgtatgctaaaattagttaagttagtaaatggtagtacatatatttaatgtttgatgtgtttaaataggtagaggttaatacaactgggtatgatgattaaattagttattctttaatattagttgtaacttattagaaggtagtgtactgttagttataatatcgtaattatcgacggcttaaattattaaacgtaagggtaagatatgtgtcggtcagtaccgtataataagacaatttataatgttttatcaggatgtcaggtgatatgcctattcgtctgtattatggagatgctcctatacaaatatgtcatagcgaagtggatttgactgtatatgccttccatgatactagtctgaatgcaccggagcatatgggtttgaacgacgtgttagggtggttgtataatatgtttggggtagaaccagtgctcgataaatttgtcataaatgtcgtgtggccagtaaggggtcaacatggatggcagtggagagtagtggaggttgcgtcaactgggagttggaggaagtttgttagtaaagtaagagagaaagggtatagcctggcaatagtggtgcacaagacaacatgtgttgatcgatcggggggagtcaagtcatgccgtggtggaagaaactccattagaaggtgcacaagctgaaaatgtttggcggattgagtaaggtcgaggggaagaagtagtagagggtaatacacaagcataggtcattgttcgtgataataatcgtgaggccgacgactcggacaatgaagagccggattcacctatgcgtgttgacgcagcagaggagaatgaggcggtagtggatcagatggaagtggaaaacgaggaatacattgcgcttgtagtggaaggagaagatacaacactgtgggacgacgaaaccaacatacctgatgattggatgaccatatcgatgagttgtatgaaggttaacgatggtttaaatgcccactggcgttatgatagtaagcaggtgcaagttgggcagatgtttcatgacaaatgtcacttaaaagttgcggtgaagaggtgggcatttgaccagaagcgtgagttcagggtgaaggtttcaaataggacgacgtacaaagtgaagtgcacacaggctggatgtccttggagagtgcatggttacaagccacaacatgacactttatgggtagattcgagggttgagcaacatacgtgtttgttggagaatactcgtctggtacataggaacaagacagcggcctttgtggcacaaatggtatattcaaaggtggttagaaaaacatctttgtcccttttcacaataatgcatgacgtagagaaagagtacggatatgagatatcgtacgacaaggcttggtgggcaaaacagaaagcactggagatgaggtttggaacttatgaggcccagaaatttaacccaaatttccagactattttgcgtattaaatccctgtccaggaccagccagggtacacaaaacgacaagtaatatacagttccaaacgtaaataaagcgtaaaatacttacagaagaggcacttagtcctcacaccgaaacaaaagcagcagcagcggaaaaaggcgatcctagcgggcttcagctccactccacaggcaaaactcaactggggtctgagccttggtcctctaactccatcttcagctcagaagcactacacttctgaaaagggggaataatagcaagactgagtacaaccaccgtactcagcaagccacaccaacgatgcagacgtgcaaggggataaggatggtttgtggctatttgcataaaggcggttgtaaaacattttattgagcaaaacagtaaaacggttgagtaattaaagtaatattgaatctccactgatcaacgctacacgagtgaaattcttcccgggtccgccccctagcagcaggacaccagccctgtgccatgacatctcgactaccgggccgcagctcgtgtagccttcatttgtcctagagatgtccatcgacccccgacttcatccatctccatccgtgtacttttgtttataaccagactgagccacaaactaagccttacccactagacatgtggaagtacggtagtgctttgcaacagaggcccgagcttaatccttatagtggccggggtgctacttcccacaactggcatgcacccaaaccccaccgaaaaacaggttttaggggctttgaaagaggaagagaggggtatgtccaattccaccataatccaacaattccataatgtccaaatgatatgagatttcccaaagtctaaagttataaaaccacctaatgttgcctaattaaccagcgaagcctctacctaagttcatactagtggaaccataaatagagtacccactagttggggttttgtttaacctagggtgaacaaggtaataataacaatagcaataataataaggtcataacaaaggtaaataggcatggctaaataaaacagtgataacgcgggaatttaaataaagcgataatgcaataatttaaatcagcataattttataaactgggattcaatatgttcaaggatgatgtgacttgccttgctcagagagaacggcctttcgaaccttcggcgacgaccacgaaccacgcttcgggaacctccggaacgacgaaagctacgcgaagcacacaagcaaagctacaagcctataaagaagcaataaccatacataaaaacaaagcacagggttctttaggttttaacaaacattaggagacttgaacgggtcgattcagagttcgtatgaccaagatatgatcatccgaagtttaatgctgttacatggagatttgcggattattgtaattaggttttgcaactataaaacatgtgtaagcgctagcctggaaaagacaggaaggctgcgctgttgacatgcggaccccacatgtcaacaaaaaggaccgcggtagaccgagtacacagagacggtccacgggtcgacggaagcagatcccgtgtgtcaaccgaggcgagtggccgacaaacggactccactagacaccacacgggctgcacacgtggaaaccacgtggctaccgagcgggcacactaacacggacactacacggtcaccacccgcacacgtgaacgactatcgacaccggtacacgggtaccggggtcgacgaccgcacaacgggtacggggcgacaccgaaaggacgaggacggggcagcgagaggagagatccttaccaccacgcgacgaggcgtgggaacaacaacgacgaccgggcgcggcggaggcggccgggaactatggagacgaacggggaggggacgacttcggcggcgatccttggacgaaggcgagacgcggccggcacgagacttgacgacgcggaggcgaggacgaagacgatgacgggggctgcagcgcgaggagacgacgagccggcgagacaacgacgaccggggccggcgaggagacgacgagggcagccggcagtggctgcacggaggcgaggatgccgtggaacgtgccgctgcgatgccgacgacggaggcagcgccgcgagacgacgagccggcgagaaggaacgatgacgacgaacaccggcggggttcgatcgaaggggaggcgaggccgagggcgaccttgccgctgcgatgccggaggggaagatggcgacgtcggccggcgcacgggcacggcggaggaggctgccgaaggcgacgtcgacgaggagaaaggagaggccggcgcgggcgacggcgttccggcgaaacagaggagcagctggcggtgaggacaacgctgcgacgtcgacggaggagatggcgacgtcgatcggcgtaccggcgatgtacaggagccgaccggagaccgggaggtactggacgcagacgaggaggccaccccggcgagcttcgggcgaggaggaggtgatgccggggaaggaggcgatgccgcggtgtcgacgaagcagacggcgacgtcggccgacgctccgacgagggacagcagccggctggagggagtacagtggcaccaatgccactggttgccggcggggacgcgtctccggcgatttccccacgaatcggaggcagcgccggcgaagaggaggcggctgcgacgccggggaaggtgacggcacggccgggcggcgctcgggcgaggagggagaggcggctggaggcggccggcgcggaggaaagagaagggcgacggcgggaacgcgcctccggcggtcaccgcgcgaaacggagggtaggccgtgggagaggaggcggctacgatgctggaggaggcgacggcgcgaccggacggcgctccggcgaggagggagaggcggctggagacggccggcggcacgggagagagaggaggacggcggggagatggctagggaccacggggaggctcgggatggggttaaaacgatagaacggaggatgaggatcccattttatagcggagggaaacaagccgggcatgggagagggcggaacggcgacgggaatggcggccggcggccatggaagttggccggagttggcgcgggcgttcccggcgattgggggcacgattcaagggggaaattggggggaactgaagaggattcaatggggattaattccccccactcaatttggaaagaagggcattgattcgcgtggatttaggggaggaacggcgctaggtttccggggagagagagagagaggaggccggctgggggaggaagacgaccgcacgtgctgcgcgcgtgcggggagcagctcggcgtgggccaggtggctgggtggcgcagcttgggccgggcgggaaggagggaggggaggggcggcccagaaggaggaggagaggagggacttcgggctgggcttcgcccaaaggaggaagaggatttatttttaggtttttctttttaataaactttgataattgtttttgttgcttaataattatttccggtgttctgaaaattcaagtaaaatttgagggctcctttttagaccaaggagaatttaacaaaaattctccgagccacattcgaatttttcttgtacgtattttagtgtttgccaatttcttttcgaattttaattaattttattattccttttggaaaatgatttttatttcgggatgaatttatcaggacgtgacaactccctggatgcccgttgctactcatgttgtgggcgcacgagcacttcgacattgggaggcctcagctggactcgtatgcaaactacggattgcgagagatgtacaagtccagggttggtgacctcgacgatcgtcccactatggaatccttgcggacacaccgtgagataatttttgtttaattcgtttgtcttctcattatgaccggttcaatactagttgaataatttcctgatataactaatcataagtactatcttcttgttgcagctgaagtgggttagcgggacgacgcgtcgtgtgtacacacagttcgtagctgactttgatcagcttatgcctgaccgtgtgcggtggacttcgtacacacagcacgatgtcaatgatcatgcaccgcactgtctcgcggacctttgcacgcgggatcaagaactctggaggacgacttgtcacctcgtgctggacgtgcacatcgagccacacaatgtccacagggttcttaaacagttgggcatgtatcaagagttccctcccagagttggtcgtgctttggctgatagtcttcataggttggtacacattacatttgcttaatccaattttaacaaaaaatatgtgtatgtacgatttttgctaatgtgtccatttcttgctgtgcaggtattcccgaaaggggctcgggctttcctacgagcttgttattgtgaccacggttcatccgactgtacaagagtgggagcacgcagctgataacttggcactttagacacctccagacgatgggagttactatggggcttaccttcgttggtaccgcagtgtcacacgatggaggtgttttccgccacaaggagatagcaccgttcctcaccaggcggcgattactgacacgtttgcccctcagccttgatcagcttacaactcaatgatatgtgtttattcgtggaacatgcggaatgtgagcaactagttcagtatttctaataaatgtgcaactagttcaatatttttaataaatgtgcaactagttaagtatttcttataaatgtgcaacttggtcaatattcgtaataaatgtgcaacttgttcaatactttgaataaatatgcaactatatcataattttaaatgtcttgcttatttgtggaacatgcagaatgtgagcaactagttcattatttctaataaatgtgcaactagttcagtatttctaataaatgtgcaactagttaagtatttttaataaatgtgcaactagttaagtatttcttataaatgtgcaacttggtcaatattcataataaatgtgcaactagttcaatactttgaataaatgtgcaactatatcataattttaattgtcttgcttatttgtggaacaggcagaatttgttgagcacgttcaggtcgagtcagacaccctgctgcaaagactagagacgagacctccagtcgtcagtcctgacgacgtggcgagcgtccttcgcaacttccgtgcccgtgctgccgcactacttcgtcgtgtctcctgtcggagcgcggcagatgtggtgcagccgtctgcccgtagggcatcaccaccactaccccgacgttccagcgtggatcacagtgctccctcctcgtcacgccgcgggtacgaagcggcccggagatctcacagtcgtccttcctttcaacacaccccagcaccggagtacaccagggggtcagctggatcaggggtacccccgacgagcacggcacagccacgtccccaggcattccaaactctgccttatgttcaccccacccagggagcatctgggtcgggacacttcccttacatgccaacaggggacaacgtgttgaacacacctgcatggagacttcacgtcactccgcgtgcgccagatcaaggccacacatagcacacatgtaagtcattttaaataataacacgctttagtttcaaattatatgtatcattactaactatgtgattttttgttttctccctcttatgcaaacagacgatgaatacggttcagcgtcgacgcatcatggaatgcctgcttactcccctcgcacagcattcgttgaggacttcttttccactgagcctcctcaaggggaatcagggatggattactggcacgcagcacctcaggtgacacagtcgacgtaggagacggggccattcaggctcccgatgtgacaccacagtaggcagcaagagagaggcacccccctgataatttgacttatcccactgagcagataagacgtaggaagaagggaggacctagcaagcgtgcgaagggcaccgatcgtccttgagttatctatttctgttaaaaaaatgagacatttatgttgtgtccgtactatttgtgaacaatttattattaacttagtaactatcagtactatttcataatcttgttcggatgattgttttttcataccctttccaacgacggagtacaaaagattcgcgaactttgcagcgcactatacgacacacgcgtaaatgcatgcacgtggtgtgcaatctactttcggcgcaaatgtcactctgtggtccaccccattttcaactttatcgactacagagttatgaaaacgaccatgcgagatctcgctcgtgatcacctttcagtacagacccctcactcgtgcccgtgaggtctatccacacatcaagcctatcttcaccactatgcttcctgcagtcgttacggcactataaatacataccttcaccaaacaatagctcaccaatacctttcctctttacatttcccattgtcttcagcatagagttcaacacaatggaagctccattctgcgagcatttagattggcggagagatccactcgtaggtccatttccaccatggtgcgaccgcccaatctgcgcatgcggtgatcgatgtatactcatgacatcacttactactgaaatccgcggtaggagatttttccaatgcacaaacatttaccaggtatctgttcaatgtattgaaatctcaacatttgcacatgtttaacacgtacatcgctaaccacgtgtctacaatatctcaaaattttcagacttaccgtagtttgtaagactttgttgagtgggttcatacgatgaatccacaacgtgacagggcacgcccatatccatgcagcgaaccattatcggactacctaaggaggaatgatgagtacgaacaacgaaaaactgccaaatccttaccatggcaagtaaatccacttggacttcccacttggcgagatcgtccagagtgtaggtgtggagaccgttgccaggtgataaggtctgttcgacaacaaactttaggacagagatgcttcgtgtgtcctaacattgtcgatgaagatttcgtcgtaagttccactaatttttcactcattcccattacttctgccatgtacctactgtttacacccaaatttggcacctatggatgaaatagaggaaaattgccaaagtttggaaagtttcgggtttccttcacagggccggtcagaccgcaggtatatgggcggtctgaccggctagtagggccggtctgaccgcaggtatgtgggcggtcagaccgtcagggtccgagtccgagcctattttcgtcgggtctcgggtttccttactcgggaaggcatgtttcgtgtttccattggtttctatcccgagttgaatgtggaggagggtctgtagaaggcaagaccaacccctatataagggacaaggccggttcattgtaaaacccctgaatacaatctacttgaatcgttcttttaccatgttttctattttaccctagtttagtccatttttgtcggtttgcaccgtaaaccgtccgccgccgctgcgagagtgcgacacctctttgtaggtttgtcctgaaaacctttcgttttgcccacgagacgggtagttatcctcatatcaatctaaatcggcctagaggctgattttgatctctaaatcggctccgctagccaatttagcttttctttttgcaaaacccatcttgatttggccctttggctagatcgaggtggttggcgactctgtatcatcgcaaggcgtttaggtgttgcgatcgtgcttgtcgacttgtcaaaaaagttgccaacacgatttttggcaactccgctggggaacgatctaatcggctatatcacggccgaatttcgtttaatcaagtagctaccgtttcgtcaaatccaagttttggctaaacggccgaaattaatctagtatcgccggattaatctaatcggctccgaggttatttggtcgtcaccgaatccatgtgaacgtttgccgtgtgtactgaagatcatcatcagggagcagcggccgactcggcaacctcctttccttttgtttcacacggcaacagaggaaaagatcaggctactagagccgatctgccgagagacaagcagcaggagcattgtttccttttattactgtatacgtgcatagataaaaaaaaagatcaggctataccagagccgatctacagagagacaaatcaaagtttatttgttgattttggtgaaattgattagtgcacgtattactcatatcgagagaaaaattaaagaccgtatattaatttactcggtcaacaatttcagctatgagctatatggccggatttaatcaaggattttcttcatcaactatgacgagcgggaacaggttcaataatattgctacacaatacattagaaccgatcaaggcgtcgcgagaggaaacgtgtcacgcccggaaattcactggtaatttccgaacttatttgtgcataaaatcctcgtccaggaatcagccaaggtacacaaactgacaatttaatatacaaatccatcataataataacgttacacacttacaaaagaaaagaaaacagcagcggaataacggtctagcgatggcttcagctccactcccacaggcagctcaactggggtataagccaaacgtcttctccttctgaatcctttttcttcaactgaggttgattgattattgcaaggtgagcatatgacatactcagcaagccacacagcaaatatgcaagtgcacaaggataccaaaggatggcataatattggctcatttgcaaaagcagcatttagcaaaacatttaagagaagtaaaacagtggagtaattaatcagaaattttaatcaacactgaacagcacacccatgctgcacaggcccaaccatcctgaacaaccatacccggctgtacagatctaatctccaaaccaggagctaagcaaattattaccagatataacacctataattattgtgagaggtgtgagactaatcacgaaaaacattgctcaacccgcccataaccgcgggcacggctattcgaatagttttactctggccagaggtgtaccactgtacccacaagacacagctccacaacatgtcaccatgtgcctcagtactaccacggtacctcggaaaggagctgtgacattaccccttgcataacacaacccaccacagtgcaccgttcccggatcatagtcacccccttataaacaaggcatggactccccagcgacccccatgggcttatctccgccacttcttagtttggtgctccgcaatgaaccatgctatacaaaaggtaaagccgttgcccacgctggcttgtggttggcacggttaatgtttcacaacagtagctcgcgaaccggtccttaattgccatgagcacgactctcaaaaccatgtgctcacaacccaccattatcaagttttagttggcaagtaattaattaaccaatcacgattgaccatcgtgaactatcattaagccatcattaaataatagtgagtcataagttatcccaatagtgtgctaatgtttctaagcatggctaagcaatcatatctaatatctagctgaaccaatatataaagctcaactagtcaagttataataacccaaggtatcaaggaataaagtaatcaatgcaaacaggccataacaaaggaatagattcacaccacccagtgacattcgaaaataaatgcacagttgaaataaatagagaatttaaatataggatcaacatgctcaaaggattgtgtttaggatctgtgtgacttgccttgcaataatcggtcttcaattaatcttcttgatcacttccgacgcactcacgaaccttcgcaacgatgaaaacgacaagctaacacgcaaaataaagaaaaagactaataaaaaccaattaaacaatacatataaagtaaacaaacatgtagatcacaattttagatgaattatgagacttgaacggcctcattctgacttcatatgaatttattatgaattttacaagattaaatctaattaaagcccatttaaaaagaattaaataaatttaattcaatttatggacaattttaatatgtagatctttattttatacaacttttgcaacttgaaccacattaaactgagttacaatgaattagttatgaattttcaaagattaaatcggattaaaacacttatatggattttaattgaattatgacgcaataatgaattatttttgaaaaggaaaagaggattattgcgtcagcggctagggtttgcggtggaccgggtgcacggcagcggttcacgggaacggacggccgagatcaaccctatccaaaacggacggccgagatcgatcggatccaccgcggctcacggacggacgacgacgatgacatcagcgactacgtcagcgatgacgtcatcaccggcgacggctcggcggctcgggagcacttgctcgccggcgaacgacggcgcgaagacgcgagcggagggcaccaacgggtagagggcgacgcggcgaactcaccggtgaccaaaaccacggcggaagagcaacggacggcgccggcgacgaggaagaagcggcggcggtcttcgggtcgacggtgacggcggtgctccggcggtcttcggcggcggcgaagcggtggacggggacggcgacgacctcgcgatcccgatggtggcgacggcgaccaacgacgacggctgcaacggcggcgcggcgcggctgaaccgacagcaacgacggcggcgactagggctacgcggaggcggcgctagacgcgacggcgggctaaggcaaaggtggcggcggatagaggagagctcgggggtgctttcaaaggggctagcgagcggcgacggaggcccacggcgaccggcggcgagatggaaaggtagagcttggagagagagagaccgatccgaatcgacctcgaatcaaacactttccaagcgattttagccggtgattccaaaagagaaaaggtagaggagatctcggagattatttcccctcaatcgatttcaccggatcgggaaaggagcggccggatttggaaagagacggcggcggcttgcgctagggtttcggccggcggcggcctgtcagcgacagcgagagagagaggagagcggcggctcggcggactgggccgactgggccggggagagagagagagggtttttgggccgactttcggcccaaagccaaaagaagacttttaaaaacctttttcaatttaaattattcatgaaatgcaattccatttattaaaaatactttcttggctcaaataaatcccagaaaaatctaggaactatagaatcaagtaaagtatttaacaaaattttatctagcccaattttatattgagatttaacaaattaaaattagatcttctcttttatgcttttaagatcatttctaataattccttttaaacaacaatttataatttaaggatttttaaacaagaaaagctcttaacaattataattagatcattaatgatcaaataattactgaactgttctttgtatcatttaggaatttagctctgaaaaatccgagaaaatttcagagagtgaaattaatcatggagaatttaataaaaattaaatccatccatgctttatatttaggaaattttatttcccacatgtaacttcacttgaaaattaaagatcatttaatataaattctattattaatttattaaataatttataaatcctgaaacaaaaatcaagatgtgtaatttcaccaaatgtaaccctcgattcgcccaatccgtcctttgctattcaaaatgttaataatcattgtgtagatgcatatgctacgtctaattttgctcctatacaatatgcttataatgctagggggggtcaatgggtgattatacagccgattacacaggaatcggctatatgcaaaaccgagctgacagtatgaccggtcgtgacaccagtctaacagcatcctttgccggtcagaccacgcccaccatggccggtcaaaccgtgcctaccatagccggtcagatcgtgccctatcctggccagatcgcgcctcctgtggccggtctgaccgcaccactgaccaccggtcagaccgggccatgggccgatcagaccggttccgtgggagtttctccaggttttcataccacgactagtagtactgattttaattattatccatcacctgttaatactgttagtcatgctagtccacatatccgtaatgcctacaatgatattaatagggggtatcctcccgatactagacaaggccaatataatcatattgcttcacaaacataacctattaggctaccaaatctaccaccaaatcaacatgggcctaataatatggaggagttgattagtgccattatcagggctacatttggggttgaagcgaagaatcgtgctagggagaaccaaaagccgtattctgatttttatgacgttgtcccatatcctcctaattataaaattcctgaatttactaaatttagtggtgaggatagtaggactacatacgagcatgtatatcaattcttagctcaatgtggtagggctagtagtatgaatgcgtgtaagttgcgcttgttttctttatctttgtctggtactgctttgatatggtttacttctttaccggcaaattctattgatacttgggctcaattagaacaaaaatttcatgattattttcacactaatgaaactgagcttaagttatatgatttaacatcggttaggcatgaatacaacgaatctgttgctgattatattgaaaggtttagagatgttaaaaaccgatgtttcaatttgaaaataactgacaaagatttggccaacattgcataggatggatttcttgattctattaaagagaaattgaatggccagatatttcttgatgttgatcatgtgttgcatgaagctctggctcaggaaagccgagtggatgacaatagtttaaatgctagtttagatgaaagtgcaatatcatgtatagccgaaccaagcgatggttcggattgtgttaataatttgtgcaatgatgccataacaattatagccgaaccaaatgttggttcggattatcttgctagcttggataatgatgcaacaaccattatggccgaaccaagcgacggttcggattgtgttattagtttagacaatgatggaatatccgaaccaagtgacggttcggattgtgttactagtttagataatgatggaatagccgaaccaagtggtggttcagattgtgttgatagcttagagaatagcatcattgaagatatagccgaattagatgacggttcggattgcattacaagtaaaagtgaaatagcattataacctaagaccgaatcacaaatcgatcatgtgaatgttggaaaagataatgacaatgtcttgcgggatagtggtgaaatagaatccaaagtagctatgcatacatatcaaaggccgtatcctgaacatgtagattcggtcccatatccgcaaggattcgaggtgcccaacttcacaaaattcacaggtgaggatgctagaacaacaatggagcatatcggctgctttattgatcaatgcggtaagcccggtagcaatgatttgcttaagttaaagttgtttcctctttctttgtcaaactttgcatctacatggtatagtttgctttctcctagttcaatttctacatggtcacaaatggaacatgagtttcatgattattttaaagatgcaagcttgatgaagcaaagaccgattgataattcatcggtcatttgtgatactatttcggttacacctatgcctaagaccggaattgttagtaatcctctccctgttagtcctattgatgttgacaaaaaaaagggaaaagtgttattattggggatcctcggcccaaaaataggatcaaaaatgcgaaggccgaagatcataaagttgcaaaggatgagtcatctagtatccaaaggaccaaaaagccgaagctcacttttgagatgcttatggctaaatacaagaaaggattagccggtcaacgatttgataatcaaactagtgattcaaaaggaccaagatcatctcgtaggaagagatttggtcaaacatcaaagcaatcggagccatcaactataccaactccacacaaacctccggttgtgatgccatggtatccatatccaatgtcactatatggttatccttttatgtattgcatgccttggatgcatcaaccacctatgccgtattaccaagagtggaaggaatcacctaggtcagtgccaaatcattcatctaactcaagacaagaccgtttcccacaaaagaattggtccggtagatcaaaggtgaaaaatgtgaagaaggtgtgggtgaggaaagaagccaaagctccggaggtcgttgttatcaatgaggagtctcaagatgttcatgtacctactggagatgcgttggaaaccatacaagcgaagaagactgaagccgacgccgttgctgtcgacatcggcggtctgaccaagacagctggccggtctgatcgccagactatgtccggtctgaccgaccctcctggccggtttaaccgacggcttacagccggtctgaccggggagcattggagaagagtgagaaaattaaagcagcacaggggcttccacttcgaccaaaaatatgaagaatcattgcttagctcctggaaaacaaccacagccgaagtagataccttctggcttatctcgccctcaaaagaggaggctacaacgtcttcgggccataggtcaaaaagaaaagaaggccgaagatgtggagaacaagacatgcaataatttagagcctcgaacagcacctaggcaagtgtggagaaccaaagaggtaaaagttaagtgatcggtgatttcccatagtagagataaatccaatttgatgagagaagaatcatcggtcattagagataagtctccttcacatgatgctatggatgttggtgcggtgttcgtcttgccttcgaaatcgcgcaatctagaaagccgattttgctcggggggcaagacattaatatgctcatgaagaaatcaagagagatgaatggcgatggatacaacatcacatcttttgagccgccgtttgttggatgttaaggcaaggtatgagtttattgtgtttaccgttatatgcctatgccatgttagaacattgcttgctatctagcacatgtgtgtttttacttatcaaattgatattatacatacatgttgcaaatgccagttctaggtagtagaattggtaggttggcatataatttgtttgaattatgatttggctcatgactctttgatatttatttaaagccaaatcatatgtgtttttatagatcaccatataagatatagatttcatatttattgcaccatgaaagtttgcttactagtaattcagctaatgtcaatggtcaatgtgatgatttgctctagagtggttttctttaggaacattggcattgttaatattttacatacatgttcaagttgattacttacatttgtagtttattggaatctatgcatgtgacacatatgactttggtgattcattattgatcatacttcaattggctaagtgttttgatgccatgatgattattgtttcaaaagccatttgaattagtattcatctagacatattagttggatattataatttttttcatatgtctagagagaaggaattttggtccaataatttgatacaccaagcatctggctattatctgaagaaaaattatatattaaaggccgatgcttgatttcaaaagtttggacgaaattggcaaagtcatagaccaggggctgtctgaccggcattgcacggccggtctaaccgatggtaccggcggtctgaccggctttgcatagccggtctgaccgatcccaaacaggaggctggggagcatgttacaattgattaaaaggccaaattaattgtgaattcggacatttgtgcccatgagttagaaatggcttggagatttccttcgattagatatttgaaagatcctacacttaaggttgatcggaagattcggcggcaagcgcttaaatattatatcgccgaaaaatagatggagtattacttagataatgatcaatctaaagttgctaggagagtagtacatgaaggattcatgaaactcatcaatcggcccgtaagataaattggttgcttaggagagtggggtttcattggccgaaaataattgatgattgtttcaaacgttatagagggagtgaagcttgttaacggatcggcaatgttcaattagcgcctaccgctgtgttgaatcctatcattagactatggctgttccgaggttgggctttggatttcattggtcaaatttatccttcgtcatcaaaagggcattggttcgtgctagttgcaatggattacttcactaagtgggccaaagccgtgccgctcaagaatattacttgtacggaggtaattgattttattttgaagcatattgttcataggttcgatattcctcaaatgttaaaggagtttcttttatgtccaaggatgtgagaagtattgccgaatcttatgatattaagttgttgagttcttctctttactacgctcaggctaatggataagccgagtcgagtaataaaacattgttgaaattgccgttttgccagttgaggtaaatcttggctttcttcggtatttcaagcaagacgacttgtcggttgaagattacaagatcttgatgggaagcaattttgaagacgtcatcgacaagcgtttgaagactttgaaggagatgaagacacttcaagacggtgttttcagagagcaattaatgggaaatacttgaagaaatatttcccgagcatttggcaagatgcttaggaagtcctatggccagtaattggactatcgccctaagacaacatgttccatgcttttagattcacggtgttcatcaaaaaggtagggggcatgtgtttacaaccaaatttgacacctatggacgaaatagaggaaaattgccaaagtgtcgggtttccttcacagggccggtcagaccgcaggtatatgggcgggtctgaccggctagtagggccggtctgaccgcaggtatgtgggcggtcagaccgtcaaggtccgagtccgagtctgttttcgtcgggtctcaggtttccttgctcgggaaggcatgtttcgtgtttccattggtttctatcccgagttggacgtggaggagggcctgtagaaggcaagaccaacccctatataagggacaaggccggttcattgtaaaacccccgaatacaatctacttgaattgttcttttaccatgttttctattttaccatagtttagtccatctttgtcggtttgcgccgtaaaccgtccgccgccgctgcgagagtgcgacacctctttgtaggtttgtcctgaaccgttttgcccacgagacgggtagttatcctcatatcaatccaaatcggcctagaggctgattttgatctctaaatcggctccgctagccaatttagcttttctttttgcaaaacccatcttgatttggccctttggctagatcgaggtggttggcgactccatatcaccgcaaggtgtttaggtgttgcgatcgtgcttgtcgacttgtcaaaaaagttgccaacacctacatatgccaatggtcattaatttctgcacacaggaagaagaccgcaaatgtagctacgtaaagtggatcgatatggtccgaagaacttccatagcttcaacgataactcaacctgagacgaccacacaattcattcaggcgtggatggagtacgagcgctaggctcagtccgctagcttacactggagatcaaatccattaggtatacctgaatggtctgatcgtcccaaatgcggttgtagagatcgctgccaggttgcaacgtccttctcacaacatacatgggaggcggtacttcgtatgtcccaacatagatgacaacttcgttgtatgtcacatgcttaattattactttacatttcgcttcacgttcccataacatttatttcccgtcatctaatttgattgattcttcaggggaatccaaggatgtgtgcttttacttcatggatcgacatggtcagcccgacgtacgaaggcggaagagtaactgaagctgaaacgcaaacagagtataagagattgaaggatcacgaagttgctttacgcacacaatgacgtagaaggggtcagtagagaagcttaacgccgaatcgctcttgttcggatttctgttatgttatgttgtcctatgcgtcaatggattatgctcattcctgcttccgctgcaatgtcttcaatcccgtcctattctttatctgtcgttactaaataaattgcgaccaagccatgagaccaaaaatatatacagataatgaaactacaatttcccaataatgaaactacaagaatgaaaatataaactcattcatcctaatattttaaccaaaaaataaatattacaatttcccacaaaatattatttaaaaaataatattaattataaaaaaaatcctgaaaaaaattcacaaataatcacaaataaaaaatcgacctgaggacaagtcaaagaacaggtgttcgacaggaagcctgttgaaccgacggtgttcgacaggaagcctgtctaaccgacggtgttcgactggctcctgtcgaactgcccttgttcgatagggcggcagtcgaacgacctgttcgacaggtcccagtcgaacggcagccgttcgatcgtctcttctatcacggtttcgataagtcgcctatcgaactgcacttgttcgataggaccccatttttgcgattttccacaggtagccactagtttcgcgattttccataaaaataatattaattctcaaaaaaattcgcaaattaccacacttttaaactgtcctcgggtaaattcacatctttgaggtgtcccatagctaattacacatttttgagtgtcctgtagcaaattttgcctttcatcaaaccattggattctgatcactttgcttttcttcgtggagaattgggaataattcatccttttggcatgatttgagggtgagattttgtacctcatggttttatcaagcaaaattttgacaataagaaaaattgaaaaagagagctttgtttgattcatatggtattttcttgtgcatgctagcaatactatgaagatttatttgtctctagcatagcttgtatgtattctagtctttttgtgaagcttagatattgcttttatgggagatgatgcatgacacttaaattctatacttgaattaagcaagtatgcaatattgatactagcatatggtttgatttatcaatgcttatgtatgtgctttattaagttgttattcctcaaatagtttttaattgctcattgtgcaagagaataaaatctatgagagaaaaaaaatgaataccgaatccttggaaacagtcttgacaacaaggacgtattcatgtgagcaaaaataatgggtcccgaacccttgtaaacagtcttgatgacaaggacgtacctggaataactgagagaaaaatatgaacaaaaagggcccaaataaaatgttaaaaagtctcttgattgtttttcttctaaagttaaatttgagaaagagtgataaatgcaataggtatatatattgtttattcttcaacctatgtgcttgcaaagatgttgcattataaatcacatgaaatcatgaattcttattgtcgatttgatcttaattgttatatctttgatttatgtttaaactttagtgcatgcttgctatgatatgatgggttcatcttctttttattgcaacacataacttgatgtgctatatatatgctaagctctagaacattaatgaacttaattcctatgcttgatcaaatcattgtcaaaagggggagaagagaagagattgtgcatgttttcggtcaagggggaatttctttgtttttaaaagtgagagaagttttcttttgaattttgagcacgatgtgtgcgtttgcactaagtgtttttttgggtcaagggggaatttctttatttttaaaagtgagagaagttttcttttggattttgagcacgatgtgtgcgtttgcacgaagtatgctttttaccacttttgtttttatttttccaaacaacaaaacatttttgatgggtttgtcaatgtgttaatcaagggggagattgtaaaatcaaagtattttttattcttattctgtgatgaataattagcatatgtgattattggttttaatatttggagatcattggcgaagtggttttggagatgattggattttataggtgttaacaggtgctgctgcttgtcgggtccggtctgaccgggcagtggttgccggtcagaccggcgtgtgttgcacagtcagaccggccagcccgcggtctgataggccgactctgtgtcggtttcggtttcgagttgttttattggatatccatgattaatatgtgtttatggcttctaaatggatactatgcgtatgtaatattgttgtttgctaacaatgagtcaagttggagatagcttggtcttggaatatggtttctttggttgattcatgtgtaggtgacataatgcctcgggagagtattgccggtgatggatcgggagtcgacttggagataaggcgacatccaggacaactagttatgcttgcaatgcatatccttgttagaataataatattccactagtatttggttctctaaccttttgcagagaataagtataaagtgaaggagaatcgacatcaaatcagacaataaatcaatcggacgatgtcgagaatcagacttatgtatgaatgggccaagaactctgatttgacacgatgaattgggccaaaattcacaagtccgcgaaagagagcaatggaggaggccacctattgaatttgggctaggttgggctggcccctagttcggctgaaccaggaggtggttcggccgaacccccctggcaccgttggatgcatggttttttttggacggcatgaatcactccccaacgacggttggagggcaattccgaccattccaactgccacaaccgtcattggcagcctatttaaagagctcctcttctcacttcactcacacacctcaagcaaaggtctctcatattctctcatgtttagtttattatctagctagtggaataagaatagagtagaaatcggtgtccagaagcatttggaagagttcgggtatggctatagtagctcttctcttcacttttttaagctttctactatattagggtactcttctttatacatttatggtattgaaatactttccgagtatatgaatgccaactttacattatgttcatgctatactgaatatactgctagcttatctgggagatgctttggtgcgggtataatttttgcatatgcaattactctatgtcatgacgatgatattagaatagtatctggtagtttaggcgtggtgtctagattacgagatatcattatttggggttatatgctgcggatgagaggtgggccgctgatggtgacagctcagtacgggtattcctccgtgcgtgtatatagtcctaagttaatttccttgggagggtactcctctgtatttagccccggctgtatggtcatgacgggctatcataagaaactcgacagttaggggtggtttctcgaagtaccaggagggcatcggatagagggtattagctagtatgtcagataactaggatgtatgtatactatgtatactagaagtataggaatagattctctttctcttttctttccacttagcttagatattttatatgagaatgagtagcttcctgcttgtgtgtcactctacccttggattatattaacccctgctaagggtacgattattataaataatatataaattattagtcaggttctcactaccatgatctttccacgggattaaataaatacgacacccttggaatacactcggtgaaatgctacaatggtatatccgtgcgcttgcggatgaactctgtaaccataatataccaggagtatttttgcgccattgcttggaattatatttcaagtaatgtcgttaagaaatatcaacaagcattttctggcgccgttggcggggaagattcataatagagattactagaactaacactttatatttacctctatataatcactgccctttgcaggctaaccttggttgttttcacttttgttgtggaaacagggtagtgtttcaatttgccagaaaactttaaggaaaatccagaagctttcttccggagcatcaagccacgagtcgtcgctccacagaaaactctcccgacaaagaaaccagccataccagcactaccaaccttcaagactatggctgacaagactctccgtgaattcgctactccctctgctgacaatgtggccattgggccacagatcaacatgggagacgtggatttcgatctgaaatccagcctcatcaagatggcgcaggctagcccattctgcgacaagcctaatgaggatgccaatgctcctctacagcagttcctggagatttgcaacacgtacgccataaagggtgtcagtccagacgccatcaagttgcggctgttcccgttttccctcatcgggaaagcgaagcggtggttttatgccaaccgtgctatgatcaacacctgggacaaatgctccacggcattcccctcaaagttcttcccgatgggcaaaactaacgctcttcggggaagaatttcgagtttccagcagacaagggacgagtccattcctgaagcatgggaacgacttcaggaatacgtggccgtctgtcctcatcatgggatggacgactggctgatcctgcagaacttttataatgggctcactctcatgtcccgtgaccacctaaacgcggcagctggaggagctttcttctctaagacggttcgaggagccattgatttaatagagaagatggtctccaatatgggttggagcgaggaacgactccaaacccatcagcaaggtatgcacactgtcaaggagacggaaatgctcgctgccaagctagacctcctcatgaagcgattggacgaccacgacaaacggccacaaggcaccgtcaaggccttggactcacacgtcacgtgtgaagtctgcggcagcacgggtcattctgggaatgacttcctggagacccgtgaggaggcgatgtacatgggcagcaacaataatgggtaccgtccacaaggaggtcaggggtggaaccagccacgcccatattattaaggaggcaacaacaacggtaacttctctaaccaatgctttaagcaaaaagctagctgccaatgacaaagtcttagagaatattaatgtcaagctagatggctttgcttctgcttttcaaaaccagctgagcttcaaaaaaatgatagaaaattagtttgctcaattggccgccttagtccctgcaaatgaatctgggaggattccggggtagcccgattcctccattgaaaatgtcaaggcgatcacaacgagtagaggtaagtccactcgtgatccgccatatcctaacccagcagaaactaacgggattgccaaggaagcgccatctagtgaatcggctgacaaagaggtttagccagaaaggctgtgccacaggagtactacgacacacgattgcttccgtttcctcaacggagtaggaaactgtcagtggacgagtagttcgctctttttgttgaagtaatccagaagattcacatcaacgtgccattgttggatgctatgcaagtgccaacatatgcccgctatctcaaggatatcctcaacaacaagagaccactcccaacaatggaggtggacaaactgactgagcaatgcagcaatgtaatactccacaagctcccggaaaagaagaaggatcccgggtgtcccatgatcacctgctcgatcggggcacagcaattcgatcacctgctcgatcggcggaagatgtgccggtcaagatacgggatttcttcatcccggttgactttgtggtactggacatggacacaggaaaagagacgccactcatcttgggcgtccgttcattagcaccccaggagccaacattgatgtggggacgggaagtatccgtttgggctgcagga

SEQ ID NO: 23606 - DNA, 8197 bp, Oryza sativa
ggaaatccgcgaataaactggaagaggtacggtcttgcacgtcggacttaaaatgacgcacccttcgccaacaggtaaatggtatgtatctgcatatttgttttccacaattgaaatttttgcatcaatacatgtttgaatttcaaaattgcatttaggatctttgaattttgaggaaattcttcaaatgaaattttcagagcaaaccaaaataaaattttcaatgaaaattgtttgtttcacgaccacactgaccgttggaacccaacgaccgaaagtggggccggttgggcccaccaggggatcggccgaaccccctggttcggccgaaccggccaggctaacggtcaggtgcctctttctttgaggcaacggctagtgagcccaacaggtcagtttatccgttgagggtgcactagttaagccaaccggccgggagagggaactccaccccatttcaacacatttacattccctctccaaagtttgctctcaagttcattcaagctttgatagtttccctcaaattcaaaaacttagttgcatatatacaagttgcttaggtgaaactaatcggcgggtgaaactcgtgctatttctaacccccgccgagttagtccgttcttgctccattgtgcagaatgaagaggcgactgtctcgtctgttcaaggggtccggctcttcgtcaagtcatcatgacgagtctagtgctcgttcatcagccgatgtctcgatggaggatgccgacgctccgcgacgtctcctgaacgacaccgacctcgaccttgtcgatgatcatgaaagacaagcttactacatgctgagtgaccgggagtatgctcacacgcgaaagtactcaccagagctgctgaaaaagataggtctgtatgttgattttcgtgctatttggaaagctgttggttggcagagatttgctgtggtagatgagcctggttctcgtttgcttactttgcaatttctgtgcactttgaaaaaaatagaagatggaatttcctttcgctttttccataaggaatacacacttacatggaaggattaagtactcttcttggttttcactattcctgtaaaatcgatctccagaaagaaatttctgggttcaagaaaaataggttttgggaagacatttctggtgctccaatatgcaagaaacctaggacgaatgatatccctaatcctacacttaggctcatgcacaaatggattgctatgactctgtttcctagaggtgatcttagacccattaggggggatgaattaattattatgtttgccatggttagaaagatcaaagtttctcctgtgaaatgtatgataagacaatggttagaaagtataagattttctgctcctgttgagtgcacttctctgattactcggatagcaaaagggctaggggtcgttagtaaccagattgctttcatctcaaccgctcgtccttgtattgatgagaaatatctagtgcaatggcacattcttaaacatggagtagatggatctttgatatactttttccccgattgtacaaatgaaatcccgttgccaaatgcggggtatcatttgtacaactatcatgaactaaccattcccctgcaaaccatagaagaatcttgtgcatgtggaacatacagggagacacacataatggcaaggaatgtacaaaatggcaaaatgattgaaccatgtacattttggttacttgtcattccattgaactttgtcaaattcttgtgacttgtgtagacacttctcatgccctatgatcaagattatacacccacatatatgcacgtgctaaactgctacactgggagctagcaatattccattccattccatttccatactaccacaaaaataaattctccatgctttcatgagctttcttctctaaaaaagaaaatcctttctgaaaaaaaaggaggaaaaggcatggttatgaaaatatatatatatatgaaggagggaaaggcatggttatgaaaaaaaggagggaaaggcatggttatgaaaacaaggagggaaaggcagttagaccgacggcatcgcgtcagtcagaccggcggcgactttagacggctgcagcttcttcggggcggttagaccggacgatctactccggttagaccaacgacttccaggtggtcagaccggctactctactttggtcagacctcgatccgtcaaattaaagggtaactttaatttcttctaaaagttttgtttttttggttacactaaccattcacccccctcttattggcttagttctttctagtcgatcctacaggacgtgctgataccggtagaggtgcttatcaagtatcaacgtgggaatacgaggaggcgatcaggttgttgtaacaaccctcccaccagaaccgcgcagcccagtccatctgatgggtgggcccacttacacattgcacctcacttgtagtttcatccttacttcgtgtaaaaagattaacccaggagtagtatggttgaagggacaaactcttataagttggttccatccttactaacccaacaatgtggtactccctccatctacttttgatagtcatatttccaaatctgaaaaatttatttttgataggcatatttcaatccaacaacctatcatcttaatgactttctcggatttaatgtgtaactcttcattcttctacacaagattggctacatgggcatcgagaaatgtaaatattaatgaatcgcttgtttacgagaaataactagtagcatatttaaatggatgataagtagaattacttatccttggtctatgtgccaagatgaaatatgactattaaaagtagatgaagggagtaataaacatgacacagcactcatgaaccacattaccacacacaggtcacgtcctaattggtctaggatgtcacagttgttatcgactacttcctctacaccgacatgcggctacgtcagactggtcttctctaactcttatttcactgcttagcacgtcggatggtgacgatccatgatcccttactcacatggttcctggtttacgtggtagaaaaattttgttttatgctattgtagcctacctgtaaccttataaaggctctacacactttgtctttacgtgctttagattttcaagcttagggcatattttgggaagctttagatttagagagaacctcatgagaatctagttggtaataatcttgataagccggaaaaccaacatgtagtttctagtttattttgcggattctacaactatagtttctcataatttggacgagactagactgcttgaccttgctccaagactctacaaggaatctacgccccggcgttgattttggtaattaaatacaagcgctaattgtggaccgctatttcatatttaatttaagtgagataatttgagttaggaatttcatattttatatcgatacaactgttgctcacatcatagctgaactgggagacatcaaaatcaagttgtccaagttttgaaattaaattcggtcacctgctacgttgctaacttcaaacaaccaccaaatatgcacacaagctcttggattacttgatggaaaactcttggagtcatctttccaacagatccaactttatcaccaaatgcctttatgcaaatagctacaaacctcccttgtctccctttgcatgattgcatcgttggtgtggcttgctgattatggtggttgtactcagccttactattattctccattttcaaaagttagtgcttttgagttgaaaacgaagttagaggactaaggtttatacccctgttgagttttacctgtggagtggagctgaagccccactagaatcgtctttttccgctgtgctttcttttcggtgtgaggaataagtgtctttttctgtaagtatttacgttttacttatgtttgaatctgtatattaattagtcgttttgtgtaccctgacttgatttatggtcaccaatttatacacaaaattgtctgaaaatttgggctaaattgttaggcgtgacatttggactcaaaaatcaaagagaaatgtattgagtaaaaacatacttaaaaaataatcattgcacaatgcactataagaacattggtcaagaggggagtggtatagagcttttggaagtgcgtgagtagtgaggaagagtgtgtagctcaaccactacgggaccatggaagcacgagcctaaccaagaagcaaatcatctacttccttcgtcctaaaatatagaaactttagattagattagacatatccttttactaggaatctgaaaactatatatgttcagatttgtactaactggtactagatcattatattctggaatgagtgatttgtaggatcgaatcacaataactaagccaattagagggggggtgaatggttggtatacccaaaaaccgaaaacttttagcggaaataaaagttaccctcgaattcgacggatcgcggtttgaccgaagtgtgtgcaccggtctgaccgcctggttgtcatcggtctgacggatgtagatcgatcggtcgaaccgccgtgatcagccgctgcttgctatcgccgtcgccggtctgaccgtcggtatatcgccggttagaccgccgaaacccagtgaaacagaaatcgaagaactcttaaagtagatgacgactttattgattctctctgtgtttacaaagtgcaccaacagcactccttacaaaaatttcgactaaactcgaaaccctaactcaaaactcaactcaattgctctcaaaagcgatatcaggaagcctcacgctccccctctatttatacccgaggtaggcagcctaaagccacgaaccaaactcatactagacgtcctaaacaccttacgaaaccctctagtacaagaaacaaactttacataaccaatcataccaaatttggactccttccaaattcaactccgcatcccatactcacacaatacctccatcgtatgccatatgaaatcttcaccaaccacgtgcatcaactctagcctaagtttccacatgatctctgaccaccacggacgtcgtcttaaccccaagccgactcccggtccatcaccgcaaatactctcccgaggcatcaagtcacctacacatgaaataaacaaagaaaccatattccgagaccaagctatcaccaacttgactcattagtagcaaacaacagtattacatacatatagtattcatctagaagccataaccatgaaacaatcacggatattcaaagaaacaacccgaaaccgaaaccgacacagcgtcggccggtcagaccgtgggctggccggtctgactgctaacacaagccggtctgaccggcaaccaccgcccggtctgaccggtattcatcacctgaaaatcaattatctctaaaacctcttgaacaataatctctaaatatcaaaaccaataattacaaatgccaattgttcatcacagaataagaatcaaaacacatattgatcttacatgattcaaatcctctaagaggtggattaggtggtaaagggtgcaactgtgcaagctatgtgcatcatttcgtggttgaccatacatccataccatgcctttttctgggatatgtactttgtgctcgtttcgtgtaactttttatgcaatagttactacactttgctagttttacctcctgtttgtgaattctttctatacgactatacctatacaaagaaaaagggatagattatctagcttttagccacttttaccgtactaaaatgttgacatgatgtttggtcgagcaaactgcttttgaaaagagaaaataatttaatgaacaacatgaagtctttgatttgtatgcatggatgaaaccaataagaaaatttaattgggtgctgatatttgaagcatggaccttgaaagcaataagtataattatctattcatatacccggcacgtgaagaaacaactgccagattacggaaccgtggatagcttggatgaggcctactggccttgcctcttgcgagttgcgacgcgatgcatacgtttagcaaaatcgtttgcagaaaacagcggacaagtgtcctcgcatccaaaggaacaggcaaaacaattcagatatcctagcaatgtcgttctcatgttttgtctgcaactaacaaaccattggcgcaagcagagtaatgagcatagccagcctacaagatacgaaaatagtgacaacgataggtccctcggacttatgacatgtttatttaaaaaacatacatccttcgtaaaaaaaaatcaactctaactatgtatatgtataaatgtctatcaagttcatagttagaaatacgtttttttaaagatggaggaagtaatcatgtgcgtagacctaacacttcctgaattatatgctctgagttgctcacttttcctgaagtccatggttttgagccaatctagtctgctactgaggtgatagcctacttagcgacaactctatgtttttgacattctgagaaaacaacacttacactaaataaactaagtgaactgggcaccagtttcaattattttctggcagtgttacatgtaattaaaaaaactctcagagacttcttaacacacaaaaattctcaaccatttggttgatgcagttggaagttatagaaaagtcaatcgcagtacaccccggcccccttagcattagtaaaaagttttccggtgtagcttttccttatcagtttccccttactcccttcggttttatattaattgacgttttaaacaaggttgaggtcaaacttttataactttaaccattaataactttaaaaatatttagtttaaaggaactagaacaacatatatagatttgtcttttaaagcactataatataactaaacatgcatttatttattatatatattatagtagaaaaataaggttaaagatatatcttgtagaccgtgtcattgtctaaaatatcaattaaaatgaaaccggagggagtggttctgttactctttatacgggttagtgaggttccaaattgccatggataaaatattattaatttttttcttttggggtaggtagttttgaagtttttacagctttgttatttattagtcaatttttatgatggcttcctaaaattacacaagtcatggcttaaatttgcacaaacagaaaaccgtaactttcgtacaaacttgcacatattaaagctaaggccccgtttagatgggactaaaacttttaagtccctatcacatcggatgtttgaaaattaattataaatattaaacgtagactattaataaaacccatccataatcttggactaatttgcgagacgaatctaatgagcctaattaatccatgattagcctatgtgatgctacagtaaacattctctaattatagattaattaggcttaaaaaatttgtctcttgaattagcttttatttatgtaattagttttgtaagtagtctatatttaatactctaaattagtgtctaaagacagggactaaagttaagttactgatctaaacaccacctaattcctttgtctggtaatgtcaacttaaaaactataaatgtctgcgggtgggcttgggtaaatagccatctaggttcaacgaacctaaatacgcactagtccatcgtacacgtcccaatcccctgaccattacagcggcacattgattggtagtccctgaataaaggcctgtttagtagtacctacaaacaaatatttattacgtgtcacatcggataaatgaatacataattaaagtattaaatatagtctaataataaaacaaattacatatttcaactgaaaattacgagatgaatttattaagcctaattaatccgtcatgagtaaatgtttattgtagcaccacattgtcaaatcatggcttaattaggattaaaagattcgtcttgtaatttatacgcaatctatgtaattctttttttctacatttaatactccatgcatgtgtcaaatattcgatgtgatagggtgaaaagtttttgtttgggaactaaacagggtctaagtagacactcaaaaataaattattacggaagaaaaataacacatatggctctcactactacacaaatcatcatttttctgtcaagggggcattaggttgcaggctggcc

SEQ ID NO: 23607 - DNA, 3669 bp, Oryza sativa
tttttttccaaacagtgtgcacgcctcctaaactgttaaatggtgtcactgctaaaaaaaaaatttcttttgccggctagaattagtctttcctagtggttaggctaatcacctgtgactaaaggtcagagaaactctaaagtcttcacatgcgagacatcaaccgtcatcaataattgatttttgctgaaggctgtgttattggacggccatcgataatcgatatttgtcgacggctatgttaagccggccaccagtgataatcaatttagcggggaaattgaaaatacccacgtgcaatttccctctaaccacttacaaagattagttttgaaaaacaacaatgaaaatgaccacgtgcagctgcctgcattccaaaatcgacattcccaaattccaaatccacataacagagcacaaattccaaaaaattagtcatcacatcccgaatcaaaatccacatcacctctgtcgtcgtcgtggtttgttgggtcgaaagccttgctccctcctggatctgccctccacccgccgtgaatgaggccaccggtgtggtggacgagctcgcacgcccacgcgacttgccgacactgaatccatcacgacgcgactcgtcactggcaaatcttgcgttcagagggatgggagggcacgttgaggtcaacgagggagggaggatggactcggcgaggtagggcgtggccagccaacggcagaaccatcactcttgaggcccgctagagccgtatctgttctctcttgactcgccggcaccggatttgcttcctcgctactctccaccgtcccattccccgagccgctgctgccaagcgtcgctgtcgtccccgccccctttctccctctcgagcgccgctactgccgagcgctgccattgtgccttcccccgctctgctgccaccaagtgttcgccatgccccctcccccactccatcgtcgccgcccctttccctgtgccgctactgctaagcgtagtcgccgccgagctgagctgctacaccccatccatagctacggatctgggagagagatgataaaaggagggagagttgaggcaggggaaaaatgatttgattccaggttggtcaatgtgcacgtcttctaatccttccccatgatttttgcaagtgatgctctcaagaccccgcctaaaaaaatcaatttttactcaaatggccgtattttcgcaagcggtttttaggaccacatgttattgttgcaaggaaagctttttcaaattcaccgatgaaaataaaactcaaatgttatgaaaaaaatatttttctaagtagtgtgttcttttttaaaaaaaaatatgcatggaagttgctttcaaaaatcatagtattaatctattttttttaaaaaaagttaatatttaattaattatgtgctaataagtaacttctttttgcctgcacgagagattagttgccaactcattgagccgaacataacctaattgattacgcattagctattaaatacttaaaaatgagttttttttttcatatttagtgaaactatttgataaaaagtttgttcataagtagcaccgtttagtagtttgttaaaggtgcccgctataatctaaggcgatcgataccactttgtcggagctggttagtggcgcgtgcgatcaaatcattaaaataattaagttatagatattataaaatcggaaaaaaaatatttatttgattttttgaaatgaactttaatacgtacttcctccgtttcacaatgtaagtcattttaacattttctatatttatattgatgttaatgaatctagacatatttatattgatgttaatgaatctagatagatatatatgtctagattcattaacatcaagtgtgcatttagttccaaagtttttttttccaaacttccaactttccatcacatcaaacatttcatacacacacaacttttcagtcacatcttctccaatttcaaccaaattttaaactttgagccaatctaaagacacccaatataaatataggaaatgctaaaatgacttacattgtgaaacggagcgagtactatatatttgcacgatgcacactgttagttcgaaaacgatcgataaaagaggaattagccaagagctaggtgataagaagtcagcctaagcagttttattacatgcatgatgatagtaattaacagtgacaggggaagcgggtggaggagggagggtttagtatcatccataagacgacagcgtaggacaaaaggtagcgagctaggaaaccctaggccaccgccaccgccgccgcctacgaatggcgattccccgagtcgccaccgcgctgctcgccgggaggaggagggcggctgcggacatcgtgttcgccggcgtccgcgtgcaccaccaccaaggggcggcgaggctgctgcagcccggcaacctcgccgccgcccgcctctggccgccgccaaccgccttctcctacggcggcagagtcggctcgctcgggctcggcgccaggcgcgggatgtccggctctagcggcggaggtggtggccggagctcaggaggcggcatccccggaggcgacggcaagcgaagattggaggaatggaccaggtcggtggattcccagcttgaagagatccttaccgaactccaacaactaagtgctgctcaaatgaatgctgtcaaggtctccacttcctctttccaaagccttaagaggtaaaaaaaattccttccttttaatgcttgaccgatcttgtttctttgaggcttaattagttgggatgttcttgatttccgttctgtttttcttcttgttttttcatgttaattagatctatggagcgcactggaaaagtcacaacagctgtaatttcactcagtgttactgcatctgtgtatcttgtgctgttcgcgctctattgtgttggggttaaaatggcctatatcgttgacgccgacgaatttgccaaaaaattcgcacacagtgtcttagatgatgaggaattcaaggcaaagctagatcagacagcagatagacttggtgccatagcagtgtccgctccctttaggaaggctcaggagtggttttttggtaaagacagctcacctcaagatgatttggatttggaggcttcagacacttgggaagactgggcagtttccttttccttctttgctctgtcattgatcagaggaatgccagtttatgagagtgagtgagtcaattttgtccttttcaccgttaatgaagaaaccatgtaaccaaaatgttttttttttaagtacagatgaactgtggatgcgtttataccagcttggagttagacgcaacaaggaaaatgaagaacttctgaacattttggttgcagtagggtaatgaattatgctagtagctttaatatgatattattatttgcatgttaaaatcttatctaattttattgtcaggttgatatcaaagaagaaaaagggtaagcttactacctatgcccttgtcgaagagcaatacagggaatgcattgacgcaggattcaggccgaaaattgttccgatcctcaagaaggtatattttcctttttcctagatcctagtattttataatttaggtgctacattaggggtttataagtatattaatattgtgattaatatttttcag

SEQ ID NO: 23608 - DNA, 21654 bp, Oryza sativa
tcctgcagcccggagttatgtttctgttggagttgacggtgtgcgtggcgcgtttcactagaattgttcccatttgtgttgggtctgaattggaggcagttttgagtggagcttggcgtatgcaagaggtttcgtgtgctgaattacagggaaccaatttgaactccctaggttcagtttttccatgccagatttagggtttatgggattttatagtaatgaaagccactagtttgtgttgtggtgttgaggttttacaagtgcaaggacttccagttttgtcgtgccatattatggtttatgtggttttagtaatggaaaccactagttttttggtgtgttgttgaggttttacacttttactagtgcaaggactttcatctttgtagtggccggtgggttagttctgtggcagattggcatttgctgtgtccttgacatgtgaaaaatctgattttggtttgtgagctgacttttggtctggtgatttggtgtatatgtggaaacttatagaactaggacgtgtatgtaagtgctcgaggtatttgtttatgtggtagttttcgccttcaaagttcaaacgtgactacaagtacttcctccgtttcatattacaagactttctagcattgcccacatttatatagatgttaatgatatgggcaatgctagaaagtcttataatatgaaacggagggagtactttatatactatgtatattgttttgtcttgaagccaatttgttgagaataaaatttaactatttatcttgtcctaaaatttgacgttgcatgtgaactattcaaaatcagacaccagggaatacgacaaactttgcttatctggtaaactttaggtattgggtattagaaggcaggtgttctttttttttcaaaaaaaaaatcatattagggaattagggatcttcttgttggattttatggtttgagcttcgcacaatctgtgtgaatggtttgagcaattcagagttgacgatggtggtctgcactggtccctgtttaccctgaaattttgtctaaaggaattatttttgttgtctgcagagtcaacagctttggggaattccgaatgtacatatggtggacacttgttttggagagctttgaggttgccatgttgctcgacccatggattttggttgtctcaaacctggattttgtttgttttggggcaaactaatgaatcagtacgtttcgtttattttgggaagcaaactggagtaatttatcagtactacctgtatgtatgaactacttgtccgctggagcctggaatatcacatggggtaaacgactttgatttgttagttccattctgtcatcgatcactgttggatcgattggtaaaaggccttattgcagcaaacctagcgtttcagtttgtttgcattctgactgtcactggaatgatcccactgtctcatttatgtttatgttttgttcgtatggcttattaacaaatagacaataatttatgagtaaaacttttatatgtatatcttcagctattgaaaagcaaatgctataaaatgaaccacaaaacaaatttcaaaattaagttttggcttataagcacaagggaaaggatgggacggtcctgaatacctacctgaacgcctgatccacaatgcaatcaaatcagaagacgaaaaccctaaccagttggcgcttaaaagtattcatctatctattacttatattttcaggcttgtaacacatcctacatcatttcagcaacaaaattacagctccagttcagttattctttttcatttatctagggaggatgcagcaatggaactgcaaaatctagggacgaggaaagacgactgcaacttgaaataagagctaaagttgaagctgcaaggtgtaggaaacaacattagttgttcttacccagattactgaattagaaaaaaaaaaggtgtggaatgaccaagaacagccaaagaaacgcatcaagagagagaactttagttcagaatactgatcgagaagcttgcatagaaacgtatttttttcgtcaaactcaatagtaacaaataatttagctagtgttccggagaacttgcaccgaccaattacttaaaacaagcatggctgaatttttttaggtcaaccttacaataacatacaagcataaaatacgttgtccttcggtatcactacaaccacaggcagtttaaaatgacggcaacttggtcttacgtacataagaggtgcttagtttcaacacaaaatacggcacatacacaagcgttggcccttgcatacatatccaccacatcttcggcataaacagaagggggaactgaacaccccagggggtagtgcccaggctagttaggagtacgtggtgaatacttgttttccatctccaagccgacaacataatactccctgagggccttcctgtaactacgagtataccggacacaggagacacctgcaagacccaccccaaggacaacagaccccattatacaccttctgtggaacctgttgtaccttattatctccgctatttccttgctatcaaaacaaaacagagagaacagccatatgttactatcatgcctcaagaccatttgagttggtttaaaacaatgttagttccttcaccttgcagcttccattttagctacttcttcatgtagctgtcgaattgtctcgtccacattcttcacaaccttcatggaagacgcaagctctgtagtacttccattggtgtactttccctagatttaggtgttaaaagaaaacaagctgagatggcaatataatgtagaggtccaaacgaacaattcagagtactgagtaataataagtaaatctgaaaaagaaccagttcacgcttcaaagtattcatcgatagacatcaagtttccacctactatgtgaggttacccttagctgaagggctgagtacgtactaactagcttgtgttcaaggtgcaacaaacaacatgggcaacattagtatagcaccaaccaatacatctttgtgttatcagcaactaaattgcagctctagttcagtgattttttttgttgttgcagtaaatgcctagtgtggaattgtttgcgagatagaaatggtttgcatgatacacattacctttcatctgtatagaacaaagtatcttgaactgacaatggtaataagcaaacagagataactgcacccctaattttcgcaggaacccataccttaagctatagattctaccatcataagtttcttatgttataggatatcctatcagattttttttttgggctagccgccaaggtgaggtcgattcattggcagacgcggaacagatctggacacgaaccgatcttggtcgatcgaaacgaacgatctgggacgagtcgaggggcgagccgacctgggactgggaggcgttggcggagagggatcgagggcgacggagagcggcggcggcgggggcgggggcccgcagcttaccggcgaggtagcgcatcgccatagcagacggagattgatcggcggcggcgggctagggtttgctcaattggggacgaggcgaggcgacgatgcttgatgcttcctcgactcgaggggggttcacttctccgttggatccctttctatttatttattggaattacgggaaggaacacgactgtgggctgggccggtcgtcagaacggatccaatagctccaactccaacacggactagttgaccaacggatcaaaccggtccaactcctaaatttagctttctgtagtgaagttgtggagctgtctaaacctagctccacaactctagttcattttgtgagagagctccacctagctccactcccagttttagtggagctgaaacggtttggttgagctggagctggagttggagctgaagttgtgccaaacatgccccaacattttcttttcatttttcttatattataagtcatttgactttttatttctaaaccaaacatttttcagtttgatcaattttataagaaaaaaaattaacaacatcaaattaggttcattaaatcaacatttaatatattttgataatatatgtttcttttgctttgaaaatgttgcaatatttttgacatttttctaggtcgaacttttttagatttgactaagtctgtagaaaatttagcaatatttatcaatgttatagataaaatatacctaatatttttgtgttaggatctacagggcttaccatatattaagtcttctacggaatccagcctcatatatgaaaggtattccagataagaaaaacatgccgagttctacttgggcacggcaacgactactcggatcatatccatactcgattttcctagttttacttggatatgggacacccagagtataaatacaagaccccaaggaggagaggagacacgctaagacaaatgcgaaggcaagcaacatgtgagagctctacgccactatgctgacagagactaaaccaggtcattccaaatattatactcgtatgatactgatatatgtataaaggtaacaccgacttcaaccaaccacaaagtatggctattacctgtcagttaggggcctaaacatgtataaaaacaatctagcactctcatgctccaccacctgccaacctctattggttgtgctaacccaacaatcgtcggtagcacctcacgtccatggcggtcacgtctccacgcactgcaacagtctccaaccgtcaccgagccgcaccaccacaacgggctcgcctccacacactgtagcggtctccaatcgtcgccagccgggggaatttactatttgccactctctcaaaatgccagtgctcaaatgtcactctcccaaattttcattcccaaatgccacccggacccacatgtcagcctcactcatcatcgggtcccacatcacttttgtttgaatggagagtgaggctgacatgtgggcttgggtggatttgggagagtggcatttgagcactggcattttgagagagtggcaaatagtaaattctcccgtcaccggccgcgcctccacaccgtgctcgccttcccacgccgcgtcggcctcggccgctgccggccgtgccaccttttatatatatatatgcgtctagattcattaacatatatgtaaatgtgggcaacactagaaagtcttataatatgaaacggaggaagtagatagaattatagtacctctgtcatatcaatttgtcgtaccccattaaaatccttgatatgaatggatactcatatactctgtcctggacaagtatatatccagattcataattatgattggtttttttttgaacggaggggtatttaagagagatcaagataaaataacaactcagcacgtataagggatgagaaaaccgttagtggtgtatacatgattaattaatttttaattattataaacttaaaaactgacgtatttaatattgtaaggcaacttctatatataaattattttttaaaatagtttgaaaaacgtgacgacggaaattgagataagatgatacgtgtttacagaactccggtatgtaggagtaatgatgtaactttttgggcgaagtttataatttgatggtattttaattcatcaacatgagcgtggcgcccttgcctgtcgtccataaagttatgtataccatcatcatcataatcaacctgtaagaatagaatagcctcttttcatttttggccgtgtttagttccaaaatttttcttcaaacttttaatttttccatcataaactttcaactttttcgtcacattgttctaattttaaccaaacttttaattttagcatgaactaaacacacccaaaggggtacttagatcagggactaaactttactccatatcacatcactaaaacttacttcctgttacatcaaatatttagatactaatttagagtattaaatatagactaattataaaactaattatacggatgaaggctaatttgcaagtcaatgattagcacatatttactgtagcaatacattatcaaatcatgtattaattagatttaatagattcgtctcataaattactctccatctatataattagtattgtaattaatctatatttaatagtttaaattagtgtcaaatatccgatgtgaccggatccaaacacgaaccccagatgaactaccagtggagtatactgtatgggacagccattttaagctacagtattacatgatactactattactagtacgaccataaatcattatccactgttcgtatctggcattctgcgagtgttttttttaatcctccgtcccaaaataagtgtagttttgcactgtttatgtctcacttttgaccgttcgttttatttaaaaattttttacgattaatatttttattgttattagatgataaaatataaatagtactttatttgtgactaattttaattttctcataaatttttcaaataagatggacggtcaaatgttagacatggattttcaccgctgcacttattttgggacggaggtagtaaaatggagaagtactccaggagtatactccgtacgtggctgccttgtttttccgaatccttgtcaagtcccatctgtaggagtaggatagtggagtactactagtagactcctgtgaacaaaaacagtgtgcagcgcagactgggagcatcccatcgagagagagaggacacgtctcaacggcagaaagcgatgaatatcggatgcagcctgcagagggtacggtacaaacttttatacaccgtctgtcacgttgcatacactactcctttaatttcaaaccacataacaactttgggaagaaggaaccttaaacaatttcttggtacactactaactaaagtatatttaggtgttgtttggatacagagacttaactttagtccctgtatttagacacttatttagagtattaaatatagactacttacaaatctaattacatacttagagtagtaaatgaaagttaatttgtgagacaaattttttaagcctaattaatccataattagagaatgtttactgtagcatcacatagactaatcatggattaattaggctcaataaattcgtctcacgaattagtccaagattatggatgagttttattaatagtctacgtttaatatttataattagtgtccaaacatccgatatgatagggatttaaaagttttagttcatctagacagggtcttactagtactattttaaggattactaccaagtacgtactgtattccttaattgacgatcaagttgttttgttttttgtcagtcgtcaggcagcacacaagcgagaaaggtttgcaaacacccataaaataagaccatggctggctctcccgaagcgagaatagaaagaaaaaaaaaagcagttacgactagtcgtaaatacgtcattcattaactgtttaggagtatactactccagtaattaatagtactccagtagaagtgtagtggtagtggagtagtaactaacagaagagagaggatagctaagctaattaagctagcttaccatgcatggagtctaaccctaatcaccgcgcttagcttaccaacccactctcctcctccactcacagaaactcaaaatctccctcctcccactttgggaaagcaaaggggaaaaccctagccgccgccgccgccgccggccactggccatggcagcagctcgtctggcctccacggtgctcgccgggaggaggagggcggcctccgtcgtcatcgctgccggcccacgctacggcggcggcggcggcggcgtccacgtgcacccgtgggcggccttcccctccccgaccgccaccacgcgccacgccgtcgtcgctgccggcggtggcgtcccctgcctgctcccgagggcggccttcccctccccgacgctgccgcccaagccacgggccttctcctcatcaggcagcctgggtcgccgggatggtggtgcacccagaggcgggagcttcctcggatggaccaaaaccgtcgacttggatctctcccggatcctcaccaacatggagatgctcgtcaagaccaccggctcgcacaaggccctcctcgaagaatacgctcaaacacttgagaagctaaccatgtgagtttgaaatttctcttctttttttttcctcctcaatttgtttgctgtttgttgtttgttggtacaatttaaatttgtagatttgcatctttttttcctcatctcatgttttactcctgatctatacttatttgctccccttttcttttctcctgatagagcggtggagaaaaatgagaggagcaagggcagcctagcaacaacttccttatttctcatggcttcagtggtcactatttcttttggtgtctacttttttggggttttcactgggcgagtagatgttaatgggtttctcaagggtttcatcatcgatttccttgatgatcctaccatttccgtcaaaatgcacgattacgttgatgatttggccggcagtgcagtggagtccattaacccaatcaaaagatttgtccactggttgtctggacaacccaggcctgctcattatcagaagctcaatgaggaagtccttaactattataccgactggtcatctatccttgcatttgccgtcaactccattgccaaatcagaagggggcaaaatatctgaaagtaagttaaaattagtcttaaccagtccataaaaagctcttgtgttaataaccatactatgtgcttaatattttatttgatttttcagaggctttgtggcgctttttgatcaatgtgggggtgcaggaaactaaactgaacaaggcattgctgaaagtactagtgagagagaggtaagtgctcattactattagagtaaatttcactttggtcaacctttttacattggactagagttagacttatattttcacttaacaccatatattgttaccatcatttgcactttggaccgggtttcacaaattacacatagtataataattgtatatctgatctcatttcttttgtgttagaaaacttagaattcaacaatttgtactaacactacagtgttgggtattgtaaaacatataatatcttttctagaaaattagttcttaaactcaatatttctccaattttgtctctagtatgagggttgtgaatgttcatatgtagtagtaatgaagtcccattaatctgataggatatcctataacatgttacaatcgttgttcttgcgctaagcatatttgcatggcaaaaatttccatatcattgtttcttgtaaattgctaagcacctagacaacaactcgtgtaatggtaactataaaaccaggtccaaagtgcaaacaacggtaattatacgtggtgttaagtgaaaacatgagcctagccctagcccaatgtgaaattttggtcaataaagatgatccaaagtgaaatttactcttactatattatattgcttctttttatttttgctgttttgcttatttgtaacatcttatcttatatatgtttgctaggttcattttgagacaagagtacaaaggcgtcatcagttacaagatggtggagaatgaatacaaaaccaatttcaagggcaaaattcaggagaggattcggcctatcctgaaaagtgtaaggccgagtttagatccaaactttttttcaaacttccaacttttccatcacatcaaaactttcctacacacacaaacttccaacttttccgtcgcatcgttccaatttcaaccaaacttccaattttgacgtgaactaaacacaccctaagttcaagttttgttctcccaattcctatggctgcgaaggaactaatacaattgaaatctctgttttgcaggagtttgtgatgccagctgctgcacgtggtccaaaatctaagcccagccattaagatgtaccaaaagaagaatgaggctcatcgtgcacattgggttaagaagttcctagaatagcataactgagatcatctaactatttagctaaccattaaggagaggtgacagtggacaccatattttgtatttaatgatggttaaggtggtagtggacaccatttgtttttttgtaggctaaagctaagtgctgcttaattggtagtggacaccatatgttcttttggtaggatatatttggctatgtgatggttaaggcggtagtgggacaccaaattatgtatatttggctatgtgatggttaagggtggtagtgaacaccatattattgttgcatgatctttaccttatgataaatttcatccttttgcacttgctttacccttgttcatccactggtaatgacagatataaacttggtctagctatttgcacttgtcatttttcttgctgtgaaggatgcaactgatgaataatagtgctgatttgcgatgcgtaagaatggattgtgaattctgatatgtgctctttgtgatccatgtgaacagatttttgttcggcacttgttcttctttttctagctgtcagattgggaaagatggccactttgattttgttttcaaactggatgactatatgtacggtttatgttccacagcttcaaacagtactatcatagccatatgccatttttctgttagttgttagtgaaggatttttgtactgcagctgatggtgtactgaactagtgatgcacaccatgttgcaaactcattcatttttgcaaatctgaggcctactcttacctgtatcttttgacattggctggtaataacagatacatgtgcctgttattatgcttattttgcctgaaaatttgacaatgatgagttctgatgttgattttgcttcctacaacagcgttttcataagagcagatacactcttggcctattcttttgctgtagatgatagttactgataaaaacagattgactactatttttacctttggtattcctgatctgttttgcatcctaatcctaatttatttatttgtcactatttctcctgtagcacatgatggttaagtaatgcacattcttcaaaaaactgaggccatttttgcttttgattagttcttgcaaatctgaaataattttatgttttgcaatttgaggtcagctgaataattataatcagtttccaatcctcactacaacaatggtatgaacaggcgcttctcttctgttgcaaattgatttcttgaatctcaattccatgcctcgtgtggtaaccttaaattccaggcttgaattgatggataaccagaaacaagctgtagctaatttcatgaaggactaggagccctttgattggaccaaacagcttgattagatctgtaaatacagtcaccagaatatctgtaagaaaagcccgctggaaattgttcgataattttttgtacgaatcttgtactaacttgtcttgtattcatattaatcaagtctgtttcttctcttgatcttgaatgttgcctaaatctatgatttggaaatagacatcatattatacccggggtaccaatgttcatcaaatagaacaagaaagctatgaaatttggtgcttgattgcatcgaagctggtcaaagcttcctttctttcaatggttaatttgaagttgaaagtttggattttacgtatgagttattgcagtcttgtctagggttgacattataaaccgcaaaattatcaatactccaaagacagaatattctttggcacgtaatgaatcaatgcaatgcttacaatatttttttctatcagtgcttatgatgatatttaggctgtgtttagatccaaagtttggatccaaacttcaatacttttccattacatcaacctgtcatacatgtttagatccaaaatttgaatccaaacttcagtacttttccatcacatcaacctgtcatacacacacaacttttcagtcacatcatctccaatttcaactaaaatccaaactttggatccaactaaacacagccttaatgtatctcaatgtgcatcatcaatgaccatattttttttcttcaattgtatatatcgacgtgcatcatcaataaccatattttttttcttcaattatatatatcgaagtgccttgcacgtacacgctcactggtatatataatgaagatgatcaagagaggggaatgagctatcaacgaacatacaccggaccgagatgtactaatcttttatcagctagtgttcctgagacctacagccaaccacttgaacatgcatgcataactgtatctttcatctaacccatacaatagcagcaacttaacccagcataaatatgtcatagccacaagctgtttgtgaaaacgacttcatttggtcttacataagagttaattggtctaacataacacggcacaagcacatactgtaagctagagtgtgcgctagctagctcttgcaagcattaccccaaatcacatgccatacgccagagtcaaacattattacatggcaacaaaaggataagtgagctggatccccaacccaggctactcaggcgaagatgttgaatacggcggcatccaaacgatcgggttgtcaaaatgctccttgagggccttcctgtagctacgagtataccaggcacaagcgagacctccaaggccgaacccagcaaacacagacccaattaaacaccgcttgtggagcctgttgtaccttgttgtctcctcgatttccagtctatcgcagagaaaacaaatgtatgttagttactagtatcatgcattgggaccttttgagtttggtttagataaatataagaataaataatgttagttccttcaccttaacttttcaagtttagctatttcttcccgtacccaacccagatcaccatccatattcctcgcaacattctctgtagttgcattgctgcgtcctccctggatttagcagttaaagaaaacaagctgagatggcaatgtccaggtccaaacaaactattcagagtaagagtattagtaagacaggacacaggtacatctaacccttgtaaacaaaccgattcgcgcttcaaagtattcatctagttcgccacattttcatgtgccaactatgtgagctcactcttaactgaagctcttaggactaggtactccctacaagcatcttgcgttttcagcaaccaaatagtagctctagttcaatgacttcttttttcttagtaaatgactagtgtggatttgttggtgagatgtgtggcatcctagtggaaatggttgtgcatgatacacatactatcctttcatctgcatagaagatacttggtcgacaacgctaataagcaagcagagactgcacccctaattttcacaggggatcaagtcttaaagctacagattcttggcatcataagtttgtcccgtcatcatcagaaccaacaggaatgcaaatttgaccgctaaaaatacagtacagcatcatggaagtggtaccttttcagacaaataaagatatgagattttgaaccacccaatctaaactaacatcttttaagaaaattgacagtaagtctcaaaagtggtggatgaggaaaagaaaaaaactaatgaccaacttctacctccaccttaactaccccaggacacatcaagagaagccaataactaaagtatgccacataccgggagctaaatttgaaacgcgcgcaagctcaaagtttggtggttttttccccaaggaaacgaaaggtgggcatgaacacagaacagatctggacacgaatcgacctagcgagcgatgcatactagcagctcaattgcatggagatgcataacattcaacgatcaacacgaacaatttgcgacgagtcgaggggcgaaccgacctgggaggcgttggcggagagggatcgagggcgacggagagcggcggcggcgggggcgggggcccgcagcttaccggcgaggtagcgcatcgccatagtaggcagcagctaggagattgatcggcggcggcggctagggtttgctcaattggggacgaggcgaggcgacgatgcttctcgagaggtttcacttctcgatctctttttattatacaggaaggaagacaactgtgggatgggctgggctgggctgggccagtcgtcggaatggatccaacagctccaaaactcggaataagtcgacattttatccctcatctttacgtaagtgcccctaaaccgcaataccggaaatcttgaccccctaacttggattaaattaggtcccctagcagtatggatagctggtttcgctgacgtggcatcctagtcagcaaggaaaaaataaaaaaacttatagggcacacatgttagtggccatatcctatactttctgtctcttttctctttccctcatcttctccatgccaagacggcgtacccgcagcagcagcacagtgcgggcggctggctgcatgaggagtgcacgtcgaggtcatcgccgtcgttgcttatcgcgcagacttgctgatgtagctgctggaccacggttgactcgctgagttagcaggtgggatccacatatcagcgacttccacctcatagcatccatttttttttacctcctatctatctttcgtttatttaattttcatcctcctctctctctccctcacacacacacacgcacacacacacattccggcaacaacagaggcgacaaacggtggtagtgagctggctccgtgggtggtggcgacagcgaggaggaagggagagtaggctccggagacggcgacagaggcatcatggcagcagcaggtggcaactccggcggcaagagaggttgcaacaatggcgtcgaagcggaaatagcaggtagatgttgcagtgggattgcaggttgaggtagtggcggtcgaagcagcaggcggcgcctgcggcgataaggaagaggaggcaacagaagtagcaatagcagcaggccaactggcaagctccctccccagcgcgcagccagctggtgagctccctccccgtgtgtaaccctctaggagctcattcctacgtgcggctgaccggcgagctcctctactcatgtgtggccgaccggcgagctccctcccccacacgtggcccaccaagagctcctcccctgtgtgctgttggccggcgagctccctccccagcacgcgcccggacggcaagctccttcaccatgtgcggccggccgactcctcctcctggggcgtggcttcccggcgaactccttcccccgtgtgtggcaggcccgtgagctcctctccccgtgcacagtctcccagcaatattctccctggtgtgcggccagccaacaagttccctcactagtgtgcggccagccgacgactcccctcccatgagcggtggcggtgggggaggagggacagcggccggcgacagcggtggtggattggaatgggaaatgcggctaaggcaatgcgatagaggaagcgaaggcgatgcgtggggaacgcgtgcgacggcggtgggccacaccatttttatttttatccttgtcactgacatgtgggtcccacaagcgacaatgcgcctagaaggaggaggccgaggagcccaagctggtcagtgtccttccaaatggcctccattcttcctgattgcgccctttaccatgggagctagatctagtgggtgttgatatgcctcaaaagcatgagaaggaggagggccacgagatcgatgcctcccaccgcccttgttgccgatgtgcactcaggctagatctagcagtgaggagggcctaagcctctagatcccttttttggggacgtactacaccaccaccatgcctgcacagagaagctctctgtggaaaggatgagaggaggggggagaggaaaaaagaggggcgaaggaggagaggcggagaaggagaatggcgaaggctcaaggagagaaagagataggaggggaagggataagactggatggttatccacatatcccgtctccatgagatcctatagagtagtttttatgcatcagaaatgggcctctctaaggcctaactacccaagttacatgatattgcgattattcgtaaaaaaaaaaggtgaaggggggggtgaggggggagggatggtggtgttcaaactcaagttgcttgggcaagagttcgctgcctacacatttagactagttgtttgacactgatatgccatataaacatattgaattataggtttcctgctgtgcatttgaaccggggcgacccgacgaatggaccactagacctatgaactaggagttcgcccggttcgacatccggtctagtttaacccttttttcaaatatgattattaattgctttgtgttctccgggttagaatagtactctatcctaaagaaaaaaaaagttcaattcaatttatctctaataacatatattttatacccctcaatttataaaattaggtgaattgctcttaggtcgaattcatgtggtttttttatcatatgtggcacacgcatggaactcattttggccatgtgttcgtccaattagcaagactacataataaattgaaaataaaatttggccaatcctaagaaaggtatgttttctttgtaatttttgctctaagttagcttacaatgatatgtgtatccaggagaacataaaattgaattgttgtttcaggaattcgccatgaagccttccactgcggcgtaacctgtctactgtctaaacattttgatctggtgatgctactagctagctttttgacgtgtaccagttgaactttggtgatgtttcttagcttcaattataatttgaatctgcagaagagcagctagactcgatctgtcagtgtggccgctataccacgaactgcaactcgatctgttctatggttgtgcatgactttttgtaatgatcgatgttaattaatccgaacccttagcaactcgatctgttctatggttgtgcatgccttttgtaacgatgctaattactccgaacacttttttttttgagaaaattactccgaacacttaatggtgctcaacctgtcctatggctctgtatgcctttgttatgacgtaaagaccgacttaatgatgtactgtatctctatagttcctatatatgctagctacttttgctaacgtaaacatttggataaaattatacaatacaacgaggaatatttccatgccctatatatactcatgtaagcaaatatatatggcaccgttcctgtcaaatttgctaacatacactactacaccaaatattttcctggacactaaatctgtttgtttccaggcgggccataattgacaccgcatggaataatgaggggatcggtaccaggctgtggcccgcacgggaaaacacattatcccgtgcggggcaatttactcaaccgcacgcgaaaatgccgtgcgggcctccttactcgcgcacgcgaaatccacaatcccactccttaactctcccactcctctcctcccactccagtactccactccttctctcctcccggcctctcctctcctcacagcagcgacaacggtggcgccgggagacagcgcgcgcgcggcggcccctccctccctctaccttcggctcccctcccctcccctcccctcccttcccttgcagatccggcagaggggaggcatgggggcggcggatccggcggcgggcgcaggcgaaggcgacagctgcggcggcgggcgtaggcggaggcgacagcggcgacggcacggcccctccctcccctccccttcctcccctcgcaggcggaagggaggcatgggggcggcggtcgatgatggtggtgagcggcgcctccctctctctcccttcggctcccctcccctcccctccctatccttgcagatccggcagaggggagggatgggggcggcggatccggcggcgggcgacgacggtggcgagcggcccctccctccccttgcagatccggcggaggggagggaagggggcggcggatccggcggcaggccacgacggtagcgagcggcccctccctccccttgcagatccgtcagaggggagggatatatgggggcggcgggcgcaggcggaggcaacagtggcggcgacggttgacgacggtggcgcgcggccactccctcccctccccttgcagatccggcggaggggaggggtgtcttcggccggcgacgggagcgggcggcggatccggtgtgggaagcgggcgacggcgacagttagggttttggtttttttctttttttttcaattttttattttcctgtgcgggcgcccgcatgcgagctattttcacagacgcggggttccagacggtcgaaaccaccacacgcgaaaatgagtttccaccgcacgcgaaaatcgtgattgtagtagtgatactgtttttgctgcgttttgaaatactcacttgttaagattatttgcataaaatttttgaaaaagacgaatggtcaaacatgtgtgaaaaagtcaacgacgtcatctattaaaaaacggaggtagtacaatacaacgaggaaaatttccatgccctatatactcgtgtaagcaaatatgccgttcctgtcaaattaattaattaacatactggttttgctgcgttttgaaatatcacttgttaagattatttgctgcgttttgaaatatatttgcaatgttatcgttacctataaatcaataccacatcacaattcacaaacaaaaggggaactgaagcggacaccaccccagcctactcaggcgtacttggtgcatatgggctgatgacctcgaagccggtaacatgctccatgagggccttcctgtagctacgagcataccagacacaagagagacctccaaggccgaccccaactacaatagacgccatgatacaccttctgtggaattccctgttgtaccttatcgcctcctcgatgtcccggctatcaaaacaacacacacacagaaaacaaaatgtatgccactatcatgcgttgcaacctgttttgagctggtttagacaataagatactgctttagttctttcaccttaattcctcaagtttagctacttcttcctcaagtttaattcctcgcaacattcatggaagatgtaacctgatctgtagttgcattgctgcgtcctccctagatttagcagtgaaagaaaacaagctgagatggcaatgtacaggtccaaacaaactatttagagtaaaagaattattactaagacgtacagaacccaggtacatctaaaccttgtaaaaaagaaccggtttgcgcttcaaacatcaaagtattcatctagttttgtgagctcactgtgaacgactgaagctctaagtagtaagtactaggtactcccttcttttatatataaaacaaacgttatctgtatttttaaaaaggaggcagtcctatttgtgtgctccaggtgcaacaaagaacacatttaacaatacaccactacaagcatcttgcgttttcagcaaccaaaatgtatagtgtggaatgattttttttctccgtaaatgcatagtgtggaattgtttgtgagatatgtaggcatactagtggaaatggttgtgcatgatacacatactatcttttcatctacatagaagatacttgatcgacaatgctaataagcaaacagagacaactgacccctaattttcaaaggagatcctgtcttaagctacagattctgggcatcataagttcatcccgacatcgttagaactcagaaccaacaggtggacaataacagttacactctgctaacatgttttagacacggtcttaaaaaaataatgcaaatttgactgctaagggcacccacaatggttatctatagactctctataagagatccatatcagcatatttttctacttggaagatattaaatgaagagagagagagcaaagctatctactaacttaagatagtttatagagaaaaacgagacaatacatgagagagctatagatacccatgtagacatactattgaggtggtttactgagatgtacatgttttatagagagcactttactttaccattgcgggtgctctaaaaacacagtacagcatcatgggagtagtacctttttagacaaataaagatatgagattttgaagcacccaatctaaactaagtaactaacatattttcagaaaatgtctcgataatggtagatgaggaaaaaagaactaatcaccaacatctccctccacctttaattacccccatgatctcgagagaagccaagaactaaagtatgccacataccgtatagggagctcaaagtttggggttttttgaaaacgaaaggtgggcatgaacacagaacagatctggacacgaaatcgacctagcgagcgatgcatactagcagctcaattgcatggagatgcataaaactcatcgatcgacacgaacaatttgcgacgagtcgaggggcgaaccgacctgggaggcgttggcggagagggatcgagggcgacggagagcggcggcgggggcccgcagcttacaggcgaggtagcgcatcgccatagcagacagcagcaaggcgtcggctagggtttgctcaattggggacgtgtcttgcgcggagaaggggcggcggacgcgccggagggaggagcgaatttttcgtttctttttgtttttttcctttttttcgtttctgtttggttggtttttttctccggttttttcgtttctgtttggtttttttcctccggtttttttttcggtttgttttgtttccggtttctcttctactcggttttttttcttttttttttaaagattttataaataccaagtttgtattcgtacgtatagaacgtttgtatatgcgtatacaaactttctatacgtgatatattttctattttttttatttttagtgcgtatacaaactttgtgtgtgtatatttttttatgcattgaaatatattcataaaaatatatatatacacacatatgtatataagtatatacatatgatgtatatatgatgtatatagtacatatgagagaagaggggggtgcggctgaccccccgcgcgcgcagctgatcgcgtatgaaccacccccccttctcattgggttcacttctcaactgtgggctgggctgggccgggccggggcgggccggtgctcagatcaggtctcaaaaggccgaaagcttccttttgttcccgacgctcctggcgctggagatgcaggtgcgttccaagaaaggaaggactcatatatatgtatctgtgcatctctttttttggtggtgttagtgatcaaatctatggtaaaaatcatccataatcagtgcacgatgctagtgtttctttttaattaatttaatttggtcaggaatggctttaattgtttaactgcgagctcgtggcttctgcagcaaaagcgcaagcacgagagtattcatcacacgcttttttttaagaccgtatgtacagtcttaaaaagctatgtaattatcatttattttattgtcacttgatttatcatcaaatattctttaagtatggcataaatatttttatatttgcataaaaattttgaataagacgaatggtcaaacgttattcaaaaag

SEQ ID NO: 23609 - DNA, 6560 bp, Oryza sativa
tcctgcagcccaccagaagtaacgaacacagccttagccatgatactcatgaggagatggagattcaaactcaagttgcttgggcgagagttcgctgtctagacctttagacctgcagctggttgacattgatatggcatataaacatattatattataggtttccggttctgcatttgaagcagacgacataacagttggaccactagacctatgagttaggagagttcgtccggttcaacatccggtctaggttttccaacatccgattctgcagtcaggaattataaggatatcatcgtgataatactggacacaaaatggcacatggtagacgcatgggaggtcttcgtgacagattttacaagtttggtcaatcagtcaatgtgtaaacgctggagaaatcgcgaagaaattcgatcggatgcgcatatggatcggcccgtccaagatcagcgtcggcccaggcggagatcggcctacgcggcagttggcaagcaggcccaacaagcagttggcagcccacagcccacgcggatcgtgtctcggtacagacaggacacgtgtcgatataagattggcgcgcacagggagagtccgattgggattttctggcgtggctacaggtttgatgagggaaagagagtgtctctcttggaaaactttactccctcggttttaatttacttgtccttgtagtaaatctcacactaaattaagactcatgacaaattacattggtagctttgttaattgtattctaattacatttgttaaagcaagcactaaaaaattccttccgagagtactattactaatttggctgcatgaatggatgaaaggtaggaagaaaaggagttcatcttcatgcaaaaaagttgatacgctttgaggagtttagtcaagttatgttccttttgttcttcggatgtcaaaacgacggcaggaggaaggtcagaccatgatttcatcgggttaattagtacactacgattttggggttctcttattttttaacaatgattcgatcatttggtttttcctagtatttatttttttttctgatatacttggtttatatattcgattcaatagaaatcttgtaaaaaaaatgaaacaaaatgcaaagtgtgtatcatagaaagagttggagaaaatttgatccatatagaaaaaaaaaccaataaaaaaaatctcatttccaacaaaagcacaaaccaccttttttttcttagatttgtaacactttgttgtttgggttaagtgtttacccgtgagttggaatggagaaagactaattcgcccttggtctccttcctctttggcgttcccatcctcgtctcaccccgcctctatcctcttcctcttcccaagacgactgtcgacgcccgatggcaccatgcgccggtagtctcaccgctcatgggccagtgaatagcgaccttgccccatctcctatcccgtccctcccccatgcatttggggttcaacacactggcggtacccaatccttccttgcgatacagctcttcacctaggcacattagctacagagtgccttggattcctcgccactattgcactccagcaccagcagcagccacgcccaaaggcccccttcttcctgggctatttcaatggcaccgatatgggtgtggcgcatccgttcctcacttcccctaggatctcctttctatcggcatatctcatcatctcccctcatcccttcctcttctccagcgattgagataacttgctaaatgtgtcgaggaactttcgacatagcagtgccgtggatcaaggcagcctgggcggcgaacttgttgccacggccattgcctcccctcggccggcgagccaaggatggagaccatgggtaaattggtctttcttcgtaagaactcacagctaaatacttaaccgggatgatagctatgacaaaagtgctacgaataaaaaaaaacggtggcatgtgcttctggttaaaagtagaaattttttgggctattttcttataccaacttgttttctatgttacatgtgtatgtgcttgcacaaggtcattgaccagcaaaaacttaacccgttcttcactaaagtttgagcctctattcgtggtttatatattagtcaggccggagaaagaaaatcaataatttatcaaaaagtgaccaaacaggcatcgaccatttccgctttccaattataaattgattgttcaatatcgatacacctttagggctgtgtttagatccaaactttggatctaaactttcaactttttccatcacatcaacctgtcatatagacacaacttttcagtcacatcgtaccaattttaacccaaacttctaattttagaaggaactaaacacagcctaggtcgaaagatgcacaaattttgggaatttgagttggatacgtagaactataacccttgcctgtaacttgacacaaggtaaaagcgtcctttctaaaattttctctccaactaaaagaatattgaaataatgattatattaagttttggcaaattaccaatgaatcgtgacaagttggagtggaagaggcgacattacttactccgacactgcacgaacaaaaccatataaataccagttgtagatgttgatctgtacaaggttcggcccaattacagcccacatcgatagactccataatctgggccttttctaattgtgctgttggggcccttggcaaggccacgagacataataagaggaacaattatattcttttttcagttttgcgagattcaggcttccactgaaacattataccactacaaaggtaacaaatgtctagaagagggaggaggagagacaaaaaaaattgcttatatatatttttacacaaggaacaaatgcttagaaatatataatagacactataaaaattatgttttctgtcgtcacccttttatttctattggcggactaacaaaacaaatgcttgtaaacatatattgcaagatttagagttatgagacgaaaaaaacgattttcactgacggacacataggaggcccgtcataaaaaataattctgtttttgaggcggacctcttaagtttccaccagcgacgctgatgataagtaaagatcaccgcttgcaaaaaaaaaaaaaaattcacgacaccgaccgaccaacagggccgtcgacgacggtgagttatatatttgaatgaaagtatatttcatttaaattagacatataatttttttctccaaaatttagggccccaatctatattttgtcaccatccaccaaaccctccgccctcctcgactccctctcatttcctccctccttacccttaccactagtccccctatgtgcttacctgttaccactccctctacatcctctcttcagcttctccacctccgccgcgccacacggtgctctaggtgacggtgacggcggctgtggcggtaacgaggggcaggtgggaggggatgaggccagtggaaacggcgatggcaagccgcggatctggcagtggcaattcctagacgctgtggatccgacagcggaatgggaggaggctagtggcgacatcggcaaactgcgaatctggcggcaatggtgcttggacgctgtggatccggcaatggaaggggaggaggctaatggcgatggcgacggaaagccaccgatccgttggcggcaatgactggaggccatggatctgttggtggcggtgacctaggggcgcaaatctggtggaggcaacaaatctcatggcatgggcacgggcgggcttcggcgaggctcctatggtggatcctcgtccacgatgctgacaaggagagctcgactatggcagcggcagacagagtggcggcggatgctatttcatttgcatgtgttgttgttttttgcatgctaaaaaatggagtgaaaatagatgtagtgctatctggatgtggatttgaatatggatatgatgtgtgtttgaattgatttgaatttggatccctggatgtcgatttgaaaatgcactagctcctctagatgttgattaattttttttggcaaaaaaacatttttttcttcttagtagtgccacctgcaaaaatccaattttcgcagttgttcctcttaagggtcagcctgcgaaaaatcaattttcacagcgcaccgcaactgccagcaaaaattgttgattttcactgaccttagcttgttggcggttgtgccaaccgcctatgaaaattattgttagtagtgagatatacatcaccacttaataaaaaaacttatgaaaagttctcgaaaaattactattagtagatattggagccatatcttctttctaatttgctctctatcgtttcttttttagcttatggagcgcacataaccaaaatttatattttaaaactcaattttaaagttaattatgatttttttcatcgtagtttattctcaacattaccgtttaagttggtaaggacacataatataaaagctttacttacaaactattattgtttttgtttagtagatattatgggttgtataattaatcagttatagttgaaacgttgggtcttgtgtcataaacttttttagataatgaaaatagattacattttcggcctctatccgtagacacacagccaaaaggttcagaagtaactgatagcttaaacaaactaaaacaaccttcacttaaacatagaaataacccagcctatatagcttaatcattttttaacccctactgctgaccaagcagccaatagggctccgaaacgtgtcctagccggaccaacgggaactggacaagtggcacctagccagcaaaaactgtgcccatacaacttggcacattagattacgcaggtacacaattacatggattagagtaatcgagctctagctagctaggccccggatcgatccatctgctgcctctctgatgatggattaaactatgattaactccctcatgccaactcgatcatcaatgcacgagcttagcttagctagctctctagggtcttaaacttaagcacagccttttaagcctcttttgattattaattatacttaattaggagtactaaactatgtctttgcttaattaattactcctgatcctctcgtctcatgcatggcactgtactatccgtcctctcggcctctcctccgccggcaacccccaccgcgtcaccggccacgtgtcgccaccgcccgccggcgaaccaactagccattctcgatgaccggtggatcggaggtgatgcacatggatgattaatttaacaatgttggaggcttggagagaatagtcattgataactattaaacggcagcgttcggggagattggagattagattgcacatcgttttccgcgtgcacgtttcccaaactattaaacggtgcgttttttgtaaaaaatttctataggaaagttgctttaaaaaatcatattagtccatttttgaaatttgaaataattaatactcaattaatcatgcactaatagctcacctcgttttgcgtatcttcccaatcttctctgtcttccctttctcaaacacagcctaagtggagttaacaagttaagtgtagatttgatgggggattagtttaatttatgcataggccccaatgctaattgcaccttaatccttgtggcataggtaaatgggagtacgagaatacgcatctccagcttttggatatcgttcttaattttcatcagggctatagccatgacccatcatctttaagtttttttttctggcctctcctgtgtacggtcagtgccacttgtcaaatttatttttctcctgccctgtgaaagaggcatgagatctttccacatttcctttttattcttttctctctttacatcagaggaggcaggggcaaagttgtcttttcacgcggtgtgatgtggatagagtaacccataatttacccacagcatcttgctttggtgtgggggctgtcatgctagctgcttcatcttttgaagcaatttggttaggtgtgcgcgatcgatggcctccacaccgcgtataaaattactgttgaatcttgacggggtcttcgcgatattagttattattatgtttcaactttagctggctataatgttctagcatatcttgaatatatttatccggaaactcttgtcgtgccgcggttgaatggttgatatattggtacaatgaatatgatggtaggacaataacacatgggaatcaatactcctggctcaaggaatatcgaaccaccgaaatggtaattaataacactttaatgtatcatattccaacaccataaggaatattacttctaactctataatagctgcaataaccagaatgaacatttcccgaattggcataaatggaaatccagctattagaacaatcatgcaaaattgtaattcagcattatttttgcttggattatattctttgctcgctctcacagtcttactccattcatctcattatccgttttatttgaaaaatttagaaaaaaataagtcacgcataaagtattatttatgttt

SEQ ID NO: 23610 - DNA, 9886 bp, Oryza sativa
tgcctggattagctaggattaattaggaggacattgcgtagtggcttagctatctctcaaaagcttaattgggagttgtgttcatatcccaattccgttaattaccgaactataataaattgattttactgtctatatatagtatatctatatatcttcttctgagttctgaccatatacaaacctttcatataatatatatgcaagcttttaggccattgtagcacttgcatctatatacttctccgtcctaaaatgtagtcctaaaatataggggattttagccggatgtgacatattctagtactacaaatttgaacaaacagtatattcatatttgtactattagaatatattacatccggttgaaattccttatattttagacggagagagtaaatactaactactatgaaagaagaggaatcaattaatactaaatttttaggcattgcattccattccatttgaaagatagctgcatctgcaagggaaagatgttcataaatgttgtctctcttggatataaagatgcaggggaaagaaccctaccaaccggcagtaaaagtaatgttgctaactgctatacactgtattaatcagattgacaagttgggtgtgtgttcgattcaccaacctgcatccagatagcttaactagatcgatccaaaaccttagatgataagttggtgaggtgttctcctttttggatgcattgcatttacagattgcccaaccaagattcgaattgaaagggctaattcgtgaatattcaccgtggtaagaactggcgcgaacgcccgacacacacttttatcttttctgttttcaccgtgtttttatgtttctggtaattaaatttgttccaagttcgatttggaatcgaaagtttatatgatctatttcaattcaaaatcaaagtttgttatgaataatgtttctctacaaaagcgcgcaataggaccgacgagtacgtacgcgaggaggaccgaatgcgcgatgcgaacattcacaagttagacctatccaacaccaaaatttgtttcataaaatttgtaaaaaaaaattgtttcatttaatttaatataatcactagcagtcgcaggtcaattagggagacatttccatcaactatagtatacgtgcatttgtgttttaatcaagaaaacaaacaattatttagcacaagtggcgtgtgtcatatatatggacaagtacaatggtcctgcttagtttccacacaaaaaattttatatcatgtcacatcaaacatttgaacacctacatgaaatattaaatataggcttaaaaataactaattgcatatattatgactaatttacaagatgaatcttttaagcctaattgctacatgatttgacaatgtggtgctacagtaaaacatttgctaatgatggattaattaggcttaataaattagtctcgtaattagtaaaacttatagattctgtaattagttttttatttggtgcctaaaaaccccatacgacacacacgtaatacccgatgtgacacgccaaaactttacacccaggatctaggccctgtttagttcgcaccaaacttctccccaacttccaacttttcatcacatcacatcacatccaaaactttcctacacacataaactcctaacttttttttttccaaactaccaactttccctaaacttctccccaatttcagaaactaaacacagccctaaacaccctggaatcgaattaggctgtgtttagattgacccaaagtttagaatttagttaaaattagaaacgatgtgactgaaaagttgtgtgtgtatgaaaggtttgatgtgatagaaagttaaaagtttaaaaaaaaactttggaactaaacacacccttaatcagctgaatgtagcacgtaaattccgtagacatctcgggaaaaaaaggccgtacgtgtgtacagttataaggttgtgtgtcaatacttgtttgtcgcccgtacatacggttggatggatcattaatggtttcttagacgcttttggatatgtttgtcgacttgtaataattctacttacagtacgtacttaaaaaggtaaacaatacgtacccattttatctgaaaaaaaaaattctacatccatagtattccttccgttacataaaaaaacaaacttatgactatgaatttgaacgtagaatacatctaggatttacgtctaaatgcatagttagaagtttgtttgttttgtacaggacggaggtagcagttgaaacatctgttgcaattcataagttgattcagaattttcataacgttagtcgcatgatattagccatttcatttaaaaacaaaaatcaaacggttaggacatactcatccaaaaaaaatcaacatagaagaagaatctggacaaaaggatcaaattcccttctaggtaaagtttttttttgggacggagagagtaagttctatctgttgatacactagttgtcgtcttttcgggtggctccttcatccctgtaaaaacatacttttttttagaattatatagtacaacgcatacactcacaacgcacgcgcactcatccctacgaacacagacacgcacgcaaaccctacccctataagcatcttcgaagattgtgccggcaaataatcctggagattgataaagtcaccaaagacgccttgctatcgacgggtatgtcacctaccactgaaagtataaagccgttgaattctaaaaaattcgcttttatagggagtcgaacccggtttagcgagagaagcacgtaaggtaacatgaatcatattagaatttgtgatgggagtgaaggtccaatggaattatgtaatcttttgtttgaacgaagctagctccgttcatgaaaggagaggggttgaggcaaagtgaattaggattgatgaatacgacgagtgacttggtttgaaccactttagcaaatgaatcgggtgtgtttagttcacgttaaaattagaagtttgtttgaaattagaacgatgtgatgaaaaagttggaagttacgtgtgtagaaaagttttaatgtgatgaaaaaaataaaagtttaaagaaatattttgaaactaaacacggcgcaagcggagaaaaatcttgtgaaaaacacggagtactagtctgagtcgtgttggattctgaccatttttggtcagtcaaggcgtatcatgtgtgacactgtaagtcaggccgtccggaacagcaatggaacagttgagctagccgactactactaccgctagtaacagcaactacgagctgtgtttttctcccacttcccaactcactatcttgttttctactccctccgttgtagaaaataaaaaaaaaagacaaaccctgagttttcgtgccaacgtttgactgtccgtcttatatgaaatttttttataattagtattttcattgttgttagatgataaaacatgattaatactttatgtgtgacttatgtttttaatttttttcataatttttcaaataagatggacggtcaaacgttggacatggaaaccaggtttatctttttttaggacggagggagtacgtaacaaagtgtattttcttttaaaaatactatatatataaattacttaaaaaatcatattgataagtttataaattttgtaagttaatatttaactaatacattaatagtgcgggaggtggaaggccccatcatttagctttttttctaataagccgaaagggaataaaaatcaatttatagataaaacttttatatatttgttattggtgacttaaaacctaatgctgaaaaagaaaccacgttgaaaatatctcaaaattaaatttaaaaacttaaaatttgtctttttctttagctgattaggctatcggatgggatccggagactccagaacagcagtaagggtatccacaatgtacttcaaaaccaatccatagccaataaaataatacattcagctatctaaccacattgtgaaagtagttcataggagagaaatagcaaaagtcatccataaacatatgggctgcccatatagaataaaatatgtcatttgtctctatttcctctctcctcctcatactacatagtactacccatatatattgtgaatgttgcaatagttaaagtccacaaatgtgggacatctatatggactactttagctatatacattagtgttgccctaagggcatcacaatgtattctaaaagtggtccataagcaatataatatttgtttcagccacctagcaacattgtggaactagtccatagagaaaaaattatattatttgtctctacctcttctctcattataatactatttgctatccatatacacggtgaatgttataatagttaaagttgttgatataagtagtccagtgtgaccgttgcagccaccatccctggcacgtctccacaacctttgaagttcacccgtgcgtgcaccgcggcgcacacactacaccaccatcccctccccccctaccgcctcgtttcgcacacctctcctcccccccatcccatcatcaattcttcaatcaatcatccctcttctcttctcttcccatttcaattttccttttcccctcataaaatcactctccctcttctctcttcctcttctccccccaaaaacctcgcctccgcccgatcgcctcgccgccttaacccccacccccgatctccttcctcaccgacgacgcgcgccccactccccccacctcaatgcgcgcttcctagggcatatgaccggtactacgacaaccatcacctctcgccgtcaccgtcatcgtcgggatggagctcgccggcagcaacaacaagcgggggagggtgagggggcccaacgacgacgacgacgacgccggggagccggacgccaagcgccatcaccaccagctgctgttgccgtggccgcagcagcagcagcagcagcatccggcgtcgcggatctaccgggtgtcgcgggcctccggcgggaaggaccgccacagcaaggtgtacacggccaagggcatccgcgaccgccgcgtccgcctctccgtctccaccgccatccagttctacgacctccaggatcgtctcgggtatgaccagccgagcaaggccatcgagtggctcattaaggccgccgccgccgccatcgacaagctcccttcgcttgataccgcttccttccccaccaaccccgcctcctccgccgctgttgctgctgctgctgctcctcctcttccccatgccgaacgcgagcagcagcagcagctcaccaagtccggatgcagtagcacgtcggagaccagcaagggctccgtcctctccctctcccgctccgagagccgcgtcaaggccagggagcgcgccagggagcggagcagcgcggccgccgccgcggcatccaaggacgccggggacgacgccgccacccccaccgcgcccaccgccgcgcccgcctcctcgcaggcggcttccttcaccgagctactcaccgggatggccgcagccaacgcctcacccgctgaccacaagcagcagcaggcgtggcagccgatgaccgtcgccgcggccaccgccgactacatcggcttcgccgccgccgccgcgccgcatacgcagccgcggaaatccgccgcgggccatcactccgcgatgccgcacaccttcgcatcacccgctccccacctcgccaacatcacccccatcgccatggcgcccgcgcagcacttcaccctcacacccgccgccgccgagcaccacgcggagatgacgcactactcgttcgaccacttcatgcccgtccacgcggcagcagcggcggcggcggcggcctccaccccggccggcggcgactacaacctcaacttctccatgtcctcgggtcttgtgggtgtccacagtagggggacccttcagtccaattcgcagtctcacctctccagccatcaccaccaccatcaccagcaacagcagcagcagcagcagctgcagaggctgtctgctccgctggatgcgcccaacattccgttcctcttcagcccggccgccgcgcccaccgccgcggacacccagttcgccgccgcattgcagctctgggacgggttccggcacgccgacatcaaggagaagggcaagcactgatcagatcagcagccgcgggcatcgacggcgacgtctcttcttggatggtaaggggccatgaactgatctccactctcccccaattgcttcatgttcagctttgcttgctttttggcagcttgtgccttgggggaatttgtttaagcccccaattgcgaatttgatatggtttaatctccaacttttggtggctctcgaggtggccttgtgtccctcaatcgcacaaaacactcgggctgttcttgagcaattgacgagtgtctaagctttagggggagggagcattcagctcaacccttttacaacaggtgtcgatgcactactcaccgggctgggatcttgcttcttgttctgttcccccccaacaattatttcataggagacaggccaatcgcacggtttctgcttgcccggcattggatttttaatgccttaatttgttgtaaccacaccctccctacgttggggtagtattgctattgcatggatggaagggatgatgcatctgtattgtcaaatgcttgaactgcaaatacagaatggatggagaaaaataccctgtagtctaagctgtttcctagtgttcttttgataggcattggctttgttgagaagtggacgctaacccccaatgtctattgtctttagcaagaactagaaaattttcagaagagctcggagctgaatatgcagctcagcgtagccaaaacaagttcctgttcatgccattttaacaagtagtattttggttgttgtgcttgatgtttgtttctgctttactactagttactagcagttagcacacagagttgtgtgccaccaccaagtcaatgcattcaatgccttgcctgaaggatacaactagaactttttcttggattgcatagttttgtctagctagaaaatgtagcaagctcaaatcacttaggaagaaatacctcctaagcagtacagcttcatgaggtcattttcttttatcaggtcatatctttttctaagatagtttcatttattgttgggagtctagatgtttactgacttagttcgtcaatagtagagatggagaataaggcatgtgcaatatatgtgttgttgaactatcagtgctagactgctagtgatggagttaaggtgctaaagtcttgaggagttatcttaacatcttttcaatgaaaagagaaaactgcgaacgatgcgacttcacaaaaaagaaaagaaaatatcagaggaagctaatccatatgcatctaccgatgttgtaaaaaataagtgcacacgttttagcgctgttgctttaactgtgaagtgtttcctcaaaaaacatctaatggttgacacttaggccgagtatgggacatctatctctgtcaaactcaaaggtgccatggggccaagcaatcaaacatcagtctatatcaaattctaagggcaaaccatacatcaaagcatactattagcgataattgacaaatgactgtgatataagcatgctgttcaagatttggttgccctttaactggatgtgaacttccaaggacccatcagggagcactgaaaatcgtacatattatagtttctgagtagttatattcacttacatatcgcagtatcagtagataattcacaccatgttaagtcatctttacagggacttacatagtatttcatgatcagctctcgtaataacccttaagctagcgctcaatttggaaatttaggctgtgagatctgaatgttcatatagaactattctttcgttgaagtaattttatacatagctagttcccttttttattcaaagttaatagcagaaggaagttcttttcatggtccttcagacttaaaaagggacaaatcatacaaagtacaacagctatgcggttaaaagctgaattgcgtcgttgcagttaacacccagtggttatagttatgttaagatttgtgtaattctcttctggaaaaacatgttcttagatctgggttagcgaaaatcattctcagtagttaatccctcaagtattaatacattatggattatgttgataatcattagatagttgattgtcatggaagacattctcagaatttgcgtcatgttcctaggtgatattctaaaagacttcattgtcaggatcatgtttcctaaattttgccttaatctttatgtaactcagccctttctgttcctcaccaactaacatgtgctacatgtaccttttgtcatatttgataggaaaatgtgagaagtgccactgtgaagtagtatgttgtatcatgaaatggttgagattttcttttgtgtagaagagtgctcaatattatgctttcctttattgatgctttctagcgctaaataaaactaaacccgtatcccgtatgccatattgaattttaagtgcttcgtatttcaggaaagttatctcagctggaatactgtgtacatgactacaaagctgagattttaaacagtatactaccttaagactagtttatcacaaagataagcaccagagtagccaaaaggtgcctttttttattgttttgtagcttagctataactttggtctaactactgcttttccatgtaagttgtatatattaagataagcttgaaatacatcaacatgcttgtgaattgactattgagtttacaaaaaataacttttagtacttagacccagtaatcaaactaatacaataagcctaagttagcacaatcttgttcatgggccattattacaaagcttgaatgaatgtctctagcacttcctaccttttactgcccaagaactgtcatatgtttgacatgatttctttgtttgtcaaataaaatgatttggatccttgcgttatagttgctaggattagaatctgttgtctcaaaggtctttagtacatgtggtttactatgttcttctagagtcctggaatataaatctactcaatagaccaggaaaaaaaagcattatgattaacatcaatccgacaggtgagatgaagctggggttttattgtcttctctgatagaatcattccagaaggatcagttaactcaccaatatagtaggcaacttatgctgctactgtgattaataatatgaaagtgcttcatcaagaaaactagaatgaccaaaaggtgctctgctaaaacagtttggtccagctgtccattttttttaaagcaaaagtttataggctggcctactatatgtctatatctcagcctctgtccatctgtcagcaatgccacactattggagtgacagatctgggaatatatagacacagtattacccattgtttcgtaacatcagtttaaagattgcgcgctaccttttaaggttaagtttagtagaatttgcacatagtttgacaagtaacttgtatttcttctgatggagattttcattctgattatttacaggaagtgaaaacatcaaaacgttgcaagccattcctgtgagcaacatccacagcttgaagctgccataagtgaatgctggatgcattctcggaagtagagcatcaactgcacatctaccttggtcacgggaggacctcatcatcgctattcagatgatcttgtgctttctctgcctgttgttgtattcattttgttgagttgagaatttgggagcattactcgccggagtgccctgaggaggggacgcccttgtaatcctttctgttgtaaactatgtcaatggatgcatgcggctctgg

SEQ ID NO: 23611 - DNA, 1081 bp, Oryza sativa
tcctgcagcccctccaagctaccatttgccatgtactcatacaggataagattgcagtcctgattggagcagaaacgatacggcttgacaatgttccggtgcctgacatttccgagtgtggttatctcagctcgaaagcttctatcgacattggaaccttctccctggcacttcagcttcttcactgaacccttctcccatcaggcatgatagccttatagacagtgccacaagcaccccttccaattacggcactctctgagaagctgtcggtcaccttcataagctcctgaaaggttatccgttccttcaggaagtagtgaggacctgaaaacccagtcttgcgctcttcgttcgatacaagatcaggtatcttggatttcaaggaccagcaaacgactgcgatcaacaccaatgagacaaacgcgataacaatggaggaaatgctgatgatcttctcctgagaagccgcttcttctgcaccgctgcttccctgcttgcataggctgaccctgataatcctgaacatgatttccctttgataccacaaaggccattgtttcccaggaaattgctgctgtccatgtgctggaacagcgtggtgctgggaagcggcccggcaagattgttgtaagaaaggttgcactccagcagactcgagagctctccgaatgaggaagggacttcaccttctagctcattgttgttcaagtaaaggaactccagcatgtgcaagtttcctagttgagtcgggatctcaccagatagcatgttgtaactgacattcacgaatctggagcgcagtgagctggctagctcgaccggcaattggccggacaagcggttgcctcccatctgcagctcggtgagccgggaaaggcctccgaaactgcttggtacggttccattcagactattgtagatagcttcagttgctccaggttcaccagtgtgccaagctcctgaggaatgactccagtgagggagttcttactcagatcaagcctctggagctttgtacaccgcgccagctcccgaggaatcggtccggtgagctggttcgacgatatattgaaggcga

SEQ ID NO: 23612 - DNA, 6461 bp, Oryza sativa
agaagcacagcttaaaaagctattagtattttttaattccctccgatcggttattatttgaaatgccctccgatccttaggtttaagcaggtggacgatctgcctatacaaaatgccaagtgggcccatatgtgaaaattcattttcatatatggatggcttaagagatcacatgctccgtttaaatggtgctattacacaaattaatcagtaagtaatgtaaattgatctcgtccatgagcaacatctaattaatcttcaagatcttgatcaaaatttcagtcccggccggcaacataattattttgtgacgtcgcagagatcgatcgatcagattaattgatcatagagacatggctagcagcagctactacctaacatggcacatgcatttgggagggatgtatctatttgtatctgcacatggtgacaaggtgtctgcacagatatgtgatgaaagtaggtgataaacttttgaaataaaatggcacgcttttcaaactgctaaacagtgtgttccgtgcgaaaactttctatatgaaagttgttctaaaatatcatattaatccatttttcaagtttgtaataattaaaacttaattaatcacacgttattaactccacgttttacgtgaaatgcttaatgttcatcttcaggatattcaatcaccaccttaatctgcaaacctttgcgtgacgaactacgctgcatcgtcgtcttccaaaaatgtggcgacacgttttgtttggtacattcgatacgatgatatctgtactatgcgtttttgcacatgagaatactgaaaccctacgaaattcagtgaatgaatgcagatatctgttcagctgatatcgagctgttttatagctgcaaatggctagacagcgaagatatgcgatgccttgtagacaaatttatttggttctccatataggttgatttgatttcgacaggggcccaatttgcaccaaaagtgatcgaagaaggacagattttattttgtcttcttatatactccctccgtccctaaatatttgacgccgttgacttttataattaaacatgtttgaccgttcatcttattcagaaaaatttaagtgattattaattattttcctatcatttgatttattgttaaatatacttttatgtatatatatagttttacatatttcacaaaagtttttgaataaaacgaaatgtaaaacatatttaaaaaaaagttaacggcgtcaaagagagcgagtacaattgttacgatcaagctgcataagaaagaaaccttttgcttttgcttttgcacgatgaaatgatagtcaagatatatagcctctgttgaactctcgagagcccatggatcaaaacttcggttggctcgatagttcagcccaatcggcccattgttgcatgcttccagtttgggccaatttttcatttctgtgtcacaattggaacttccgttttgatatcgctccttaagaaaatactccagagttttgcagaggtccatttgaatcacaaatcagactttctaattagaaattttacagtacttaagaaaatacatgagatacctaaattttacactaaaagatttggtacctcgagatacctagcacgtaaaggtatgaaattttatactttaaaatatggtatttccctgcactttctaaaggatgataaaattacccttctaatcaacttagctcgatcattttctgtaaaaaagttagctttatcattaattatttagctcaacacaacctattgctctccatataaagtatattctctgcgttcaaaaataattaaatgacgttagttttcttttactatttttaggtgcaaatttaatcatgacttttttggaataaactcataaaatctaataatcttatgagattacgaaaatacttgtaagtctatatcttttatgttttcaaactaaaaggatataaaaggatatgttgatagtcaaactttgaaagtttcgcctcaaataaaaaattcaaaaagagttatttttacctggatggagtatactccttccttttttaaaatatatgagattctttgaacacgatgtttgatcatttatcttacttaaaaatttagtacaagcatgaaaaactgaatgcttaaagtgcttttaataataaaataagctatatgaataaccaaacatcgtatcaaaatgtcaacacaacactatatatttaaaaatagaggtagtataacgaaggattaattaaacctcgtcctctgcataataaaaatgtaatataatcattttttttctttcaaaagaacagaggatcttgaaatgctcttttaagaaatggaagaatcccagagtccagatacataaacatttcatttattcacagtatatatgacatcatgcacaaatttgctagatcaatttacacagtacaagcacatccttattcctttgtacatatgtgcaatataccaccaaagcatcatgttcattccatcactctaattaagctagctagtgctgttccagcacacacaaacacacactggatcatgcagattctgaagcttgctttgctcctgcaggtggctggtgctactactccctttggagatctggaccatgcacacctcacatgcattcttccatgttatttctttttttttaaaaaaaaaaacgaaacaaaccggcacttagacagtacgaaatttcattgaatatatatcaggaagaatgattctaagttcaatcttccatgttattgatcttatttatacgcactatgatgatcatgatatgatatgatatgatatgcaggctaactaacctcttgttgattgagcatttgaccacctaaatttaatcaacctgcacggtggcgacgcggcgccgatcgcagcagcggcgacaccagctggtgggcggcactcgccggcggcgacggcgcgtagcaccaccggccggagtcgccgccgtgcagctggtcgtcgacgacggtgacgaagaagaagcttctcagagtgacctgcctgctgcttgccttgttcctgtactccactatggccttgtacaccaatggtatcagcccttccatttcttaatcaattaacaatctaataatatatatacccttggatagcttaatcagcaacactgacactgcaagtgagtgagcgaagcttgagctaagctagagcagcaagtgagcctgaaggatgctataaaaaggaggcagttcgagctgaagaaaacgaagggcattttctacctttttttctacctgcaaaaacgtaaacgtctcaccaaatccaccaagtctgaatttttctttcttcttcttttcaagtggcattcggtggaaccgatcagtgcggcatgcttatctgaatacacattttttcagctctgatcatgtgtcacattttgcatcacaggtgatgaggtgatcaaatcacgatggtttgatgtggaattgtggagtggagggaaggaggcgtgagctgaaaatctctgaattattttgcaggtggcgggtgactttcagcaggcaacaccactacaggaaaattgtaaatgtgacgacgatgagctaagctattatccatggagaacttgcgattcaagatgaatcatgaatgtcagattttgcatgttagtggagaagattctgtgctatgcattctgctgatggattaattcccgatcgacattgaattgaagagcttctgctggaagataattttgctcttttttcagttttttggagacttgttcagaggatagttattcttcagaaccgtgcattatattaattctagttttataggcatgtttagtggaatgatttatgtagataacatgtgcctggaatttgcctggcacactggtcttgtccttgatacttaataaactaatcaaagcacagaactctgttcttatgaatttgaaatgtaaaactgaggcaatgaacagggatgaataatttggtgattgcccttgagtcgatcaaatgacaccgacaactctgccgtgaaacacttgacaattggaatttgatggctttacacttttaatgcatgccttccattactcaaaagacaaaggttagctatagctgcagcttaattggggacactgtccactgaggtgtcctctttgatgtgttcatctcaccaaatttcagtagccaagaagccaaaaccactacctctctgcatatgtcttgacatctttatctcctgctgttatgagcagtgataattggtttggatatctttgtctcaaacttaatggagaagacttattagtgctacttaattggaattatttaatagaagcaacgcagctgtacatgcaagatgctgctgcatggttgtaagttgcaagtacatctgcagcacaacgactgcatacctgcagcaacagaatgaatacaacaagtgcaaagatactgtcaaagtttcagttcaggtgctgggtacatatcacacgaccagaaactgattcagaacgttcttaaggtagcttaatcttgcagcaacaatgccaagttaagggaccaattgcatggtaatgaggggcttaacattaaaggaaaaattgaaaaataccatcgcaaatattcacgagttgtgaaattccaatcgtttgttaattagaatgacatgttgatgacacaaaaaaatgtattttttttaaaactccgtggttttgagataatactaagaaaattggccctaacattaattgtacatgaacagtcttgggtgcaaaagcagactgaggtgagaaccggaattcagaattgagatgggccgtggatgccatctggcccaaattgaaagactaggcccaactcgtattgtgagaatgtgggcctcaagttcgtaatggactgcatctgatcggaataattaaattccgaaatattagcactgtgcttgactgaaatgttttagttaccagttgatgattaatagcccgtttacttggtcatttcgggccaaatcgttgcacaagaattatagtgtgacagatttccttattatgtccaaaactcactctcggggaatcaatcaatcattaaccttactagttgaaatcccgcgcattgctgcgggattttatatcaatactttgaagaaatgaaaataccatataaaaagagagagaatgatatgatggttgatacttacaaatattgagcaaacacttgtaagtaaaacttcaaccgaaccaatatagtcgaaaaataaaatagggcatgcaacattaggaactgaattgcagcgtcttcgttattcttcaaaagaaatagtcatctagttatttaatcctaaaaaatgttgcatatttactgtgaatcatgagttcagaggatggtggaaggtatttgtggtctgttatgaatgttgaagggatgttaattaagaggctcatgaagggatgctaagaggctcgttaaagctccttgtggcctaattaattgtgttagttttcctgtaatttctcaagcagaaacggaaaggagaggaaatggacaggggcaaggtgatgtgatggcaatatatgccatcaataatcaatcctatggtgagaaaagaaatcgatgacgtggtttcttctaagcacagttaatggtcttaactttctagaaaagaagggattactaaactacaaccaaaaccaattaatgaattagggcttgttaggtcgagtgtcaactttatcacatttgtaccagacaagtttgatcaaccgagctaggctaaccttttgtccttttggtacatactttaactgtggcatgccacatcaacgacggattcccttctctctgtcacaagttgctacaagtgtggctaataaattttagccacaaaatatatgacatgcatataccacgcattgcaaaaaataattggttatagtactaaggaggaacttagcatccaaaaataatatagaagaaatagattagataatctaaatccataaggattcaaactttaggcaacacatcgctcctagtagcaccctgccagctgagctaactgccgttctcttaaatttggttggactactgaggagaaacttaatgcctaaaaatgatagaaaagaaataggtgagataatctgggtccatgaggattcggacccgaactagcatgtctctcttggtagcacccatacattgcaaaagaaataatgtggaaaaatgtggatatcatctaaccagccatacccttaatcaatggtggttctagagattttgagggtggtcttgaatcaccctccaattttggtataaaagtacccccatcattcatccaacgaaaattgtgataaaatagacataattttgacattatacaatttcaaactatggaataggatatcacccaactaaaattctgaagccaccattgcctttgttaccgaacaatgcatatgcaacaa

SEQ ID NO: 23613 - DNA, 1286 bp, Oryza sativa
actacagaaaaattgcatattgtcagtccataggctcataggacgtcttgtaagagctcaaaatatatgcatcatcaccaagttttcagccacttataccagaaataattttcggcgcattaatttactaccagttggacaacattatatgctaaccagttgcttgttttcttgtttggcaggctagtgtcttcaattcttttttaccagctgagtataaactagcaagggagcatccacaacttaactgagatcttagttgaggaacctctaggttatgtgttattgttgtgctccaagaagctgtggatataatctaacctcagtttgaacaagaaatctgtcgttctgaccaagattaaccatcggttaaaggatctgaagtagtccagttaacttcagtgactaccctgcagtggaggaagatatttcagagtttggagtgttccctttatgaaacactccaaataggcagagataggttcagttcatcagtccacaaagatctactttactaccctgataaagttcagtagcaacacactgcattgtacatacttaaacagtatatatattgagctcataataaatataacaaattaatctactgattttttttcttgctcttaatttcttgactacagtgatttttcctctctttgaccttgccaacttactgtaaaacaaaataaatggaaataaatcacagtaccttggaaaaattatcatctttatcatgtatggacaagcaagccctgcagtcggcagccaaaagtcgatgccttgaccatctttttccagctaccactgttggttttgacttggtgtcctgcaaactctgcaagcaagtcaggtcagcaaggcacacgaaattaggtattccagcaagccagccaatgataaaagtgatgagctgatccatgcatccttcctgccatggctcaaccaaagtaaggttgaaatgcactaatacctgctttttatcagaacgcagcagcaacaagcaagtgagcaacaaagaactgctcacccaaagtccacatgtaacatagcagctttcacaaagctttggagatccaacacatgtgtgaactttgatttggtaagataaaagaccatgaaggtttgcatatgttttctgcacatgctgtgcaagtactgaaataaccagaaggtaatgtaagccaagccaagtccagcataacgttcggtaagttcagcaaatgggctggcagaagcagacaaccaacagccactagaaacaagttgaatttacatctctcaag

SEQ ID NO: 23614 - DNA, 23167 bp, Oryza sativa
cattctccggctatcacaacacaacaaaatagtacagagaatcaaaccatgtgttactattatatactatgcgtttagatctttccatttggatgtagaggccagtttaatccattagtagaaaagaaaaaagacctttcgagttggttaaataattaagaacagagagttagttccttcaccttgcaacttcaagcttagctacttctacaagtagcagccgtatttcctcatcgacattcttcccagccttcaaggaggatgtgatccctgtggttccggtcctgccaactccctagattttaaagaaagcaagctgagatgacaatataggtccaaataaactattcagaggaccgagtactccatccgcctcaaaatataagtatttttagaataatgccaagtcaaactttttgaattttgactattaatatgtaaatttgatgttactaagtttatcattaaacaaataatcataatatgcaacttttttaaaaaaacatatattgttggtcaatgtagtatctcaaagaccgtgtcgagatctaaaaatgcttatattttgggacggagagtagttactagagcaggtacaatagcaggctataagccagctataaacatattttaaagagataaaggaagagagagaagagcagcgggctacagatctgtagctagctgcagcacggactccaagacgtaatgtgtgtataacaggtgggactaggtattaatagtatagtaagcaactattgtaagaattggctattacattagctatagatgatttggagctagtagtgggctatactattaaacttgctcctagtaaatgcctacaactgtaccataatttcttcacaggaaatcaattgggatggttgggaaccaaactcctccgcacggaaaacggagcaatccattagcacgtgattagttaagtattagctttttttaaaaaaaatagagcaatatgattctttttaaacaactttcgtatagaaactttttttgtaaaaaacgcatcaaaataacagtttgaaaagcatgcgcgcagaaaacgagaggatggagctgggaaaaggggaaacgaaccgagcctaagcaggccaaacaggtggacaggaaggaataatttaaactattcaggtggacaggaataatttcttcaaactattcagagtactccctgtcataagattattatgtgaacgcccgaaatgcatctatccttttaattactcaatgaatggaaatttgaatccattccgtcaatgcatgcaattttcaagcatccaacctaaatttgttcttagaacatcgacagtaagtttcgaaaacatatctaatccctgtaaaagaaccagtttgcgcttcaaagtattcgtctagtttaccaggaatttccatgtgccaaccatgtaagctagacgtcctagctaaagctctcggtatactaggtactatttatattttgagcggtgttttaaacagcgagctaagacatttagaggttagccttctcaaaagctatagcggctaaattttacatgagaacaaacagctatagacggagatagcggtagctattgcaagagatttaaaaccctgattttgaggcttgtgttccaggtgcaacgacaaacaagtgatgcatatgtaacaatgccacaacacgcatatttgcatttttagcaaccaaatggcaactcaagttcagtgattctttttcagtaaatgcctaccgtggaatagtttaggcatgcatactagtggcaatatgtggctactatcctttcatctgcgtagaagattaaaaacttcttgatcgcccatgtcgataagcaaacagattgccctaattttcacaggaaatgcataaaagctagattctgtgcatgaaaagattgttccatcatcatcagaaccaacagatggacactaacagttaatccctgctataggaacatgttttgtacacagttaaaaaaaaagaagcaattttcatgggtaaatcagtctccgatctgaacttttattttcggtagaaaatctaaaagttttggaagtctcagtaaagaaaaaaaaaactaaatcaccaacgtaccccaagctccctccaccttaccccaatggttcgtctaaaatttctcaacgaactgatcaagattcaagataccccaagaaaacaagctaaagtagaatgaacacagagccaaatttggaattgaagacacaactaagcttaaagtttgttgtttttttttcttttcccctaagaaaacgaaaggtgtgcgtcgatccagcttggaatctgggcacagtacgtggaggtcgattgattcgtcggcaaacacggtatatagaacatgaagggatcgatggatctattcgtggatcgaaaggaattaacgaactgatcacctgggtggcgttggcggagagggatcgagaggcggcaaccgcaggacgacgaagcgcggcgactacagggcggagatagcgcgtcgccatagcagcagcagcagcaaagctaggtcgaggtctcgaggaggaggagaagattggaagcttaatagtggtaatcctcttattggaacacgcagcgtactgcgaagtagatgggcctatccgataaaccctagtaaatcctgaacggtttccgggccagttattatgcgatacctacctggctttctgattgcctttgtcctacgtggacatataaatgatgcttggatacatggctttacagtaagaaaatactacctccatattttaatttatgacgccgttgactttttctccaacgtttgactattcatcctattcaaaaaatttatgtaattattatttattttattgtgacttgatttgtcatctaatattttttaagcatgacataaatattttcatatttgcacaaaaattttgaataaaacgaatggtcaaacattggtcgaaaagtcaacggggcatcatacattaaaatatggagggagtatcttttttttaaaaaaaaaaaccggcgagacccatatatatcaatggcgacgcgatttctcgccgggaagctcctcgccgccgctctccgccggaggactgcggtctccaaatccgccgccgccccctcctcctcaggtatgtagacaacagatcaatggcacaaccaaattaattacgagatttaatcttcatcgatgtccgtaatctagctgttgttagttaagttaatttcctgcttgagctcggaggctacaattaagttaattgtctcctactttgcatacctgcttatgtgagcatgaattttaatgtgatttttttcccctccctctgtctgcttacatgatcataaaattaaggacctcaaggagtatgagtatcacgtacaacattatttaacaattccatgtgtacagtgtacttacttgcatatgtatcgatctcagcttgtttttttttctctatgtataactgttcctataaattttagggaggatgcacattcagcaatggaagaactaaagagactgcatcttccatgaatgtggacgagggaatgcgtatgctacgtacatgaagaattagctaaaattgaagctacaaggtgaagtaactaacattgctcttattcttgtaaatcgtatttaaacgaactcaaaaggtcccactcaatgcatgattagtagcatacatacaaatgttctctctgttgttttgacagcaaggaaatagccgagataataatgtacaacaggttccaaagaaagtgtgtaatgggatcagttgttcttgggatgggccttgcaggtgtctgtcacgagcaaggattatgtggagaagaatcggggtgaatgggaatagattggattatagtagatgaaataacaacaaacggtgctgaacctaaacggcgcgacgctctccgtcgcattgagaaggcaggccgatgggcactgagataaatcttgatctaatgcctaattgacctatgatagtatccctccttatatagatggaggactacttaatctaatcctaacaaaccttatctaatcctaacaaatcctaatcctatccaatgagcctaggacgtccggcccaaagcccatgacagtgtctcttgtgtctggtatactcataatcacaggaaggccgtcagggaggtgttcagggagctggagccggagctgaagcacgagatcttgggaaagtattcatcaccaagtaactagccatgtgtccagttcagttctccttcccttgcaatgtgctacttactaatcaatggcaatgactctggtgtatgcaaatgttacctcatgtttgatgaaagattacacatctgtgactgtttagcttattgataagtatccagatctcaaggtaatttacgatatccaacaagagtgcagcatagtactcaaaattggcttcctcacatcaggtcaggagacctgaacggcaacatttcaagcatgatgatgatataataacgcttaagttatagaatatttgtagcagatacatagttaaggacgccagtttttgtatggcctaaattatatagctagttcagaggtccaccatctcctctcctatacagccctttaaacaaaataagcctctactagtttttgcatgtcagtagaagtctcatcatgcccacgcaagaagatatatagcttctttcgcctggttagtcttgccaatacactgacttagacaaacctaccagccagatgtatctgtcaaataagtaggctaacggttattattctatataactcatataaatgttaagctgccaattgttgcagatactagtagaagagagtccaaggaaaataaataatttacctcttgctcatcatatccacttcaatctacttctgcagcagtgcttgtgctcacaacctaattcagaagaaaaaggaacggtttaaaacagatcaaaatcagttatctacaatttacttcccatgaattcaatttgatctgacttcaatctaactggagtacttttgtaccagagctgctgctacagtttttctaacatgtcaaaccaatcctctgccattactacccccatgaactcagcattgtctgcttctaccatgtaacaattaatggttcaggagggttatttacaagaaacagcttgtcataatattctcaagattttgatatcagttgtactatcctcttgaaaaaagcagaacagaaaataaatgctaattactattaacagcaacaaggaactctaatgtcatacagtacaagtggttcagtcaggttaatgaaaacaacaatcaaggatgtttggaggaaatggcaagagggaagtggaacttttacatgatgatcacaatcaccaggcatcaaactgatgtaaatccagagttagttgagaaaagaacacaaggtagacatgctctccagagcaaggagctgagtggaatttctaacgtagccaccggtgatgctgttattttcaagagtatctacgaaaaaaatcacaccttcgacaaattaaaaggtggagcattttaaacgcatgttgttgatacctgcgaaatgtaatccttaagcttcccactgatggactcatccaatgctctctctgcaagctcatacatcatagaatggccttctggcccactaagcttctccttcagtaggtacctagatcaaagaaggggtaaatcaaagagaactcttccctacaaattaccaatttcagataacacaagaaatgaccaccaacctttgctgcacaaggagttcaagtgcctgcttgttgttaccaagaacagggtggttttcatcgctctcatttaaacccagccgtctcaattgatgccagagatcctctgaaatgtgattggcaaacttcagaaatataatcgtcggtgaacttttcctgactgacatactgataaaacggaaaccattaccttcagaaatttttccaccggacagatgaacaatgctaatgacaacaaaagcgaagccagacacatgggcagcctccttatgctcgacgtacttgctgtacacctcagggtctaacttactgaccaggacgtagctcttcgcatccacattaactaaaacgaattccaattcgctagtcattttatcaaattcctcaaggagggaataagagcagaaggtaagttaccctgctgctgggacgggcggccagagcgggtggacggggcgcgtgtcctctggagctccctcatctcgtagccaaatgtggcggcgagcctgtccccggcctccttgatgacgagtgccgggagcacgcgctggcggtagttcttggtaacgatctgcgtgagctcctcccgcttgatggggcagccggcggtctggtgcgtcttgaagagcacgtggcgcatcacctccgctacaagcttgtccttctcctgcagccgcagtggcgcaggacgggctggtcaattcgtcaaacacctcgcgtgcgcggagcctagtcgcgagacaagcgggaggaggacggagggggcggagagagagagaggagtagtacctccgtggagatgtcgatctgcgcgtagtcgtcgctgacggtcgccatccgaaccaacaagggaaggaacaggcgggggaagagaagaggaagaggaagcttctccctaggtcaggaatggaggattgggtgaggaatcggcggtgaggttggtggagagtggggcggcggaaggaggaggacgcgtcggccgatctggttgcagcggtcggcggcggcggcgcacggggggacgaggggagaagggcggcggcggaggggttgcgtgcaggttgaggagggagggagacggcggagttcgcgcgcaaaagctggcttttggcgccaccagttttagctgaatactttatgggcctaaagaggcccaaatcatgaagcctctgtcgctccccccggcccactatcataacaaaataaatttataaatttttacaaaacttattctaatatagttttttttaaaaaaattaaaaatttatttcctccgtctcaaaatataagcatttctagttattaatctgggcaaatagttattcagatttgtagctaaaagttattatattataagtgagataataatagtaatacagagtacttgtgttgtggatgataagacaaaatccaatatatattacctaataagtggaacggtttattagaaaatactttctcaattctaaaatataaggcacaaccacctttaacccaaagaccaaaaaataattattatcatcttatagtttggatcatcctaataaatactattatacatgcatccaatagaattagagaatgtgagaataaatgatttaaaaaggtaagaatttaatggagaaaatgtcatagttaatttcatgtatatatgcatgtcttatattatgaaacatctttaaaaagtggttgtgccttatattacgtaatggagggagtaaaaattacttcataagtcaaacttttatatatttgttcgtagcgacttaaatgttaacgctaaaagtaaattatattaaaaatatcttaaaatcaacttcaaaatcagagtaaaaatttaaatgttggcttttgctttgatttattaggccagtcaatggggctccgttcacaaatcaccaaacgcaaacgccatcgattttataaacttgatctgatatgaaatcagtgatcaaagtttcaaaagtttatctaaattttaccttaataaacttaaatatttatgactacatgtttgtgcgtgatcggaccaaatccacactccttcgttcatttgcaacgaatcagtcatcaaaacgctaaataaacaggcctcgtgtcgtgtcacacgccgccggtcttttctccgccgccgtcgccgtcgccgccgtggtggtggcggcgcttggcccagaacctgaggcggagctcccttccctcgagcatcttctccacctcctcgatggggaggcccttggtctccggcacgcagacgagcacgaacgcgagtgccgccacggacagcccgccgaagatgaggaacgtccacgccgccccgatggcgtccgtcagcgacaggaacgactgcgccaccgccaggttcgacacccagttcgccgtcgccgccgcgccgccgcacacgccgcggtgccgcagcgggtagacctccgagttcacgatccacggcaccgtccccatccccggcgagaaggcggcgatgtacagcgccagccccgccatcgccagccacccgtacctgctcgggcacccccgcgtgtaccactccctcccctcgccgcggcacgcgtcgcgagccgtggcgttcgacgccgccgccgccgccgccaggcacgccccggcgcgcagcttgtcgccgccgcccgccgcgcagaacccacaccccgccgacgccgccgctgccttgagacacctcgtgcagtcccagaacgacgacgacgagcgggaggagtagtccgggcatgtgagcgcgccgccgtggaagtgggcggtctcggcggcgccgacgggcggggagtgggaggtggcctcgtggaacacggcggagaggagggcgagggagaggatgacgccggcgaggctgatgacgagcagcttgcgccgcccggtgcggtcgatgaagtagatgctgacgagggagccggcggcgttgaggccggcggtgacgagggacagcgcgagcgccgtctggttggaggcgaacccggcgagctgcacgatggtggggctgtagtacatcaccgtgttgatccccaccagctgctggaacacctgcagcccgacgccggcgaccagcccccgccgcaccgtcgccgtcgtcatcagcagcgccaccaggctcgtcttctccgacgagctcctctcccgcgcctccgcctccaccgactccttcaactcctccttctccctctccacctcctccgccgagtatatcttcctcaagatcgcctctgcttcctcctccctcccctgatctcaaccacaaaaagttttttaaaaaaaggcaggaattaacgaagaagaaataatggcgggaacgaactaaatttgttattaggatgattttaccgtcattgggtagatactatatgcatttcatattataagcttttctaaattattcttttaggctaggtttaagaggagggaaaaaatacgtaaaacgagatgaggccattatcccataattaattgaatagaaattattttaaactttaaaaatggattaataagattttctttaagcaaatttcatatatacttttcttttttgcaaaaaatacaccgtgtaattgggaagcgtgcgcgcagaaaacgaaacaaactctctttcttcctccagctgctgaacgtagccttagatttgattaagtttataaaaaaaatatagtaatattttaacacaaaacaaaaaaaactaggttagatgtaatgaaactaatttagtgctataataattgttatatttttctataaatgtaatcaaagtttaaaaattttggaaaataaaaatcaaaacgacttataatatgatgaaatagaggtgcaaccatattttctgatatctctcgatattttcagtattacgaggtagttctgctcaactaaatttgcattacaagttttgataagagaacatctcaaatgctgtaaaatttatcttgttactatacctttcggtagagccatctcggcgactcggggaggaagagcatgaggaagaactggacgacggcggggatggcggcgacgccgagcatccaccgccacgtcccgggggccttggtgaaggcgaggttgatgaggtacgacaagaactgcccgccggtgatgaggaggccgttggtgctcaccagcgcgccgcgtatcctcgccggcgacgcctccgagatgtacagcggcgacgtcatggacgccgtcccgacgccgagcccgacgaacacccgccccaccaccagctgcgccggccccgtcgccgacgccatcaccgccgcgccggcgaagaagagcgcgtcggccaccaggatcgacgtccggcggccgtaccggtcgttcgcccacccgccgatcgccgccccgatgatcgcgccggccaccgccatgctcacgatcatctcctgcagtcgtcaccaccaacccagcaaaataaattttcagaaattcatcatgtgtttgtgttcttgctgagaatttcaagaacgtgtcgagaaatttggttgcgacctgaagccatgtgttcttgtcaactgaagggaaatcgtcacggatgtaaagcagagctcctgaaatcacacctgcagaaacacgcaacaccacagtggcaagatcacttcgctagctagctaagcaggatactgtaatttaattacttttactacttcaaatcttcagatattcagttaaatccaactaattaatcaacggaatctgatcacttcaattcttccaactaactggtgtctccagaaatctcatgacatgaacaaaaaagaaagcctcttttatctgaaattttcaagaacttgctactgacactgacaagaacctcaattgggcatttcagacacacaaaacctgacactaataatcagtggaacttgatcactttatctcttccaactaactggtgtctccaaaaagctcatgacataaaacacacacacagaaagcatcttttatctgaaatttccaagaagtagcatgacactgacaagatcacaagaacctgaataattgtgaatttcagccacagaaaacctgaaactgatcaccaatcaagagtatattaccggtgtcgtagccgaagaggaggccaccgatgccggcggagaaggcgagcctaaggacataagggttcctccatgagagggagaagcactctctgaaggttgagccatcgaactcatgaacacctccctccatggctatctctctaatctaatctctccccccttatcctttgcatcccaatgcttagaaatgaggagcacaagttggcctctgactagtataagtatatctgcaattctgcatagaggtgtagtactagcagtagcagagtcccccactgcattgtctgcttgtgtcatatggtcacagatgacaaagagaaagagactgattgatcgaaaaggagaagattccggattatgggattggcgtgatctcgccttgtcagtgtttactttgactccaatgacttgtggtcgtggtgatcctctctgatggtgacaacgaagacgatttttagtaggataataacaggcattatttggtccgtaattttttttttgtccctgttgactgatgttcattttcaagtcaagcttcagtgactgaactgtggaaatggattttaatctgtcaagtcatatttgtttttttacttgtagaggttaaattcaaacttgtatgttcgtgaagtgatattagtatgacatatcaatcttatcaattttttttctattttttctataattgtttaaatgacatgtaagaaatgaaggggcatcccctcaaatgtgaactctgtaactgaaaactggtttgtttgtgcaggtgtcagcggatggataagtgggatgaagttgttttctatccatttccttatgccaaatttgatgtgcctccaagtagcaaatgtgaattgcgtgatcgaaatgatgaaagaaactctgtaccgaactgtgtttgttcatgtgcatgttccctgcattattttctgtcgctgctgtttgttgtttgcctacagttttaacattgactacagggccgagtggtcaaactttatcaaatttggacgagtttaaaatggattggtcgaatctttagggcagtgtatgattaaactttcttttgactcatttgatctagatggcgcctatcttttcatcttagtggatgggagttcaagataccaaagcgcgagtgagacagctacgtgaatgcatgtcactgcctatcaattccttcctcatcatggtcgatgcgaaattccgtgcaaatggaaatccaaatcatctccaaagttgggcagatctttcaagcatttctggagcatacttaaaatgtgtttacgtatgtgccactttagtactttagataccttaatttctttataataaacaaaacaaatggctagtactcatgctggtggataaggcaaacatcttaaggtgggaaaaacaaaactaatgcaattaaatcagacaaaactggtagcatgggagatatggtgcgaacgaaacggacatgttgcatttgctaaccaagataaataacgagatcaagctgtggagcatgtgtggagaaaaaaaaacatcacgaaaatatccgcttagcatatctgggtggagctgctccaattttcttcttccttctttttcttcattcagtttttgcctttttttttccttattctcctctgtcttccttccttctttcaccgtttcagcgaagctgtcaatatttgctcccctgcttaatataacaccagtttagcttggcttcggtttaaaaaacaaacaaaacgaatggcgcaagttaggctacagagtatacatagcaggaaggcaccataattgtgatgctttcaagagttcagataggaagaatgaaattttgtcaccgtcatacgatttcaagttaaattttggatcaaatcatagagaaatcacttagagatggtgagatgggcatatctccagatggctgcttattatttgtccacactctctgatagctttagtttgcttaacttagctttctgctcttgcagttgaatcacacattcttggcacacctggaaaacggccggagaaccctgaactctcgagccatctaactgcttctagtgtattgtaaaatgcctggcatttttagtttaattactccctctattttatattatgaaaatgtttttgatttattacatgtcaaatttctctaagtttgactaagtttataaaaaaatgtagcaaagtagcaaacaccaaatcagttttattaaattcaccactgaagatgcattttatagtgtatcttttatgttaaattgttattatatttttctataaattttatcgaacttagagaattttgacttcgaattataatatgggatggaaggagtacatcaataaacaaaaaaggattaaacttctgttcatggaaaacaatctaggagcaattaatggctaatacttgtggtactgaggatcatctcaggtttggatagagcttcttatggtcaagtacatatcaacttttttttctccctttttagagcagcacttgatctggcacgatgtactcaatagctaagctagcatgtgcatacaggactagagaatgctactagagtactagatggcaaaaggagacacaagaatgaaagcacaaccgttggatataggagtaatccaatccaagggcccagattaattcatttttgccattttcttctaggcaagaacagataggagtatttcacagtcagctttcatctctgtcctgtactgtcctggcatggtgtgtgtgcagtgtcgccaagtgttgggtgctggtggccgcttgtctcctaccaccacaatgtttcagactttcaggatggtccaaaattagctcacagaacatcaacatataatcttttgatattatgtccaatcaacagcatgaaagaaaggaactttaacctctacaatacctgcatgccatgtgcacttgaaatcctgaagtatgggcaccagtgtgttccatactgttctcttacttcctcattcctaaaatataagtatttttaagtttggcacgggtattaagaaagtatgtgagaatgattgaagaaggggtgtgattggttaaaaagagaaagtaggtgaaaaagaatggttgtgattagttgagaggagaaggtaggtagaaaaatagctttattttagaacaaagtactgtgtagaaatagctatatttttggacgaatgtagtatctctcttctgaagtctgaacaatccatatcattcttggaatcttctgatccatctatccaacctagcacacaagctggaagagattaggtttgtactttaagtggtctatccttttttttttaattgatcacctggaagagattactagtataactgtcctgatttgatgacacaagcatgttgaaagatttgggagatgttagcctaggaagttgtggtcaaagtgtcacacaatctggtaagttaaaatatggatcggagcaaccctaggtgaatgcatgggtcggtcacatcaccatactttgttgcttgattttttttaacgactctcacggtgcgaagttttattgatagaacaggaaaaaattacaagattacaactttagagggtcgtaaccaggaaaaagaaaaaatataccaccacccacacaccgacaacgcctaacacaagtccgggagaaggctagcaccggaccagtcgccgttaagcgtgaccgaccgccgctagactaacaaaggaatacaaacgagatcgccacacagcaagagggtgccaaaacgacgtcttcaagaagagaagcgacggaaaaccgccgcgccgtctgtcaaggctcaaaggagccaggactgggctttcgccggcaaccacccttgagaggcgagacagcacgtcaacgtcctcaggaggaggaattaaccatcgttgtcggtccggccaaggctgggttgggttttcacctgccgctcaccacatgcgaaaccatggctgacacactgatgctccaccaccaatcaacctctgctgacatgtgggacccctgcaccagcgccctctgccggctggccttcgtacgccaaaaaccatgccacacccacctgcagctcctccactcaccaagggaagctttggatgctagtttccggccactgatgattaaactagttaatcatgcaatcatgcatagggcaatcactgcctaatattttataaagactgtctgctctatgttaataataaattgctgatacaatacgcacagatactgtattttgcatggactggcctatcaagaaagttaattttttgcttaagcgttgtagatacgcaacctggtaccatcaaaagcgtaaaaaaacgaccaattaagtactgtatttcaatgacctaatcgcccttatattttctttctttctttgagataaggatgatctaattatttagctactaggacatgaacacctacctagcctgctaagagcccattgtagcttttgggccgaaaggacagtccacagcctaatagtagcctatttcagtacagccaactgtttccaaccgtttgaacattccagcccatcatgggctttgcaaatgttctctcctctcgtgtcaattaacttgacagtagtagtttcttcatcagttcaggcatctacgactgcaattaattaattagatgtggttttggaaacagaaagtacacaacagtagaaagcatactgtacttgatcatatactctctccattctaaaataaacacatctaatacaggatgtaccacgtcccatactgtgttagtttattttgagactgagggagaagctgggagaggcaatcaaaatgagcagttgattatttttttaaatttattgtgaaggacgttgattaattaagatttggcactgaagtgaaaagtgcatatacgtacacatgaatgcatgtactatatagatgatgaagagagaacggcatgcatgtgaaacgccaacgactttcagttaaagaaaggtaacaagtaccttaagttgggtgcctgcatctgcatgcagctggtagtgttgatcgatgatatgatcatggcatgcatatggccgatggatggtcctaaattgtgtgtcttcgttaatttctttgaccactttaatttgagagattatgcatatatattaatattcctctgatatttgcatatggtggtggtgatccaggaggtaaaattaatataattaacattcattcatattttttcttctcctcatcacgcagtgtgcatgcatgcatacccctctctctctctcagagaggaaattagaaatgcatgataattaaccatgcatgtatatattcctagataccagtagttctagtatattttgggtatgtttggggagctttaaattctgagaaacagctatttagtagccagcttctgataatctaaaaaagctctgaaacccagcttctccagcttctggcttcttagttcatttttcagaatctgtaactacaaattctcaggatctgtggactgtttgaggcagcttcctacagaagcagcttttgggaaaagctgcagttgagacaagctccccaaacagggcatttgtatctcttgtaccgattttagatagcttattaattagcttctttttgaaagattcccaagtgaaggagtgagactggttacacgtaagcatttacgtcatgcatggtggatcgatatggtgctacgattcacagagagattgatcagtaggactggaactggaaggggagtggtgcaacttttaattaattagccatagatggtcccggctggccgagtgatcgatcatccatcttgctgctgatacgcacactacacattgtgtaattcgtagtgacatatgggtctcgtcccattctaaattgcttcattttacaacagagagagtaaaaaaaagttaaatgacttataatataaaatagaggtagtatctgatagcaatagtcaatcagttggcgtcacgtaattaacaatgtaacatatgtatacaaatgatcgatccaaccatatatatgagatctctaaaatgcatttaattatatgtgcgtacatacaaatatagacgcctaagaaagagagaagaagctatagcttaattactcccttccttcgacccaaaatataagagacttttagatgtactccctccgtcccataatatagaggattttgggtggatgtgacacattctagtacaataaatctggacaaaccgtctgtccagattcattgtactaggattataggacagagtgagtatatcgacacagaattcagatccatagtattagaaattatcgcggtctgtattagttattagttgcgtttatatactttggtgtgacacgtgctttgccaggtcatcactggtcaggatactgcaagcctagctaagctactagtagctactgtgtactagctagctagtagcaaacgccatggccatggcacaggatggatcgatggatggatggatatagagggttggtgttgcctcgccatggcgatttggcagccaagttgcccgccctattcccggaaactgatgtatgactcttttgcatccaccttgctcatccatcgatcacatacgcaatgcaacgcaacacaagctttaaataattttctctatctctctctctttctttctctcagatcatgtatatatgcaattctagctagctcttttgcctgcattgcatgcagtgactgacccagccacttaaaagcactgtagaaccagcagctagcagctgctgctgctttcgccattacatacgtatacgtatacgttgcttttgactgtcactagctctgccctgaccgaccatgacgacggccaacaacaatcatctgttaattgtttgcaatgtgtgtgtgtgtgtgtgtgtgtttgtcgatcgatgatgaaccaaggacgacactgcagctttaatttgttcatcaaacggtcatgccacatgaaagaatctcgcaaccaactctcatcagctcaaagaaagaaagtaagaaacggccatcagttagtttgaacgaatagtactatagcgtatacatcgctacgtgcctcatgctgtacgttcaaaagaagccaaacttttgcttctttgcttttttattttttttgtttaaaagaagccaaactttagactgtgtaatgctagctagctactgtatgactgtatctctcttttctcttttttgatcgatcagagtgaagacacattgatcgatcggcaccttttaaacaaactcaagttttggaaaagctagccaagaacaacgtacacaccatgcaattaattaaaagcactgcatttccattgcatttcaaactcatcgtcgaccaacaagtagcttaaaattaattaacacaccgcatgctcttcgctaattaaccaaccgattcaacagcacaccacaccacaccaacctaggtaattaagctaagctagatcgcgatagatcactctgttaattaattatatctacaaactcctccttgagatagattaaaatcttgattaattaattaagcatcacacattaatcaatgcaaggtagggatcgatggatggatcagagccagagggcgccggcctgcttgaggagggggacgagggtgccattgatgtggcacgccatcaccttctcgacgccgccgaggagcctgccgccgacgaacacgacgggcaccggcggctggcccggcgggaggagctgcgacagcgcggcctggatgtcggcggcggcggcgagctggtcgagctcgtagacggcggggccgacgccgaggccgaggaggaggcgcttgacgacgtggcacatgcagcacccgctcgcgctgaacaccaccaccgcgttcccgctcgccatcctcgccaccctctcgtacaccgacatcatcgccgccgccgcctcctcctcctccaccgccgccgtctccaccacctgcatcctcatcctctcctcctcttcttcaaatggcacgattgcaatgtaacacaaacacacaatggcaatgagaggaggaagaagaaggtggatgatatatagatggagaattggtgtggtgcgaggggggtcaaaggagtggcgacatggaaggcttttttggtagtggatggtcgcgagctcggcgaacacacgctctgacatggccactgcctagctgagctgagctgagctacccagtacactcctttcttcctttccttccaccacgatacggttaccagagagagatgcaaggtgtagtaagcaaaagcaagggaggaggttaaagtgactagtgttgcttactagaaagctggtggctttttgataggggaaaaagattagtaaaagaaatagaggagctctctggaatggaatgaagagaaatggagctagctagctagtacatgttgcatgttaaaacagtttcccagaagtaattaaccatccagtgaaacatatatatatatagcaccacatacatgaggtaatatatgaactatgttcattttcaagagatcttctagataatgcagctacaaaccgttcagatattctcgcacaaaatctggagagagattttatcgtactcgagaggtacaaaattgtaagtatactccctccgtactcataaagaaaatcgtttaggataatatttaagtcaaaccttgagaatataaatcatgaataatttttaaattgttgaatttgaaaatataaaaaatatatgaatagatttgtcttgaaaaatactttcataaaagtatacatatatcacttttcaataaatatttttatagaaacaaaaagtcaaagttgtgttttggagaccgtgtcactgtccaaaacgattccctttatgagtacgaagggagtatatatttcgctgtccagtgtggtgcatgcatagattttacattgctagaaaaatttaatgtggtacatttgataccctgcatgacagaaattatggttaattaattatccgattcttttaaagattcctatcagctgaatattctaattaactaactccccaaaataggggcgatgtgcatgcttttttcgtttctagaagaatatatattcatgatggttgtatgtatacataatgctccatgtgttttgagtgatattgccactagtacagtacggggtatactgtacagtataggagcagtagtatactactctactagtatagctgtacttggagacggctggaggaggcgacatcacgtacggacggccactgtgtgaagcgccgacagcccgacagcataacggcggggccctctccgtctcatctccgccgtcgtttgactcccccgggcccaccaacgcaacctccctcccggggggcaggtgggccccggtgatgacctcctagtcgatggatcatggatcgtcgacacgttacatcacgcgtaaccgtctgatcgtaccgcgtactactacccttcttgccatgcgttccaacctcatcggacggatgggagcatgcatagatgcatgcaggtaaatgcatgtctcgttttgcttttttttttcacaataaaagcaaacaataaaggaactaaagaatactccattcatcctaaaatataagagatttggttggatgggacacatcttaatccagattcatagaactaggatgtgtcacatcgacacatccaacctaaattcctggtattttgggaccgagggagtatattaaagatgatcagtgatttattataggacaaaatagtttttttcctaagtatagaactggatacatagagagagagttatatatgtccgtatgccttggacgatcgacacacatattataactggcggaacaaattacgatatcgttgtattgagcttaattcagaaagcggcccttattagatcaaatattattttgattttcgaaaattttagctcgaggttttaaaccttttctacctgcaagttaatttcgtcttaaaatctaaaaatattgtacttagatcaggatttttcaatcgaatctatgaatgtttctagcctaactcattagttttcaattgatgcaagatcgacttgcagaacaccatggagtgggagagtgtggatctcacgcatgtggctcaatctgataaaaaaacgatgaggcacaccacaaaataagcatttcatcacatggaaggaagaagggacactggcgggaggatgaagaaagagaggccaggtttcctggagcggtgcatatgcttattttgcgggcatagacaaaaaaaaatggaaaaccaaactgtcaaggaaattggaggaaaaaagatcgagtagcggataaggtgttcaccggattcttattctagtgagcgttcgccagttaggttttctgtggttccgactacttatataacgcgattgagcatgcgattttaagctggttttaattcacagtgaaaaagaaacacacaattttaaactagatctaattcatagtgaaaaataaatgcagaatgccggaatggccgaatgggtgatgagcggtaaaaaggtgaaagaatgagctaggtgagagagaaagggagggagtgagaagggtagcatcggagagtgtgatgcaaaaatgcggtcaaaggagggaggagaaatgggctgatctgatctgatatcgcgaggttgtgcttttcttgctttttgctgcattcatgcatggctgtctgcacgggatgttgcgcaggcagctgttatacgtacactcttctgattcctctagctatattaatagcttcttttaatttactgtcaattgattaactataccttaatttgatgagagtaaatttcacgaaattatatgtactcagatcgatctatcgtaaaactataatttttaatgaagtgtgtatcataaaaatttagcaactactccctccgtttcacaatgtaagtcattctaacattttccacattcatattgatgttaatgaatctagacatatatatttagatttattaacatcaatatgaatgttggaaatctagattcattaacatcaatatgaatgtggaaaatactagaatgatttacattgtgaaacagaggaagtaattttttttcacgaaactacgtatttaatccatcgtatcaccaaattttagatttaatatcaattttattataaaaatgtagctttacataaatgccttaaatctatagttttacttgttataaattctattttaaatctgtagttttgtactcctacatacttaactttgtattttacgatagtttgacagttttatatatactcttatcttaagctagtatacctacagtacaaagagatgcataactgcaagtgtataagagatcgagcaacgactggaacagggaagctagctgctgctgcaggtctcaaattacttcttacttttgtcgatggatcgatctgcatgcgcgagcggccgatgctatctctctcaaagctagctttaaaaggcgatcgatcgatccgtgccggcctgaccatgcaagcacgcgagcctgacttccctgactgactgacactgcatgcccaagctatagctacctcacctcgatcacctgcatatatatgaatatggatgctccctcttttctaaaacataaacatttcttaattagacattaatttcaaatgttttggagtggaatctaggcaattttaaaaattttaaaaaccaatcattgagttgacgagaacggaattcttttcctcgatagatcgaattaagtgcttatattttaggatggagtggtatatatgccgcattctctgtagcttaattctagagcgagagtggtgtagaggtttctgtttgacgccttgtgcttgtactcctctgtggagtttgcattgttgcacccaatgcaactgcatgcaaagtactcctttccaatttccacgacgactactacactacagtactgctactgtgcctacacaacacagtgtacaaacacaaacacagagaaaagctatagcaggcgtagtacgtcctgtccaggtgccaacatcaacatgcatgaaccaacatgcattgcatgcttgtcatctacactgtactgatggtgtactcttctatactaccttcgtcctatattacttgtcttttttagtttttgtttgtcaatgtttgatcattcgtcttatttaaaaaaatttaaaattattatttattttgtttgtcatttgctttattatcaaaagtactttacatatgacttatctttttttatatttgcactaatttttcaaataaaatgaatggtcaa

SEQ ID NO: 23615 - DNA, 8214 bp, Oryza sativa
ctcgtcagtacctataatataaccaccggtacgatgaggaatatgaacccgaaacatgaaagccccacttctcctaccttcgctttttcattcattacacgtaccgtgacggctcacactgtccatacagctcgctgcctgattctgacgctcgcctgaatcacaagcttgggcctgtccggtggggtcgctccttaccggcgaaataaaaagaaacacagggggtgtttagatacaatgaataaagttttggcgtgttacatcatgtattatatagggtgtcgtatggggtatttagacactataaaaaatttaatcacagaatccgtcagtaaatcacaagacgaatttattaagcctaattaatccgtcataagcaaatgtttactgtagcaccatattatcaaatcatggagcaattaggtttaaaatatttgtttcgcaaattagtagcaatttgtgcaattagtcatttttagcccatatttaatatttcttgcaggtgttcaaacgtttaatgtgaaagggtaaaaaattttaggggtgggatctaaacagtcccacagtcaaaaaaatttagtactccctccgtcctaaaataagcgcagccataagtttctgtgtccaactttgatcgtccgtcttatttaaacttttttataattagtattttttatgttattagattctaaaatatggacagtagtttatacgtgactcatgttttttattttttaaatttttttaaataagacgaacgattgaaactgtgcacgaaaacttatgggtaagcttgttttcggacggagggagtatgaaccggtacttctctgttccaacaagcaaaaatctgtcacgcaaacgtgtcgactaggcatttcttgggacctgtaaactctgtttactgtgttcgatcgctttcctatgtaaaatgtcccggattcgaaaatgcccgacaatggctatcaactgctacttccgtccgaaataaatttatttttcacacgtctcatgcataccaatataaaataaaaaaaactaaaatatcatactttatcaaatcacaatgtaactattttttattttatctcattgctacaaaattaatttttcatagcgtcaacctatttttttcttaagtggccatacagaaccactgtcaatgaaaatgtaacaaggggtagggagttacggtccaaggataaaagagccgtcagcaaaaatattcaaattttcacatgcgaactacttgacatatccactgtgaagattaaatttcacaagcggcaggttaagagcaccgcctgcctaaaaaattccttaaaataccctcctctcccttgcggccacacgccctctccttaattattcgctggcggttggcttaacctagccgcttgtgaaaatcgattttcacaagcggtgaaggtccgcctgtaaagatgttgattttcgctggtctttaatcgatggcggggagctgagccgcctgtgaaaacacgttctgaccgcctggaaaaactcatttttctagagtgaatcctcctaatataattatgtccctacatttataaactccggtgtaataattacgttacccaagaaataaacttattttaaataaatgaatggatcttaaaaaacaaacttattatagaacatttttcacttatctcatacatatcaacacaaaataaaaaaaataacattgccatactttatcaattcctcatacaattatttctctttttatctattatttctaatatatttatcttatgattttataaattttgatacagtgattattaaaaggaaaaagtatataataccctctaaactattatggtcttccgaattaccctcctatatcgaatacacgaagttattttagaatatgggaggaggaactgttaaggcttgtagtagctaagctcggtatcgtaacaagctgctcggctcggcttaactcaagcttgttaataaactcattaagagctttggcttattcatgttacctttacgaattttagagttctgacatatacaatttgccgatttatcatttactagtcataaacattattccttctataaaaaatataaagatttaaaaccagattcgtaagtaaaagttatatattttaaaacaaatgtagtagtaaatacgaatacaatagtttacaagtatttaaaggacttattattgactaagaagcataagcataaataaatataccggtctttcatactaccaagcttaacatgttctacacctgtctttaaatattacaagctagaattgaccgatggaatatatcttagtataataaatagtaggatatatctaatccaattctagatttaccatattttgaaacgaaggaagggagtagcttgagctatgctggagtaaaatcccaacacgaaactctcactacacgacgccactacgggttcaagccgatcttaagtcagaaacaaagtgaccttgttccaagccgcagtagcgagcatttctttatatttagaatctgtttggattgctacctaaaattttggtagggtaacaaaccaaacacctctattaaaatactacgtatgctacaaatttggttttgcccataaatttgtctcttataggtatatttttggcttcaatccaaataaacattttcaactctatcctaccaaaattttagtagtaccgaaacttgcccaagatttggcactaccaaaaatttggtagagcattaatccaaacatgccctcaggatgtgtccatttggattggtttggaaacctctccccttcgcacgcaaaacggaatgacgaaataacacatgattaattaagtattagcaagagtttgaaaaataaattgatatgattttttacaacaactttttctaatgtttttattttttaaaaaagacactgtttgtttagtagttcaggatacgtgcgtgtgggcaattagagaatagaggttgggaaccttgagtgaagaacacatcctagggcaaatgaaatggcgaaaccattataaactctccaggtgacatttactcatggtttatatgtcagtcaaatgaccatgaaaaaaattggaaaaaaataagatagattaatatgcgttagatcactctacaaacataacatacaagttaaatttctcacttttatatgttgcaaaaacaaaacaaatttgactctaaatatactttaactatctgtaatttatttttttcttattgcaacttataaaagttgaattttaactttctaaagtgatatatcacatgttaatacaacttcttattttttacaatatttttgtaactattttaagtgtcatgcaaactgaaaagacgtccccctcgagagtttaaaatccactccataatgaaatgccattcaaaattgtctgatggttcgagcagcaaaataagctataaaaaaaatttaacaaggcaacaaaaaaatttataggtaaataattattactagcagtttaaaagtagtagagataaaaatacaatcaccaaaattaaattataaatttctaaaaggaatcaaaccctaaagatgaatctgaacacacatatggctgtgtttagttcgcgccgaaattggaagtttggttgaaaattagaacgatgtaattgaaagtttgtgtgtgtagaacagattgatgtgatgggaaaagttgaaagtttagaaaaaaactttggaactaaacaaggcctatgtcattcatcgctggttttgatttttgattttttattttttgcacagagagagtataagccagcaaatagacttgaaaaccgaatctctgaagaaatctccgaggagtacgtacggcagttcccacgctagttgcattgggaagacgaggaaagccaagcagtggcgtcggcgaggcacctccggaacgtgtccatgctctccggcggcagagctatgcccacctcgatgccgccggcgccggaccggtcctccgccgccgacaccgcgccggtcttcgccacggacacgatctccaccttcgccggcctcccgaacccgaagtcgacgtcgtacacgcggaacctcgtcgacccggccaccgagaacggcgcgtcgtccctgcacgcctccatgacgcgctccgtccacccttcccagtacgcgggctcgccgcgcaccgcctcgtcaatggcgacggccaccgcggcgcaggccgtgaagacgccgcccgcggcgtcggcgagctcctcatgggtgcggcgaactcgtcatgcctgtccggtacgtcgcggatgagcgtgcggtcgattacgggcagctccgggagcttccggtcgccggcgcaggctgcggcccaggtgtggaggaagtgcgtcgagcccaccccgtcgcaggcggagtggtggacgatgacgccgagagcgaggccgcggcgcttgggcggcagcacggtcacctgcagcgcgagcaccgcgccgccctcgggaagctccgggacgagcggcgcgatcttggcgagctccctcggctcgtccgtggcgagctcgtcgacgccgacgccgtcgtgctcggcgacggtgaacgccacgccgtcgccgagctggtagaggagctcgtaccggttggtctcgctgggcgtggggcggatgcggctggcgagcgggtagaaggcgtggatagcccggggcagcgactcctccatccgggacagcacggcgtcgacaccaccgtcgtcgtcgtcgtcgccggggccgagtcggtagaagaagacgcgctcgacgggctgggcgcggagccacatcgcgtccatgaacatgagaggcagggctcgctcgggcagcgcgggctcgccggcgggcggcgccggcgcgacgcgcgtcgtgcggaggacgcggaggccagcggcgtgagcggccggttgcgacgccattgtctcgccgcagaacaggtgtggtttgtgttgctcgtggttagctgcagagcgatggagctttgcttctactcctataatacttgcatctccgcgagtgacttcacttcactggtccatacccgaattacgcccctaagttattatgtgattacgaattaccccttgaactcaaaaataagatatctttcaccttcaactatcaatacaggatgaaaactcccttaaatagctttgagagcggttttggtcctacgtggtagttcagtcaacaattcttttatcaactaatcgatggggcccacccatcagatctctctcctctctctctcccctctcaaacctctctctcgcacgcacggatgccgacgacgaggatgaggcatgtgccggcagtgctgcaccatcccgacggcgctcacatgccgccccattgttgcctcagccacgccgccaccccgccgccatctgcccgccccgagcagccttcgccacctcccgccaccatcttgcccaccctgagctgcctccgtaccccgcccttgcttgccgccatctactgctgtcctcggcgccccaagcggcctccgctactgcccgccaccccgagctgcctccgcccctctgtcgtcctactaccctcgcccaacacaatccaccgctatcctcgatgcccgagcggcctccgccattgccatcgcgccgccacgaactgcctgcacccccgccgctgtcccactgtcctccccagttactgtcctgccgtacatcatagaaaacatgtaaatacactcaaaatttacgaaatatattgagaaatgtaataacacgttacgaaatataaggattgtatttcagtgaaatataatgaaatttacaaaatgtattgagaaatgtaataatacgttacaaaatgtaaatattgtctttcagtggctttcataagaactccaataccagaaaaagaactcccctctacataattgaggaaaagaacaccacaatctacctgatagcttcaggtcatccaaaccaacttcaaaagatgacccagtgaccctctcaatccacaggtacctgtaaataggtacctgtaaacctatagtaaatgaagttcaagcagcagtacataatcgaagtaaccgtaatttttttaatcatgttgttaatcacagaatatgggccagcggcatccacgagcttgaagtgtaactctacaataatcacaagagcaaagaccaattcatagctaatcctgatacaatttcagaaacatgacaaagttatactcctgaggaacctgaccagcaacttgtgatgcaccatttgtttgcaatcgttcaacactaacaaaaaacaaataaagttacaagacaaattgtatttaaaaatcaaagcaagtaattccaaagatatcaatattttgtttcctggtcatttaagaattcatctcaaaccatgaaaaaaaatagacttcaacaattagagcccatttcaaaagaagcggtttcagttctcacaaatataacaagcaatttgttaatcttaatactggtgggctaaccatataaaggctaacatggaaatgaagcacatcagttgaacttcagattcagtagtggtagaaaattggcatatttaggcattgtattataggagtagttttttgagcaaaaagaaactttcacttcatagagcaatatattactaactccacttcatgtagctagaaagtaacagaggagcttgataaaatagatgtgcaacgctgattagaaataacaggatgatgatgatgcttgatgataactcatccagataaagcaatgctatatgcagtggctttttaatattccactccatgattcacatgacctttttatcaataaaagaaggcaaataacagtaataaggtaatactgggaagggcaagtcaccttactttacatttgatagaacggactcagataattcttaatggcacatctgttacatcttgttatgtatggactaccaaatcagttgcagttgaacaataaagggacatatcttaaaataaataaatctcctttttctgtgggttaaaataaataaatctcaaaaggattttatatgcaactaaagattaaacaaatagatatactgcagccgagtccacatgtcccttgaaacactgtccaggattgctgatcgattacgaaatatgaatttatctgcaaacttttgactgcagtagaaagaggagacaaataaatctcagtcaagaaacaaagctattgtgttgggaatatcaagtaaaattggacatgttagcatatctatatcactattaacatactgacgtgactccaatagtcattaaaaagtgaagtatctcatagtaaatctatacactaaaataatagggtgttctaccctgcaaaaatgaaatatttgtttgcactatatgaagtattcgagaccaaggaacaattcaattttagtttacataggcagagcttcaaatcacaacatacagtgaaaaatagagtaaatatgagataataataaggattcaaacagtaacaggagtgcacctcgatcatgcatttcatcaaacagttggtgtgctgcccatgggcacaccaaggaaccaccgtgatagctgatctggaagacctcactgtaatggaagggtaccatccacagcacacagtagctgcagccgctaaaggcctaggtgcagacgttgaggcttgcctgcgcggcttcagcgatggcggcatggaattctacatatctatcgaacccaacttttaaaacaatctatgcacttgtgtaatcacttgaacaccatgtggatcagtttaatgataacaaaatgaaacacattatataatcttatgattataactaactgttaagtttgtattcttcttggtccctgaaagagaaattttcagctcctgcacttgaatcttgcatcatttacataggtaaaccaaattgacagctgcatttataatttcatttaggatttgtcatgtaaattcaatgtaaaagtgaaacaatacctcagaggtactgtcatcgtgtgcaaggatcaaaagcaaaaatgaccaactgataaattatgaaatttgggatctggggcaatgctttttgtagttgattaagtacccagaatcaatgatttacataaaaattgagcttttcattttatataattttcatagcataatcaaacattttatcaattttgttattttcatatctattggaattgcattcta

SEQ ID NO: 23616 - DNA, 3300 bp, Oryza sativa
atgtggaaaagcaaacctgggataatgccggcagatggcaacagctttgctgctgtgttgtaaaatcattcatcgatgagaatactggcacaacagaaagaaggcggggggtgtgcatcaacctccgcggtaggagtcatctctcctcgggcgtgtagataacgaagaagttgcacacgatggagaggaggacggcagggatggaggttgtccggtggcgtggagttgggcagtgggcgtccggctccggggcgtcgagggtgaagacaactaaacatggcgcacggcagggatgcgcacgatgaagacaggcgatgagtgcggcggaggaggcagcgaatgggaaagacctcgcctccggttcagtgcgcgacggcggcggaaggggacgacctcgtgggtagcggtgaactgtggcggcggcggtggatggggaagacctcgtctccggcggcagcggatggggacgacgtcggctccggccgcgactggggacggatggggaagacctcgcctccagcggcggcggatggggacgacgtcgactccagccgcggcggatggggaagctccggcggtggctggggaagacctcgcctctggttcagtgcgcggcggcggcggaaggggacgatgacgcgagaagggttcggcggcgtcgcaggattcgggtgacggcgatctcggcggcgtcgaatggggcgatgcgacgcgatggaacgacgacgcccctcacctcccctgctctgctcacgactcgcgagatggggatcggattcgattccgtcctgactggcgtggttctagggtttcgccggtggtggggggaggggaaaggatgggcggaggggcgcgagcagcggccagcgggacagcgacgacggcggtagggcgatgatggcggcggcgcctgatctggaggaatcggtggcaatggcgatttgtggcggcgtatgtggcagatcggctggtggcgaggttagggtttgggcgccgatgtggagcagctgtcagcagggggagggggatgcgggcgctgggggatggggaggaaggaggattaaggcgacgctaggacgacggatatcggcggcggcggcggttgatacggaggggatcgaggcagtggttgagaggaagacgggagagaggggaacgcttgcgcgtctgcgctctgcaggatcagagcgttgcggaagcgatatgagccattggattagacaatctgacaactcatattccgcatgtatgatagggttggagtaacggccacaactacagaattttaaaagtagtaaagaaaatgtcgatgtccttatatgtcctagccttctttctatccttcattcgatctagcgcatgtgtatgcgtctctcctccctcacgcgcgtgtgtatgcgatttttccttgaagatgccacatgtcctcccctcacgcgcgtgtgtatgcgtctctcctccctccccgtttttctcaacggtggttaagatctaaatcattattttgttattcattttaaataaaagttctatgggtagatcatagccgaatctcccagttacgggtgtcttcatgcaagcctacatgaatgcagagacatgggctaatatatttgtgatcgtctatgaacaactttttataagttgagttgtttgatgattagtctttttttttatatcatgacatttcaatcaattatttaaggtgcacatggactatgatttattgtcaaataaaaaaaatagtgtgagccctatacctgcacgttatacattttattacttcctccgcttttaatatattgacaccgtgaactttttttatatatatttgaccattcatctcattcaatcattttatacaaatatgaaaaaaatagttcatgtatatattaatcacatatattttgttttttaaaatgagactaacggtgaaacatatccatccaaaagtcaaaagtgtcatcccaggcccaccctcctctctcgtgctcgggtctagcccggtcatccaaatcctacatgacgtgaccctatcaaacgggcaaggcccaaatacatcaccttggcgtatgtggacaaataccaaattagggttaattatgcctccgtgtgacaagcttgccgttgcatcgaccagaaattacataagcccgacaggcatgcatgcacgaacttaaaaaatagtagctggattttatgatgagagagactaccccatggtataccgtcaaagcaacgggatacatcgtttatgaccctcacgttaaatcagtttccacgtagtcaagtacaaccatgcaagatgtcagttggtcattaaacaatcccgtcgggacgtgatcccgttgcctagattttctcttttatgattgataaacaacataaaaatattttaaaatcaaatcaaatatatgtgattaatactcctaaatattctctttacaagttaaagaaaattctaaaaaaaggcagacgtaatttaatttatatacggttatatatgtattgtcttttatagcgacttaagttttctccctttttttttatggaacttcaagaaccagctgccttaggtaccataatttgtgaacgtgatctgcagtaggtaattttataaatgacataattaaatttatcatgcaatgctaatggataaattcatgaagaaatcatacttttaaaatccaatagatattattctgttagtatactacccttacatcgcgcgggctatcttcctggttcatttttaaaaatctcaccaaagggatcagtatttcatttgaggtactgttcacctcgatttgcagttgggatttgctatctatcagtggacacgtttcttgcttcaaatcacatgattttcgaccttacgttaaaacaaaggaacggataggatttaaaacgcacaacgaacaaaaattgcacccataaaccttaatcatgtgaactaataaatttgactgggccagcccaattaaagtaaacaagctagtacaaatcagttacgtatcaaattacattgtaaatatgatgtaacaaagaaatgagaggctgcatcaattcacatgaaccgattctttgacctcgattacaattgcaagaaatttcataacattgtcatgttctttattcttgtaacctaagatcaatctcttattctcatatatgaatactgcaaaaaaatgatattaagttctaaattatcaaaataaataaaagcctaaaacacaaaaacatccatcgatacagtttccgaactctaatcatttgaaaatgacaactactccctccgtt

SEQ ID NO: 23617 - DNA, 7832 bp, Oryza sativa
taataaatataaatatttagatataactaaatcacacatgtaactaagttgtaagtgcaatataactacggtgtaactaatgctattttttctgtaagtgcatttaatataaatatataaaaaattatgcatcatgaaatgattatttgccattttcataactgtggcaatgaatctgaattttcagccgtaggaaacaaagcaatggacgagattaatgcaatataacacaaaagacaacaaacttgtacatattgatgggtcatccaaacttcaaaattaactgggtaaacaaatatttgtattgaactgaaacaaatcagaaatatgcttgttaacaccaattgtagtctattgaatttataccatcctatagtagtctgaagaatataattcagacaaacaatacattttcacataacatattgcttccaaaaaaactaatatgccattgaatttagaaaatgtaagaaatttcaaaatcagggttcccaatacacgctaaatggatccattagaacacattcacaacaaaaatatagaaaattacattatataaccaaagttttagatagagttgtaactaaaatgtaaatgcagtataattactataactacatttgaattgtggtgtaagtgaatttaaacctaaattcattactacccatacattagaaatatttgatagctatatacttcacaatgatcaaaaaaataggttggaggataatttgactaggaatacatgtgatttttgaacataagcagaattttgttgctacttgaaaacataatctatttgatagttaaatattaacagtaataaaaatagggtggattatagtttgaccacagaaacatgtgacattatactttacttaaactcacaattaaatcatagtagcgaaaccgtagtctggtcattgggatagaaaagcagatattgagatccttcagtcctttttttttctttttggcagaacacacttaaagatcaaactattccacctgttaccaattatgtactttgtatgtatgtacacattaacaagatatattgatatgtacaagaagtccaaaggacagacaatcaatcacaacaaatttttcaagacctgcattgcaggtgaactattttgtccttcactatgctattatttattgtttcacaaagagaccctctatagttacaaacattattaatagttaaactttagaaaggctgatatatcatattctaggatgttaataaaaaaggaacggatgtagtactttaaataatgggcaaaattggaatgacaattgaaaaaagggaactactacacaattcatttctttcgcaaatgctttagtgctctacacaataaatttcttcttcacaattgtccatgctttactctggctgggatagtggtgcccattcctaaccagttcttacaggaaatagtcccatataaattgttgattgttttattcagacaagtttgtaggtacaacaaggtggcattcaatcatgtttgggtgttagatacttcatacgtattgcggcgtgagtgctaacagaatattacttgaatacaagccaggaagaacacagcttcaggtagaaaagcattgcagcttcattcgtccttccatttgttgcacaccaatagttgcctttctatatttttgtatacctctcatttgctcatttcatttcctttgccttcttatgttgtgcagatagtcaactaaagagtataaactactgcaatcaccttttttcaggaacataactttcatcaaagttattctctcctaggcctaattcagttaggactgacaatttgccaacccatactgtaaaatggtccataaaaagcatttgttgatatagtattttgagcaagtgttgaaagataaggtaatttccctgacaaactgtttgttgacagattaagaacctgcagatttgtgcagttggctagcactatggatgcaagttagaactatagatccagacattcgtcttgcttgtggttaaaaatatgtcgcatagaatctgagatgaatcatacgtaattgttagtaagactgttcatgaaacaagccatcaagcaagaccattttatgtagcatttttaccatcaaattagcatttttgcactatcactgcagcggatttggatttggtaaagaggcatgaagccttgcgagatacaggtgaggagaagacggggttctaacctactttctagtgatgatggaaatactattaaattttattagtagagaagagacagatatatgaatatgaatatggatatggatacagagtatgaagactttgcgtcaatagattcatattgtaaagcagttttgtatactatatggcagattataaacattatatattgtaaggaaatccatgaaaaaaatgttcagtttggtagatcgcaccatgtcaaaagataacattttacattactcttctcttctattttagtttcgttttcatgcgtgctcacactaacaaaaaaaaaaagagatatttttgggacacgcctcttgttttttttgcaggcagagagtaagaacgtccgtatgtaaaaaatagtgtgaaggtgcctagttttttagataatggaatttatatcccggcctttactcaacagagctacagccaattattacaaagtaccactcatacaaagagtgtgaaggtgcctagtagagacccacttatgaaaatccatttttgtaggtggtcctcttaacatgtctgtttgtgaaaataggattattttcagaggcgggcctgttaaaaggtccccatgtaaaaatcctttcacagccccacttcctctccttttattaactcttctctcctttctgtctcctctaccttttctccctctgtccctcgacttctccttctccacctccgcctcctccctcatcccctctcttcttctcttgacggttgtcgttgcgacgggagtagacaaaggggcggcgttgaaatgggagcagcctgccaacagggtgacgccgcgataggagcaaccgacaggcgatgtcactataggggatcaactgcctccggccccacatcgcgccatgccttggctcctctgatctcgcgtcgcgctgcgcctcgactccttctccaatctcatgtcgtgctacacctcggctttttcttcagcaacaacggcgaactcgcgacagctggatccggtggacggccaaatcctatgacggtgaccccgagacgagcaaatccatcagcgactgcgcacagatcgtcgacaacatcccccaccacggtggcagcgggtcttggccacagcagatccattggagttgaggcgcagccaggggcgacgccacgttcagcttgccaagtgcacaggcaccagggaaaaatttagtttttagttattagcatctaatctccaccttttgtgcactccccagaaaaaaatatgtgcaccaccttcagctgcccagcaggctgcaggcagcccatgaaggcccaatttcttacgtgcagcccaaactgtccaagtgcccaacagctacagcccatgcgtaaatgaagtgtgcattctggtccttcgtgctctagattcgcccccgcgcagcgggcttcgggcagtggtgttggaggtgcggcgtgcttcgggcgacatcaaggagctcagggacaacagatccaccggcaacaacaatagaagcggcggatccgctgcctgcgggctgtcgggctccattcgatggtttgcatgttcttgatatgtatgggctagggtttcaagatttttttttcttttttattcagaaaaaatatttacaagcgggtaccatatcatgagaatctgcttttgcgggcagccctcctagagaagctgtttgcgaaaatggtttttacgcgtggctgtgacgcccgtatgagaaaaccgtgatttttatagctagacaactttggccagacgggtagagcacccgtttgcaaaaacgacttttgaccgtttgcaaaaatcaattctgattgtcacttcttttctattcatttgccgtgtttactcgtcaagctttttctagtgaaaaggcgtctatcatagttactagttcaaggatacagattttttttttggaatgcgcacttgattatggaaaatcttaactaattaaaatattcgtaattttccttttgtcacctctctttttcatccgtgttttcatctgtacatcatatcaaccgatttggttagcaatagcgatggaaaaactgcaaaagaaaaaagaaaaagagaaaccatcagcggtcaccgacgccaccaccgccgccggagggagaagagaggcggcggagggagccgctgctgccggatccgcccgcggtcaccaccaccgctgacggatccacccgcgaacgccaccgccgccatcggagggagaagagaggtggcagagggagccgccgctaccggatccgcccgcggtcgccgccaccgccgccgctcgcggggaggggggagagggcacagccgcagccgctcgttgggaaggggaggggggggagggcgccgccgccgctcgcggggtgcaggcaccttgtcgccgtcgctctgccagaaatcgccgccgccatcgccattttagcctaaggggatcgggagagaaaaaaaactaaaactagggttagggtttggtacaagccgttttgacgaattcggaaccgatctgagccgttcatcaaaatgagcgactcggatcaatcccgcatcgagccggcctccatctttgggctgcagcactattgggccgcgcgcagcccatgaagcactagcagcgtccgattgaattgttggaccacattcggtatggttagtctttttttttaaagcaacaagtccactttgcctctctcaaatatatctcctatctaattcatagggaaaaactaaaaataaaaattacccaacaacatacaattacccaacaagagaaagttagtcttttttttaattgctacaaaaccttagttgatgttaaatctggtaaacaagaaatatattgttttcaacatgttgtttattggcagatttatatcaagaataccatattctaaaaggacccatatcacaaattaaattctaaaaatatttattgtgattttagttaaaattattccgttgcaacgcactattgaataataatttattacgagctactatatatttctctctatcatttgtgactttttctagcgagcaaaagtaccaaagcagtgtgaaaataacttcggttaaaaacaaatatttttagttttaatacaccgtagcgaagcacgggtattttgctagtaattataaagtgtctcctagatacactgtagggttacgatcgaaggacaacgttactagagtgtttataagagcgagctatcaaatgagttgccgcattcaggacagtataaacgtcattaaacaaacagcagagaaacccaccgccatgactcgttcaaggatacatttgtttacgaggatatgctttattccattatcttaaaaaaaaagctctatttcttaaagatttgaacctttgtatttcttttaacaaacgaatgtgtagtctaaatttatttattattacctacggagactcttgtactttttttttcaaacaaagagcaaaaatttgccactctaaccctcacttccaaagtgcgaacggtacactgtgtgatgaggacacaactagctcggatataaccgtgagtaccttatgtattaatcaactaaaggtgcatatgttttatattagatttacttgttatatatttggaaaaacgttgctacacaatgagttttgtgtgttttcgtttgcagagttacttgcttgggcgaaagaaaagagaccgaacgtaaggaatgcgtggatgattgaagaagttgattggtgacaaaaccaagaccttttccaagtcttctttcatctcaccacgtcacttttggtccatagaagacaagagataaagtttcgcatgctttggattcggactcgggcttcctgacagcatcaacttcaaacggacttagccgctgatctagaaggaattttggggcccataagtacttgttggaaagcttatgaagtctactttccgatggttttggtcccatgtcaaaattcttactgagctgccaggaatctgcaaaacaaatcatgtacctcatccagtcctaatctgatttgggttttgggccttataattgtgtcgtgggctttagtcccagggggtgcgcgtcctaggctaaccctaggacgtccctaatcatatttattcagtagccgtcatcggttagagtcgggtttttcttagattattatgttaagaacagtttcgtcgctagatcggtttgtagaatcccaaattcgtgtgcttaatcatttatacgcaatttggttgcaatctatcttgttcttgcttgtgttcttcgattcgcatgcagggattagccttcttggcgaggtcaatcaggtttcggcatggttgataaccagaggagacgtggtgctgcgattgcggaactcagtagcgtgttcgttcagaagccagatcgagttgtgtcgccactccgcccaaatcgactgtttgtcaatacctatcggatgatcaggacctaacatcccctcatcagttggtatcagagcgcggttgcccgttaggtaatttatcttccaataaccagaaaattgccacacaaaaatatttattctttacctaaacaatttgagccgttgtgttgttctattagattttgctttgttgaattctagattgcatcgtcgtgtcgagtgctagtttagttttagatttaatttttagatttgagtattgtatctgttcatcacttaggtctaggtctagggttcatcactcaagtcggtgtgagttgtacgtcagttttggtcgagtttttcatctcgtcggttgttgccgggaccttgaaaagttgaatcgtctcgttgtcgggtttccgtttttgtagtttggagatgtttttgtcaagcggttttggagttgctcggttgctaggggtccggttaccgtgcttgtgtatgtcggtgtgcagtaccatgcgcaggtagaaaagagaaagaggaggttttcttttggttgggaatagcagatcggtttatgttggttgaggataaattatctaaattttcatgtgggaccaataggaaaccaagccgagtcacacagtggccaatccctctcatcctcacgttattttccccacataaaggcggacctctgttacatcttggagaatttttttttatgtcggatttgagatatttttgtaaaaaagaaaatgacatgagcaatccatttttgaggtgatccaattttagttttgtactttgctgagtcccaataattttcatatttacatttgagtccctgttcgaggtcagtggttagttactgttgaaaaaaaaaataataataaaagaaaaggcagaaggtgcaaagaaaaaggaagaaaaagccgcaccaagaaaaaaaaaaggcagaaaggtgctaaaaaaggcagcaccaagaaaaaaaaaagaaaaatcattcatcctttgagtatgttttgagagtgcagagttgtgcattgattcatatctagtccttagtattgtcgggtgcttgcttgagctagagttgggtctaggctaggccagcacattgactagtactttgaactattattgaactttgtattttctgattagcacaattgcgctcctttgctactatatattgtgcctcccaagctctacat

SEQ ID NO: 23618 - DNA, 3318 bp, Oryza sativa
agatgatccaggagaagttgacgggcagctaacgaagaagagaattcctgctaaggtgatgtggtatttccctataatactacggctaaggcgtttgttcaggaacaaggggaatgctagaatgatgagatggcacgctgaagagcgttaacaggacgggatgctgagacaccccgccgatggttcgcagtggcgaaatatcgacagaaaatttaaagactttggaaaggacgcacgaaacatacggtttggtttaagtacggatggcatgaatccttttggagagatgagcagcggccatagcacttggcccgttacgatgtgtatctacaacctccccccttggctatgcatgaagaggaagtacataatgatgccgattattattcaaggccccaagcaacctggtaacgacatcgatgtgtacctaagaccactggtcaaagatcttaaactgttgtggaagaaggaaggtgtccccgtgtgggacgaggacaaacaagaggagtttaacctacgagcgctgctgttcgtaaccatcaacgattggcctgcacttagcaacctatccgggcagtccaacaagaggtacaaggcttgcactcgctgtatggatgaaacagaaagtacgtatcttaagcactataggaagattgtgtacatgggtcatcgtcgattccttgcagcaaaccacccggtacggaagaaaggcaagcactttgaacataaggcggaccaccgtacgaagcctaaacatcgcagcgggaaaacagtgtttgctatggttaaagatcttaaagtagtgtttggaaaggggcctggtaaccagcctatagagagcgaagatggtcacgcggcgatgtgcaaaaagaactctatattttgggagttaccctattgggaattcttggacgtccgccacgtaatcgacgtgatgcacctcactaagtacctttgcgtaaaccttcttggcttcctaggtgtatatggaaagtcgaaagatacactggaagcacgtaaggatctgaagcatatggaacaacgcggtgaccttcacccggaaccaaaggagaaaggaagccattacttgagtccagccagctacactcttagcaaggcagagaaggaaagtatgtttgaatgcttggagagcatcaaggtaccgtctggatactccatgaatataaagcgaataataagcacgaaggagaagaagttcacaaatctaaagtctcatgactgtcacgtgttaatgacacagctgctaccagttgtaataggggtatcctcccagacaatgtccgggcaacaataacaaagctatgtgctttcatgaacgcaatttcgcagaaggtcatcgatccgaatagattagaagccctgcagaatgatgtggtgcaatgtcttgtcagctttgagttgatatttccaccttcatttttcaatataatgacgcatctgctttgtcaccttgtcaaagagatcggtattctcagtcctgtgtacctacacaacatgtttcctttcgagaggtacatgggcgttctgaagaagtatgttcgtaaccgtgctcgtccagaggcaagcatcgccaaggggtatggaacagaggaagtcattgaattctgcgtaaaatttatcgaagacctttgcccaatcggggtacctgaatcacgccatgaagggagactacggggaaagggaactctcggaaggaaagcaataatgacggtagacaacaatttattccgtaaagcccatttcacggttctgcaacaatctgcattggtggctccctacatcgaggagcacttggctctagttcgcgccagaaacattggtaagtccgatgcatggattacacggtatcacattgatactttctccgcgtggctgcgacaacatctcatgagtaacgagacgattaaccaacaactggccttcttggcgaggggaccatctggctcgatcgcgacattccagggatatgaaatcaatgggtacacattctacacgagggcccaagacatgaagagcacgaaccagaacagtgatgttcgtatcgatgccataggtcacgatggtacaactggcacgtattacggtgccatcgaggacatatgggaacttgactatggacctctcaaggtccctctgttccggtgccaatgggttaggttgactggtggaggcgtaacgattgatgacagtgggatgacaacggttgaccttaacaaggttggatacttggacgaaccttttatccttgccaatgatgtaacgcaagttttttacgtcaaggacatgtctagcaaaggaaaaaagggcaaagggcctgacgagccgaagcgccaagtggttctcccagcaaaaagaaaaatcgtcggagtagaggacaagactgatgaggattacgatcagtttgatgggcaaccccctttcacggtgacgattgaccctagcatcctcctatcaaatgaagacaccccttactcacgtagcgatcacaaggaaggaacaatagtgaggagaaagtacgtgcggtcaaccgtcaccgccgatgtattgccgtaattgttgtgtacacgatgtaaactattttggatgtattgaatatccatacaaataaattgttgtatggaatatgctaattatgtatgattattagaatttttatcaaattgaaatcgtccatatgctagttatatatgattattagaatttttaaaagttttaaatcatgcacgtggtatttacatatgttaattagaattttcaacaatttattatcatgatatgctaattatatattattattagattttttattaattttaaatcatgcatgtggtatttacatatgttaattagaattttcaacaatttaatatcatgatatgctaattatatatgattattagaatttttattaattttaaatcatgcatgtgctatttacacatgttaattagaatttttaacaatttaatatcatgcatatgctaattatatatgattattagaatttttaacaattttaaatcattcatgtgcttattatatattatccacttattctactacatacaacaataatttttcgaaggttttgtcattaattgttcgactttaaataattttaaataattgtaatgcattatttactattttagaaatacatatgtaatgaagttcaagacacagctgctattatctttagtcccggttcttaaccctaaccgggtttaaaaagaatttggaaatagcgggaaaagatctttagtcccggttggggagaacatccgggagtaaagatat

SEQ ID NO: 23619 - DNA, 10254 bp, Oryza sativa
tttctttagtcctggttgttgttacgaactttacacccggatgttctcaccaaccgggactaaaaatctgggggtatatatattcccggtgctccctcgtcttctccaccaacacttagacgtttttccatcgagatcgatctcggcttctccttcgccaccactgcctagggcaaccccgcgccgacgccgccgtcgtctctcgccgtcgcttggcggtcctcgccgcctccgccacagacgccgccgccacatctcttgggtgagagccgccgctgcctctctctctctctcgatctcgatctctctctccaaacctccgccgcctagctcgttgccgacgccactactacgccgcggtcaaacgccaccgccgacgaccgactttgacgccgccgcccccgcctcgagctcgccacgccgccgcgccacgccgccgggctgctacgccatgccgccgcgacgccacgccgccgccgggcccccacgctaccgccgcggcacgccgccgccgggccggcccacggcaccccgacgccgccgccgcgccgccacgccactgccgcgcgcgcccaacattgccgaacgtgattgaaacgtgaccgaacgcgaacgaatgtgaacgatacgtggacgactgtgaacgaacgcttaacgaacgtgaacgaatgcaaacgaacgtgaacgaaacgttaacgaacgcgaacgagcgtgaacgaaatgcttacgaacgtgaacgaaacgcttatgaacgaacgtgaataaaacgcttacgaacgtgaatgaaacgcttacgaacgcgaatgagcgtgaacgaaacgcttacgaaacgcgaacgaacgtgaacgaaacgcttacgaacgtgaatgcacttgtactaaaagtgtgagaacgaacgcgtttagactaatacattttcctggtaatacatatatgattatatatatgtaacttggcccgtttagactaatacattttcctggtaatgttgcagagaagacgttgtcatcgtccgtcaagccgaagtggtagctagccatcgaaggaattcgcgcaggcaagtgatgcaaagaagtgattgttagagatttaatataagattgttagacttagcatatatgattattacaattttaatataagatttgtagcgatttaatataagtttgttagacttagcatatttgattattacatttttaatataagattagtagcgatttaatataagattgttagagatttaatataagattgttagacttagcatatatatatgattattacaattttaatataagattagtagcgatttaatatgagattagtagagatttaatataagattagtagcgatttaatataagattgttatacttagcatatatatatatatgattattacaattttaatataagattattagagatttaatataagattgttagactaagcatatatatatgattattacaattttaatataagattattagagatttaatataagattagtagagttttaatattacggttagcaaatatgacctatagatctaacaaatattttttgtatgcacacatggctgatcgcgatgaggaacagatactatacgatacaaacgcagagggaagcagccagtactggaacgaagaagaggggaacgaggatccaaaccagtacttgaacgaggaggggaacgtggagagcgatgcggaggggaacgaggagggaaacgatgaggaggagtctactggaagtcatccctctgctggacagaagagggcacacggacaacgaggtgccgcaaagaagatagagggtcggcacatcgtaactgaggtggacgaagacggccgacctagtgccctagcagaagcagccaagaattttgtacaccacagcagttgggttgtgagggacaacgtgcctgtcagcacggtgtactggcgcagaacaagggcacgcagggataatgacagctttgtcccggactcagaaaaagagatgctgtggaccacaatgctcgagacgttcacgctacccgcaggtacgaagaacatagtgaaacagtggactctgaagaaaatagcagaacagttccagagcttcaagggagatctctacaagaaatacatcttgaagggactaacaccgaacttcgacgtattccaaaagctaagggatcattgggacgagttcgttgcttacaagacagggcaacaagggcaagcgatgatggccagaaacaaagaaaatgccgccaagaagaagtaccatcaccacttggggtcaggcggatatagcgtcgcaatgccgaagtgggaggagatggaggcaagtttgattgagaggggtatcgaaccggccaccgctaaatggccggatcgatcgaagttctggtactatgctcacggtggaacgcttaagccagttgatggctcccttgtcttcagtgatcagatacgcgacgctgccagtcgactaacggacgcggtggaagcctcttctcagggcacattccgacccgacagagagaaggaagagctgtcactcgccctacagattcccgagcatccaggacgaacacgagggaaaggcgtgattccgtggaagattggatttaaggaggacatccacacgtataggagtcggatgaggagcaagagagataccgaggcgaagattgcagatcttgagtacagggtatcgagctacgagctcagcatgcaagagaagatggcaaggaaggtggatgaacgtatggccgcacatcggtcccaggatcccagtaggacattcctctagcgatggtcagcccatcaggcaatagtagcagctgcgcctcaacggggtaggtaggatcacagagcatggacgccatgcaaacccaggacgaaaccacctgccccgttgatgagatcacgcagcggacaccatgtgagctgcatattcccttcaagaacttatcaatcaaggtatgctcatagtttgatgatttttgacttgtacattccacaagttgctgcttaggttgattactaatagataacctctcatcacatgaaggtggcgtcgggaatggccatcccaacggacccttccgggacttaccactgcaggccgattccagcaggatactcgagggtcgaagttgagctggtagaagccgcgtacaaggacctcgagttggactacccaggaggagacggtgagacgcatctacgagacacaagacacgccattatactatggtgcaagcggtacatcatcctccctgggcgacaagcggcatctcatgcaccatctcctctggctccgccatctcctcctgcaccatctcctccggttcctccgccacgtcctcctgcaccatctcctccggctcctctgcctcctccgcctcctccacctccaccgtgtctgcctgcaccacccaagacaaggtctcgccaagctccaccgcctgcccgcacaagggcaacgaagaaggcgaaagttgatgccaccaaaaacaaggagccaccgtacgattgtagtcaagaggagcttgatgcttatgtggcaggagaagtgaagaggcaacttgagcctcggagtcctgaaaagaagatacctattgacccgagcgtgaagaactacttcaagggaatgtccgcaacaaacaaggaggccttatagatatcggactatgactgaacacttcagagagcctatcacaagaagtctaaaccagtccctcagcttggagaacaaccaaaccaagaggtcgagccgttggtgaccggcgaagattttggcataacggaattcatttcagacaccggtctaactgtggatcagctgattcgaggcgcaccaatcctgaaggcggaagtggcatacaagtttgaactcggtaaaccgcttgtcaagcctgagcagctgcagtccctaccgacatagatgtacaaattccatgaatggtacatggaaatgagcgccaagggtagagagatgttcggagcgaggatcagaaaccccgacttcttgcaaggagaagatattctctggatccatttcaaggatctcttcgatctgtaccatctggacgccctcgacgtctctcttctgagcgcatggattttgtgagtatctttgagttcgatttgtttcgttcaataattagctcctggcatatatataagcaataataatttcctttcatcgttgtagaatggagattcaaagggcccgacggcggagggtctacgatactgggttcatcgaccctcggaaaatcaacaccaaaatgatcgacaagtaagagaaagacacagaggacaatctcgtccatctcctaacatagcagcatttcaagacgtacatactactgccgtacaacacagagtgagtttttattgtcgttcgaacaaatttcgttcccatacatatagcatgtacattttcatatatatctcatctcatgcatattccagattccactgggtcctgtcattcttcgacttggacgcatgcaaagtcactgtgtacaactcaatgaataaagaggagaagatttttgacaaggtcttccaactgatagacaggtaatataatgccatctattccaaagtcgcggggaatctattgctattatgttgatctcgggtaataattaattaatcatagcttgcaactgcatatgtagggcttgggatcggttccgtcagttggtccgcgggacttagaaagaaaaacttggaaggaggtttcattttccagtgagtacatgcatgatccaaaattatattgaattgaatctctaattacagttaatataaagagtatattaaatctctcatcgtttctcatgtagtgtgcaaagcaggaccagggaactaacttatgcggctactacgtatgcgagtatgcgagtatgcccactgcctatcaaaccaaatatgcacaacacgagagctcgatgtacgtatacataaaccattcaaaatttcattgcgtatcgatttgttaagttgtttattaatttcatatattgatacgtcattattttttcgaatgatagcatattcacatgagggataatctcccacacaaggtttttatcatggctgttcaagaacaactgatgggattcatcaacgaagaagtccttaattccgatggtgaattctactacgacggatcgacaattcataacgtcggtccttcctcttctgacataacgccggcgtcgaagtggtagctatagctactgagcaaatgaattgtactatatatgcatgtatatatatatttatatatgtacacatttactttagtgttaatatatattttggtaacatatatgcacataaaatgttaagtgctttaaattatacatatgtgtgtaatatatgatttatacatatacacatatgcatatatatacatatatatatatatataatcaaccatgcagcaaacagggccatgcaaataaaaaaagtggtgcaccgatctttagtcccggttggtaacacaaccgggactaaagatggttcggccgaccacgtggctgaccgatctttagtcccagttggtaacacgaaccgggactaaagatcgatctttagtcccagttatttcacccgggactaaagatagctatctttagtcccggattcgtagtcccggtttgacaaccgggactacaaacggtttctccaccagtgccatcgtgagccactctgacggtctaaggccatctacaatgggtacccctaggtcgtgtccctagcaccctccatcaatttttccgtctgcgtcgttccctcgctagtccgcgcacaccctagctaggggtcgcgcctctcgcagctttttagccagggacgaagacgagcaacgcattgcagcgaccggttcctatggccaccgtgtctccagcgatagattccccttccacccctctcctctctctctttctctctctcgcccgttcccctctcttgggccctccgccgccacagcaaccgcccgagcagtggcgaggagcgggaggaggcgacggcaagagcggcggcgaggagcgggagtaggcggcggaggtcgagctcggcgtcgtcgacgggctaaggagcaacggaggaggcggaggatggcggaggtcaagctcggcgccgtcgacgggcttgaggtgcccgtgctcgcggccgagcagcacgaggacgacgtcgtggtggtggtcgtcacgctcggggatggcggcgacgagatccggccaccgcgcgccttgcccggcctcctccaccggtgccgtgctcgccaccgccgtccgccacctcgcactcgcagtccgccgcctcacgctcgccgtccgtcgcctcgagctcgcctcgcgctcgccgtccaccgcctcaatgcggcgcggccggcggcgctccatccaccggggggccagatccggccacggcagcgccggatctgccgcctccggggtcgccgccaccaccatcacgggagagagagagggagagagcggcgggagagagagtggcgacggcactctcacgtgcgtgcgatggagaaagagagagagagaaggggaagagaggggtagaataggaaagagaggaataggagagaaagaggcttttttgggttggggctacccagagtcctagacgtggcctgcattgtaaaggtgagtacgcctagagtacctcagttagtgagggtactctaggagtgtctcagattgtggatgccctaaccagtaaaatactccttgtttcttctttcttcctgccttggtgagtgccttcggccgtagagcaaagagcgagctctgttctttcttttttttccctcatatctctctccctacgtcatttttttcttaactactactcactcttctcttttcttctgcagttctactgctgctagcgagctctccttgaactcactggttggagggaagctatttccgatcgagctcgtcggttgtcgggggtgagatatgtgttctggtgaggaaaaggaggccagcttctttattttgtgcttggggtgagcgcggtcgccttctttgagcgtggagcatgtgaggatcatgtagcggtgccgtccaaaggctaagtatgcaggtgtttgcccccattcagtgttgtcagctccgacagtgtccatctccggcaagcaaacaggagccgataaactgatcgacttttgaatgtgttctcatgtctctacatgtgttctccatgccggtcagggtttcatgccctgccgctgctgcgcgaaccccgctttaccgttgtctttgctgccgtcagtgtcgccttttgttgttgaaattataagcacataatgatttaatttattccataaataaatcatgacattgcagatgtaaactagattgaacgcatcattagatctacacatgtaaactaagcagtaaaacatgaacagatcaaatatgcgcaacatgttgaacacgtaccgaggtggcggaaagacaggttgcacggcaggaactactcgcggttgcgagcgtcgacgaaggcgcgaagcacacgagcggagaggaaggcgagccgtcgcggacgaacagggagcagtcgcgcgaagcgcttccaaaaaacctcattgccgccttctcccggtgcaggacgtcgaaggcagaggttccgaaaacctgctctcccgatcgccggtgcacgccggcgagcgggatggagtagtctatgagcgacggcgcagtatagagtaggaggcaaaccctagattgattttgcgtgtgttgcgtgaaggcggcggctcggtttatatagagataggtcgcttgatcagggcgcccgcacgatctccactccgcgtaaccgaaccggataagtcgcgcgtaacttatccggactccacgccgttttcacgcaccggattttttggaatgtttccaaaacaaaacaaatctgaatttcccgcagcaaaacaaaactgcaaaagcttatccggactccactccattttcacgcaccggatttttcggaatgtttccaaaacaaaacaaatccgaatttcccgcagcaaaacaaaactgcaaaaggaggttgcatttgcgcaagggtgaggagacaattttgtggaccatttgacgcgtacgtcgtgcacgcgcgtcgcctgtcctgccaggccaggcgaggcgaggcgaggcgaggcgaggcgagcgagcgcgtgtgtttcccctcttctctccaccacacatgcttcaagtggctaggagggcatcctcccttttaaggaggtccccctctcctagaataagcaaggtggtactaaactccacatgcatgccatcccatgaggtgggcttttgtgatttttcaaagaattaatcttcgaatgggccttagcccatatattaattccaacaatcccccaccaaatctcaaaatcccactaagatttgcctttttccaatgtacagttaatataccagcggttcgatggagaccgattaaggttgaacatccacctagaactccaagctacacttactcacaacttgaacaatggaatacgtcttgaattgcaagtcttgtgcaagaaagtttcactcagagtcttatctggtactagaccgtctgtagactacccctcgggtggagcgtataagtcatactcctaggtctttagtaagctttctagaagattcacccaaaatctccatagactgcgaccaacagtcaagcttacaaatgtgagttctttcaagaatgctctacaggacagcatcttcgctaattaaagccaacagaactcattaaggcatagccaacctgccttgcagctcacgagagtacatgcatcttcatttagagagggtatagatcggtactctcctctagtttactaatggtttgttcttcccaggttctaattcataggatctccgatcacatagactgggataccaccatagtataactcacatgtgtctcaaacccatctccttcgatgcattatctatcacatttcgtgatagtcccttcgtgaagggatctgcaggtttctagctgtttggatgtaatccaacgttataactccagagtttcttaatttcctgacagacttcaatcatcttttcacatgtctagacgatttcatattatccttaaaactattcacttttacaattaccgtttgattgtcacagttcataaggatagccggcaccggtttttcaacaataggcagatccattaatagatcatgcagccattctgcctcaacagtagcagtatccagtgccgtcagttctgcttccatggttgacatcgtcaaaatggtctgtttgcaagacctccacgaaacagcaccaccacccagtgtgaagacatatccactagtggctttgatctcatccacatcagagatccagtcagaatcattataaccctccagtaccgcaggatacccagtatagtgaagccccaattccatagtacctttcagatagcgcattactcgctcaagcgcacgccagtgatcatctcctggattagaggtaaacggtcaacttgctcacaacaaaggagataacatgcctagttgcactagccaggtacatcagcgagccaatgatttgggagtattccagttgattcctagcaatttttttgttcttacgaagcaacaagctaggatcataaggtgttggagaaggcttactatcaatatagccaaagcgattcaagatcttctccacataatgggactgcaagagtgtaatcccattctcacctctaattagcttaatgtttaagataacatcagctactcccaaatccttcatatcaaaattttgagacaagaatggtttaacctcatttatcacctcaaggtttgtcccaaatatcagtatgtcgtcaacatacaagcatagaataactccctcacccccaccatggcaatagtacacacatttatctgcctcattgactgcaaagcctgcagatgtcaatgttttgtcaaatttctcatgccattgcttaggagcttgtttcaaaccatacaaagacttcaacaatttgcacactttgccttcttgaccttcaactacaaacccatcaggttgatccatatagatctcctcatccagctctccattaagaaaagctgtcttaacgtccatttgatgaacaagaagaccatgtgaggttgctagggaaagtagcacacgaattgtggtcaatctagcaacagg

SEQ ID NO: 23620 - DNA, 1754 bp, Oryza sativa
tatgtccaatgtagataatgatataaaggcaatcggttgatgatgataagtaataatatagcaatataatccagtataaaccaatcggctagcaatatgatatagtagaacaagtattgattcgaaggttaaagcacacatcggctggaggtccgatgtcatgaaatcaacaagattagattaaacagtgaaacctttgttgtcatcggctaaatccaacttatatgtatttataatccttatgagtcgatcaacgtccagataactcaccggttgaaaccccgataaaacccttattggtaatcaagaagcaggctagagattatggttctaagcactacttagtagatcaaacttaactgatgcagcactaagtatgaaaagaaatataatatctagaaaatcaagccgttgacttagttttcagggtggtagatgtctaagctaatctaatctagcaatacgatttagccgatactggcagaaaccctaaaacgagaagcaaccaatagagctaaattgatatgctaagactagattaacagagacatatgataaataggtagacaaatatatcatccaaaccggagcaatccaagaggtcgaatgtactgatgcagccttgaacgacgccgacgtaaacgatacaatcgactgggccgacggaacgtagcacttaccccttcgccggagatcgaaagccgatgcagccccgcgtcaggttccaggttctgtcggatgataagtaaaaacctcggtaaagagggtggcgatgcaccgagagtagttgtattcatcgatagattgatagattataatgacctcgggtgtacatatttatacccacagggagatactagtccttgtcggacaagaaagaaactttcctaaagataaaaggaaaagataaagtccttacaggacactaaacacactttcctaaagataaaagaaaactaacaaactattcctaattaatagataacttgccgtgccgtatccttcttgaactcggactcttctggataaattccctttagttgatccgactccattgaggacacggttgctggcgatttaacgactcccatcggctgattctataactctgaagccgatactgactctaagccgatgatgactttagtcttatcaaatttcgtcgttaacagtatgtactctcctttttcttccgcagggccagcggaaggatgacaccggccgaaggcagaaagaaagagagtacgaagaggggtacatgacaacatgacggccagagcttgacagtacaaaagaagaacaagtccgcaggttggttttggagctcgcatcatcgaatcgtagtacaatattgcagcaaagctttcaggtacgaattaaatggtcatcccacgtgtttttacttgaaattgatgtacaatcaagtaaggtcctgtttagttctaaagtttttttccaaacttccaacttttcatcacatcagacctttcatacacaccaaacttttctatcacatcataccaatttcaaccaaagttccaaacttcagtgtgaactaaacacaatgctaacagaatctgcataactgacattacacagtgcattaatttcagcttcatgtcaatatcaaaagcgattttttgtaggcaccctgtaccgcacatcacaacaggcatagtacgtaatggcacccacttgtaccggttttgctaattggcgcgcgcacgccaaatccgtatctggcgcgcgtgccc

SEQ ID NO: 23621 - DNA, 4772 bp, Oryza sativa
tttttggcgcgattttttccctattgggctccctcccctcggtgtatttttcatctttttggtatactttttgattttttttaaatttgaaagttttaaaatctgagttgaaagttttcaaatctcgagttgaaagttttcaattctcgagttgaaagttttcaaatttgagttgaaagtttttaaatctcgagttgaaagttttcaaaaattttcttgcaaattgaaaattttcaaagtctgagttgaaagttttcaaaatttgagatcaaagtttaaattttaagtcaaaagttttcaaatgtaactcaaattttttcaatctattagtaaaaaagttatcctaagaaaataaaaaatctattcttaattacagtcattatccttgactaacagagttagttatggtaccgcgtccttccaagaacgtgctccgcgtgcgcgctagttctgctcgcggcgcgtacgcgcgtactaggaacgccccgcttgtataggaacgccccgcttgtacagtacatcagggtaggcgtaagggaccatatgtggaaaccaattttcacatgtaacatatgaaaatgcccccatttacacagtcttaagtgatctccttacgaaatgtttgatttttcaaagcagtcgcttaagatatatagccgcttatgaaaatgatgatatttatgtaatcaagcatattaaactgaccgccttagagaatgtgtttatcgagatggcgctcttaactgtctgtatatgtcctgtcttttcatctacttcgcgaccttcaacaatcatgcctaatcagtgtgtgcttatgcatcatcactgcatttcttggtttcaaagcccaagaaaccaggaagaatctcaagagaaaactaaactaattaaacaagaaactgattaacttgtcatcagacagacagagcgctgctcgctgaaattaaatcaatagtattaagagggggacagtggcagaggccgtatctaccccgggacggcctgcgtcgggaaaggagcacctcctcctcctcatcggcgtcgagcagtcgcccggacagcgaccggaccagaccggaccagggcgccgcggaggcagcaagggaagggaggagagagagggcgcgccgccgtgcgcgccttgccggctggccaccgccgctcactgcagcaggggagggaggagagagaggggatagtggatttaggaagagagagtagagagagattgagaggatagaggggaaagagaggagagtcttataggtggggcccacactactttttttaaaaaaattttgctgactgtactcacgtagaactgaaactaccccgaattaagccggaggttatttgtccgattgtatagttaagggtgtaaaatatccggtattcgagtttagggagttaattcaatcgcccatgatagttcaagggtgtaattcgtaccttttcctagcaaaacacacaacgtttaaccatttgaaaagcgtacgtgcggaacacgatggagaggagttggaaccaaggatttaaatctccggctatagctgccgctattgccggagatagccgctgggagaagcaaccactaagatatgtccaatttggcgctacacattctatggcgctattagctgctcttagctggctatagctgctaaatgggcccttaaatagcggcagctaacttggtgggctgagagcctaaaactaaacaatggggcatatagaaacaattcaaccctaactctatcactctttcacagtcactctgtcgctcaccctctcccctcgaaaaacaggcacagcggctgtgcctggaggcgacggcggcggctgcaacctgcagcagcgacggcgatgaaaacagcagcggctgtgacctgcagctccacatggaggccgcaacggtggcgcccggaggcggcggctgtgcgtatgccagcaccaagcatctgcggcggctgtgatgggtggtagctgcaccaatccctccctccccactcttctctattctccctcaagctgctacggaggcagttgtgccgaagacagtgagggctgctgggcagcacaaatcctctccctattttcgctagtttttctttttcctaacaagagacgtgcaagatttttttgctatgattctctgatattgaatgtggtattgaactattcaatgtaatatcaagtgtcttggctctttaaactgtacaagaattgcaaaatttatgttagtttttgtaaaaccgctaatgagcttagctgcagcaatagccagctatagctggttgttgacagttcgatcagtttcgaccgtcaatattactaaaataggggagaactagtgatgcttgcaatgcataaatatgttagaataataatattccactagtattaggtatacttaccttttgcagagaatgacaataaagtggaggagaatcaacatcaactcagatgataaatcaatcggatgatgtcgagaaccagacttatgtatgaatgggccaagaactcagaaataacacgacacattgggccaaaattcacaagtctacggaggaggacaacaaaggaggccgccagccgaagatgggttggggccgaacccaccgcagctccgtttgatccagggttctcctggacggctgagattgctccccaatgacggttggagggtattaccgactattccaaccgttacaaccgtcattgggaggctataaaaggagcaatcatcctcacttcactcacacacctcaagcaatagctctctcatttatctcaagtttagtttagtagtatctagctggtggaataggaacatagtagaaatcaggagtccggaagccttcggaagagtttgggtatggctctagtagcttttctcttctcttttgtaagccaagccttgtacttttagtagaatactcttctaaatacatttatggtattgaaatacattccgagtatatgagtacctactttacattatgttcatcttatactgaatatacggctagcttatctgggagatgctttggtgcgggtataatgtttgcctatgcaattactctatgtcatgacgatgatattagagtagtatctggtagtttagacgtggtgtctagattacgggatatcattatttggggttatatattgcgaatgagaggtgggctgctgatagtgacagctcagtacgggtattcctccgcgccggtatataatcctaagttaattccctagggaggatactcctccgtatttagccccggttgtatggtcatgacgggctgtcgtaaggaactcggcagtcaggagtggcttctcgaagtaccaggagggcatcggatagagggtattagttagtatatcggttaactagaatgtatgtatactatgtatattagaaatataggaatagattttcttttcttttctttccacttagcttaggtgatatattatgagaatgagtagttaatgcttgtgtgtcactctacccttggattatcttaacccctgcttagaatatgattatcacaagtaatatataaattattagtcaagttctctctacatgatctttccacgggataaaataaatacgatacccttggaatactctcgggtgaaacactacaatggtatatctgtgggcttgcggatgaactctgtaaccataatatatcagaagtacttttgcgccattgctgggaattatatttctagtaatgtcgttaagaaatacgaacaagcatttctggcgccgttgccggaggagattcataatagagactacttgaactaatattttatatttgcctctgtataatcattttcctttgcaggctaaccttggttgttttcacttttgttgtgaaaacagggtagtgcatgactggtttcaacttgccgaaaaacttcaaagaaaatccagaagctttctttcggagcattaggccgtgagtcgctgctccgcagaaaactctaccgatagataaaccagccgtaccaacgccgccgaccttcaagactatggctaataagactctccgcgagttcgctgctccctctgctgacaatgtggccattgggccgcaggtcaacataggggacgtggatttcgacttgaagtccagcctcatcacgattgcgcaggcaaacccgttctgtggtgagcctaatgaggggtccaatgctgatctgcaacagttcctggagatctgtagcacgtacaacatcaagggcgtcaatcccgacaccgtcaggctgcgactgtttccgttctcccttctcgggagagcgaagcagtggttctatgtgatgaggacatcaacaccaacgatacatccacacttccacaattacaacttcatggtcctattacccacgctcgtgcatgtcaactcaactatcaggaacaatggagaggatcaaacggggagaggattcgcgcgggatggattcggactacagcatagcacaaacttctgacggccgccacgacttcctgcgaactccgatttgggcttgtaagtacttcatggaaagctgtcaagtctactttcaaatgaatccagcctcatgtccatatcagttctgggcagccacaatcttcattttactccgagtccttttctgtccacggtgccgcgtcacctctttgggcccaatgggcagtgtattaagttgggtccattagggacacgtcgtagggtgagacaacgaccccagcactcctgtggtcgtcctcttcctct

SEQ ID NO: 23622 - DNA, 712 bp, Oryza sativa
cgtccaggaatcagccgaggtacacaaactgacaattgaatagacaaatccatcataataataacgttacatacttacaaaagaaaagaaaaaaaaaacagcagcggaattaacggtctagcgatggcttcagctccactcccataggcagtcaactggggtataagccaaacgtcttctccttctggatcctttatcttcaactgaggtttgattattattgcaagaatgagcatatgacatactcaacaagccacacagcaaatatgcaagtgcacaaggataccaaaggatggcataatataggctcatttgcaaaagcagcatttagcaaagatttaagataagtaaaacagtagagtaattaattagaaattttaatcaacactgaacagcacacccatgctgtacaggcccaaccatcctgaacaaccatacccggctgtacagatctaactccaaaccaggagctaaacaaattattaccaattataacatccataattattgtgaaaggtgtgagactaatcacgaaaaacattgctcaacccgcctataaccgcgggcacggctattcgaatagttttactctggccagaggtgtaccactgtacccacaagacacgatttcgcacatgttgccatgccccgaaataccaccacggcattgcaaagggggaaaatcgtgacaataccctttgcacaacacaac

SEQ ID NO: 23623 - DNA, 1407 bp, Oryza sativa
  unsure (1)..(1407): unsure at all n locations
gaaatgaaggatttgtgagtggctgatgttattcttaacattaaactactaagaggagatgagggtgggattacacttgtgcaatctcactatgtggacaaagtcttgagtcgctttggttatagtgactgcaaggcagctcctactccttatgatcccagtgtgctattaaggaaaaaccgaagaatagcaagggatcaattgagatactctaagatcattggttcattgatgtacttagctagtgcaacgaggcctgacatctcatttgctgtgaacaagttgggccggtttgtttcaaatccgggagatgatcattggcatgctcttgaaagagtaatgcgctatctaaaagggataatgagctatgaaattcactacgtcgggtacccaaaagtgctggagggctatagtgagtcaaactggatatttgatgctgatgagataaaggccacaagtgggtatgtgttcacacttggnagggggcgctgtttcctggaagtcttgcaagcagaccatcttaacgaggtcaacaatggaagcagaactcacagctttagatactgccacagttagggccgaatggcttcgtgagctcctgatggacttgccggtggttgaaaaaccagtaccagcaatcctgatgaattgtgataatcaaacagtgattattaaagtgaacagttcgaaggacaacatgaagtcatccaggcatgttaaaagaagactgaagtctgtcagaaagcagaaaaactctggagtgatagcattggactatatccagacgactaaaaatctggcagatcagtttaccaaggggctaccacgtaatgtgatagactatgcatcgagggagatgggcttgagacccacttagagttgcacaatagtggaaacctgtccattgtgatcggagatcccgtgaatttggatggcgaaataaactattgtgtagctgagagaagagaccctaaaatgaacctatcttcatgatgcacttctcttctaatctgtatggtaggatgatatacaccttaaagtgatccgagtggtttttcataaagcagagatgttggcctacagaacatcttagaagaaacacacctatatgaatccgactgctagtcacagtctatgagatctgggtgatctctagatactcatgaaaaggccaggagtatgacttttacgctccaaacagaggggatgcaaacgacagcctagtactagttaagggtttaagtgaaatctgaatcgcacaagattgacaattcaaggcatagtccattgttcagttgtgatctggtatagctcttttcctaggtggaagttcaacctaacagtctccatcgaaacactggtataactaacaggttcagttttgagaacatttcttgtgagccatga

SEQ ID NO: 23624 - DNA, 25757 bp, Oryza sativa
ccttttgttggtgcacctttgtcatcatttgaaaaaaaaaatcgaacttaatttaaacatcctgctgatccttcactttcaccaattatcttgattggccgaggaactggtcttgcacctttccagagcttgaccacacaatcatcccaactctgctatattgtttgtacagcattattgggagctgcactccaagttcatcaatattgtttacatttttgcctgtgcagctaaaaatcttatgttaacatgacatgttcttatacatttataccctttatgcatatttgaagatgtgctacggaaagatactctcctttgacaactgagcaaaatgttggcgtttgcgttctgggaggtgaacagtggcgaagtaatactgatacggggtgctggccacgaaatgtaagaactcgccagcgcctcgatagacaacggtgtggatcttgatggctcaggtcatgctgagtggcatattggcctcacctcacctcttgttcactctaatatgcgtagtcgttcctcgtataattatatttttaattttgtggttaatttgcactaatatgtaaataaattgattgttgatatgactttggatatatttcaacacattcttctagattcatgtaaaaaactgaacttattttaggatggagggtgtatgtcagaatgcacattaatataacataaaagaatcattttttaaattaggcaactaaatagcaccaaatttactgaatacatgagtgacaagacatcatttctattcatccgttttagttttggagactcgcaaccacatcgcttagttacattaattaactcaggtaatcacataaagctaaaatctattggtcagttatgtatagactcaacttgcaactaactaatgagttaattgtatggattagatggctaatcatccggggggttaatttgcagcgcatagggatggggggtgccaggcccaccccggcacccccggtggcttcgccactggaggtggatgatttatttacacttgcaaaaattttggtgggttaggctacaatattgagcttctggcgggttagggcactatatgtgcaaccttgacgctgcactgtgctggttaaggagcagctgagcaggctgtagattaaggagatgtcctctggttctaaatcctcaaacaaataaagattttactgccaaatttgacttgggtcttttattgtaattctataaatttgagctgaccgtgcatgaaatgagaggactgaggggatggaggctgaaggggatcgtggcttccgattgtctctcggctattcatcgcattcattcaattgtgaaagatcgttatgaagttggctgccagattgatgctatcaaggagatcgctgctatgttcctgtcttattcttttaaacatgttgaacgcttgtgtgattcagcggtgcattatctggctcgttaatatgagcacacccgttgtaatttctatcgatttgagatcccgaactgaattcatgggatgatctgtagtgatgctacttaatcagtaaagtggtgtgattgccgaaaaagacgtcctagactatgtttatgtagtcatacctacggcaaggaggatgtgctgccattatttttgacctgctgtgtgtagtgattatgtgttagtgggggctcatatcagtcatgtaggaaaaaaaaggagagtagagtggagagagataggagaagagatgttttttaatgttattttgtatatgactgatatgtgagtcaaacagtcacgtaggcaccatcgtgacttgtcatacatacttgtactccctccatcctaaaatacaagggatttttaatggatgggacattttatagtactatgaatctgacagatttcctatccagatttactatgaaatctctcatccgtccaaaatctcttttattttgggacagagctagtacaagtttgtgggttgtccgtgcactaactaaaatcctaccaccgtaacgttagtacgggcatattactagtcatgattaagtgatcaaggacggctcggtcatgactaatcaaaagagaaagaacaaggagtgaagactcaagatgtgtgaatagtaatgttctttaattaggagatttccttctttcagaattaatacgtctgttccaaaataaatataattattaacgcagccatactttatcaaatccatacactgatgttacctttttgaaacaggatagccaaggataccagccatatttttcttttgcacataataatcatcatgcgctttaactaaattcattatgtgtaaaagagaggtcttctcattctaaacctgcacaataattagaaataagaattaatatgtgcatcaccaattcaaatcgagattgaaaaaataattctattcactaatacacacatgcggctaaaatgaacaggaaggtataggttcttcagaaaaatggtcatcgtatagtctccgatgaccagccagtcgtacccaattaatcatctcatgtccaaacacagacacatcttgctttggttatttaatgttctgatcgtacactatttgaaccatctcaataataaatttatcgttgtcatccgccgaagacttatcatctagtagcatttggaggaagttgcatcgacgactcatttctttgtcttttaacacgatgagggcatgtaaagagaggtgggacggcaacagtgagggatagaggggagggggaaaggagagctgacaggggatggtggggcagattggtgtcggggaggcagatcagcattgatctgggagtgcgtgggagaaaaattaccgtccgggcaaggaggagtgcctggaggacagcgcgatcctcttcagtacgttaatagcggaaaacggaaaactagatattcatgttggtagtttaacagaagggttcacttttactttttggaattcaatttaggctctctcttgaagagatgaatttttccacttccttcaatttaggaaacaaaaacaaaattttggggtgggttattcacattatgttggtgatgctcttagaaagaatgcgaagtacccgctgcctcagctggcatatttttattatgtcccatgaattcaaataagagtgacctcgttgcttgaattgatacgtttatacctgattttcttatctaatatgatgatatttggtgagacgatgtcacgccctgaagtttcccctttccgttgttttaaaaaaattgtttaataaatcgtccgaagaaattgttttaattaacctggagctaaatccctaagtaataaatgcaattaataattggaaatggcattgtgcgatttttcttgggttccacatgtcacaatacactaacaagatttttagtggaattttcagagccttaaaagtaattttaaccaattaaaaatgagcaaatgcaatatttaatcccaggaaaagtctttttcctttttctccatttctttcccttctttttccttgttgggctgtcggcccaacctccctccagtgcgccctccttgctgggccggccccctccttcccttcccctccccgaagtcctccctccctccctctctctctcgggcgccgacaggtgggccccacctgtcggtcgtccctaacctcctgccgcccacgccggcgccccacctccccacgccgccaccgtttcccgccttatccgtgcccccacaccgctcgcaactcgcgcccacgtcgccgcccacctcctccacctctcccgcgcacgcgcgcccgtttagaggccgggattcggtttgaatcccgtctctcctctctctctcttcctccccactcccccacgtcgccggtgcaataggggccatccccggccacgtcctcccctccctcatccataaaagcactctcccgagccccctctctcgtttcccccattcgccgtcccctccagcaccctctaccgccgccgcatcaccacacctgagctccgccgccgcccatctccggccgcgcgccgccgccgctatagccgccgctgcgccacgccaccgccgccgtcgtgctcgccagtgccgctcgctcctcggccgccgcttggttgccgccaatcacccccgaagccccgtttccctcgctcgccggtgagctctccattttcatccatctccggccggccactttggtcatcgcggtcgtcctctccatccctaactcctctcctccccttctctaggtgtcgccgccgcttgtccgaacctcctctcgccgggtcatcgtcgccgccttcgccttccgctccagccgccgtgtcgccggtggggcctccctccccttcctttcctcccccttcccgcaagcgctgagccacgccgctgcttcggccatgcgccgccgcctttcagctgtcgccgccgcttcctgcgccgcgggtcaccgtcgtcggtggccgtgcctcgctgccgcctcgccttggtcggccggtcggccttgaggccaagccgagcctagccggcgcctccctttcccttccccttttttgagccgcagccagtggggcccgcatgtcggcaccccctccctctccccttgtgctgctgacaagcggggcccgcctgtcggcgccgccccccttcgctgacgtcagccctgggtaatattgcgcaataaaattgattaaggatttttctttagtagtaaaaacacagtttatcttctaaaattcataagtaattcatccgagctccgattaagtctattcaagtctcagtaaattcataaaaatccctagaatccattaaaaatggttttgttcactgtttcagtagtcttatagtgtgttttgcttgtgtgctttgtttgtcgcgtagatttcggcagtttcgtcgatccgcggtttctcgaagacgttgctgtggtctcatcagtgcgagagcaaggcaagtcatgcattataattgatcatattgtacccaatttataaatatcccgcatttctattaaatgttgcattcttttacagtgtcatgtgggatgggtcccactacttagccatttattgtttaccttatgccattgataacttgggtatcaaaatgattagacgttcgtttaggaaatgcttagtcatgcttagctcaactagtacagaaatggggatcacattattacatagactttgactattagcatagttttggattggtgccaccgcaatggtgttagttaattaaaatacactgaatggtgggctgtgggtgcatggttttgctagtcgcacccatggcaattaaggactggttcacgggaaaccctgggagacttaccgtgcttaccacaagcgggagtgggtaactgcttgatctgaagtatagctcgaccctttcctaggcaccggtggcgagggtgggcgtgatggagttgggtcggccgcggtgtccggttgtccagctgccggattcaccgcggtgcaagaggggaccgcccactgcccgttgggggtgggggtgaaaccttagtgtggtgtggatggttaggggagggttatgcggagggtcttgtcacgatttccccctttgcagtatcacggtgatacttcggggcatggcgacatgtgtggaatcgtgtcttgtgggtacagttgtacacctctggccagagtaaaactattcgaatagccatacccgcggttatgggcgatcaaccagattcactgtgattagtctcacccgtagtttagtttaatgaactggtgtagtacaggtggttggttgggcttgttgcaatgtggtgtagtgttggacagtgattggttaatattgcttaattaccacaattgttttaccgctttcaactactgctttattgcaaaggaacccctagcctccttcggttatatcctgcatcatacttcctcttctggtatgacttgctgagtacagtgtgtagtactcagtcttgctctcttttcccccacaccagagctgaagatcttcctagtgggagctgtcttgtcgaagttggtttcgtcgctgccgtcaaggattgcctgtggagtggagtcgccccgctacaaaactcaagcttccaagtttagctcgctttatctttttccgctgcatctgtaatcttttatatttttgtaagatgtggatctgtatgtcaacaattgtcgtttgtgtaccctagctggtcctggacaggggtttaattcacattcagcttagaaattctggttcgtgaatttctgggcgtgacaagttggtatcagagccgaccttgaccgtagttcaagccaactggaaaccctaagagctttctgaaccccttttcatctgcatatgctctttgcacttggatttgtttcgggaaaatttggggtttgttctttgatttttgggaaaaatcctggtcgttcattcggatcggatctttaaaattagataagtctagggttttagaaaaattttatttggagtattcgacagtcagtcggggatatatcggatgagatgcattaggtcatgtctatgttcgatggggcaattttatgcacatcattttccatgcatctattttatgcattaatttattgtttagttagttacattagtgtctttatctgggattaggaaaaatgttctatgcataaaaatcatcatgcttggttatttatttgagtcaattgttgttttgtttaaatgtggatttgagcatgcgttgattcctatctcttgtctatcttaggtgtcagacctgtttctcaatcgcaagcgccgctccgagcttcagagtcatcgcccttagctttatcgtcttcttagtctgtttgcttgctagtttccgtattttaggtttgttgcttgtgggttagtcggcggtcgatattatgtgtcagtggtatggctgcctgtcacgcccagaaattcccgaatagaattccaagcagaatgtgcattaaaatccccatctaggacaggccggggtacacaaacgacaaagttgacatacagatccacgtcttacaaacattataaaagtcttacacaaatgcagcggaaaacttacaggataactgaagatgagcattgacagggaatgaagcgggggcaccactccacaggcatcctcgatggcacggacgaagcctactcctcggagaaaccaccatctgacgcatactcacattctggggtttggggaaaatagagcaagactgagtactacccactgtactcagcaagtcataccggaataggggtatgatgcagggaattatcaagggatagctataatggttcatttgcataaagcgggcatttataaacagaagatgaaagcagtaaaacagttgtaataattaatcaatattaatcatccactgtccaacgctataccccgttgcaacaggcctaaccatccacctatactattcaattccattagaataatctagggtgagtctaatcacggtgaatctggttgaccgcccataaccgcgggcacggctattcgaatagttttactctgatcagaggtgtacaactgtacccacaagacacagccccacgacacgtttccgtgcgccgacatgccaccacgacataccggaaagaggccgtgacaggacccttcgcataaccccctctaaccaagcacaccacacctcaggtttcacccccactcctcgcaaggcagcgagcagtcccctctcgtgcctaggtgaatccggaagccgcataggccgtcgcaaggcccatccaaactccatcatgcccacccttgcctggatgcgtcggctagaggaaagctacactacaagcccagccgttgcccacgctggcttgtggtaagtacgaggaattcttccagggtttcccgcgaaccggtccttaattactctgggcgcgaccatcaaaaccatgcacccatggcccaccatttaatattaattaattaacaaacaccggagcggtgagcattaaccaacatcaatcctagaatctgatatctatgcatttaatgtagttccccattgtgtgctagttgaactaagcaaagctaagcattccctagtccaatctctagtcatgttatatcccaagctaacaaaggaacatggtacaagatagcatggctatgacagtaggtaaacatcccacggtgatattataaaacaacgtagtatttgaagaaaacaatggagcatttgcaatataggatcaacatgttaaagtgacaagcatgacttgccttgctctgcagctggaggaacttcggcgactatttcaaggtacaccggagcgtcgggagagccgaaatctaagcgacatacaaagcaaacaatacaaacaggctataagactattgaaacagagaacaaaaccatttataatggattctacacatttttcttgatttactgagacttgaatgggcttaaacggagctcggatgaattagatatgaattaaaacacttaaaacagcaggcaaatccttattatgacagccatatcataggcacatgatatcgaccgtcgactaaccctcaagcaaacagacctaaacacacaaactagcagacaaaaactaagcagtcgataaactaagggaaagcgagcctaatgctcggaacggctcctgcggtcggtggagtcgaaggcgtcctcctgctcgtcaccaggtccctctgagcggctcctggagtctggcagatacgtctcgccgctgcacagctccgagccacttgaactgctgctgctgtggtcgcggttgccactgggagtagcaggcaaccaacccccgttgccactggctggacccctgacggctgatgctggagcgaaggagagagcggacgcgggagctgacactggaacaggagctgggactggagctggagctgcaggagctgcaggaactgtgggaactgcgggaactgcgggcggaggtgggttcctgggcacaagctgaatgcgcacgggtgccgtcgtcgacttgcggggcgtgttgcggatccggactcctccgggaatggggagacccttcaactgagcattctccttcttcaggcgtgcgatctcatccttcagagctatgatcctcacgagcttcccatcattcaaggccttagacgccttgcgcagatccgagtgcatcctgtccattaccctcatcacggcacacatatgaccaaaggtggtgtcgttctcgccggctgtcggacgaaaggtactgacgtcatcgccacttgctcgacgagggtgaaaccggtacgccgtgttgcagaagatgtagttgtggcgctcccatagtctggccatcatcaggtatgctgcctcttgacaggcgtgatctgttgtgcctccggatgcctcaaccaccatgttagcgaggtaggtacccacatagccatgaacctccaggcgaacacggtgagggaatgtcacgaccggaaataacccaatgggcgttccttacgtgcatgtattattccttgtcccaggaggcaaggtacaccaaaagttgatacaatacagagtttaacaagcggaagcgtaaatagttaatttattacatgggcggcgaaggcctagcacacatgaagacaaacgaaaaacagcggaagactagggcgacgaccacaggcgcttgatggcaggcacgagctagacaccaaagccttcatcatccaggaactcctcttctgggtttgggaaaaattgagcaagactgagtacaaccaccgtactgaataagacacaccgacaagtgcagaataaatgcaagggagtacaagggagtcataatatagggggttagggtttgcagtaaacagcattaaaagacacttagttgctcaagctatttggtaaacacgatcctagagatatacaagattattaatcaaggccgtgaacccacacgaacctgccttaacccaaggcctacgatgattcagaccgaactggcaacccgaccctgggtcccagctcgtcccaagccaacccaggccaaccattccacattttagttgttaagtaggttttaagaattaaaacactaacttgggtacattgctaggcttgcccataaccgagggcgcggctattcgaatagattatactctgatcaaagatgtacatctttacccacaagacatgtcttcttcacgtgtaaccacgtgccacataccaccacggcatacggacggaagacatgacatagtttccaacccatcctagccatagacaagagtaccgacccaaccccacctacggctggaacctccgagacaggtaggcaggactgagcccctagcagcaggacaccagccctgtgccatgacatctcgactaccgggccgaagctcgtgtagccttcatttgccctagagatgtccatcgactcccgacttcgtccatctccatccgtgtacttttgtttataaccagactgagccacaaactaagccttacccactagacatgtggaagtacggtagtgctttgcaacagaggcccgaagaccggtccttatgtggccaaggtgctactatcaaaaccatgcaccccgagcccagcctaaaaccattttgagggttttgaatagagggggaggtgtgaatccaattccacaataatccaaccattccatagtgtccaggtgatatgaatattcccaaagtctagagttgtaaaatcacctaatgttgcctaattaaacagcgaagcatctacctaaattcatactagtcgtaccatgaatagagtatccactagttggggttttgtttattctagggtgaacaaggtaataataacaataacaataataataaggtcatacaaaggtaaataggcatggctaaataaaacagtgataacgcgggaatttaaataaagcgataatgcaataatttaaatcaaaataattttataaactgggattcaatatgctcaaggatgatgtgacttgccttgctcgatttcccaaacgtcggcttcaacctccacgaagagcggatcttccaaagctgcagcgtctacacgaccaacggaaaggaaaaaggcttttactctagtaaactccatataacaagcaggaacaaagcacaaaaatgggttcttgacttcttaaggaaaaattagagacttgaacggtccaattccgagttcaaatggccaagttatggccatttgaagtttatatgctctttaagtgaatatttgcgaatttctttatttaaattttaatttaaaaaggatttattgcatcagccgaggggagagggcgcacggaccgggtccacgggagtggggcccacgcggcagcctcacggtccatggtggaccgggcgcaccggggctcacaccggccggcgccgtgggccccacgcgtcagccgcacccgagggcgcgggcggctgacggctgggccccacgcggcagccacacggcgcgcccggaggcggccacgacggcgcagtcggcgggaggcggcacccgcgcccctatggtcgccggcggcggccataggcacagcggagcggcggccgagagaggggaagagaaggaggaaaagaggcggcggtccacggcttaccctgggtcgacggcgacgacaaaaaaggcggccggagcggaggaaggcggcggcgcagctcgggtggatggggacgacggcgctccagcggtcggcgagctcggcgagggggtggacggggtcgacggcgctgcggcgaagccggaggaggcgacgccggggcgggagacagtcccagcgagcggaaaaggccggccggaggtcgtcggtgacggaggagagagagggcgacggcgcgagctcgattccggcggggagacagcgcgccaaagggtggaaacaggcgaaggaggcgcggggagggtttaaatagggttggaagggggagagggcggccgggagaggaaggaaaccggccgagaggtccggccgccatcaatggcgccggcgagatttgcggaagcaaatccggccgtttgaatgcgagagagagagggaaaaatggggggaaagggggaggggatcacggggaatatttccccccacttaattgcacgcgggggcggcgggatgcggcggattcggcggcggcggcggtgcttggcgcgggcggggcggcgggagcggcgggaggatggggatgacgggtgggccccacccgtcagcgagggtggcgggcgggcccacccgtcagcggcgcgcgcgcggggagaaggccgagtgggccgcggggagaggagagagagagggggagggagatgggctgaaccggcccaagagagggaaggggacttttagggtttttctttttataaaacctttttaactttgtttatttcttaacaattataatttgtgctctgaaaattccactaaaatttatttacacattttaggcttttaggaaatatacaaaaatcctctaagccttatttgacttttactctgcacattttaatttttggaggctttcacacggattttaattattctaggcataatttaaaggatatattttagggtcgttttgggacatgacagggaactcgccactgagcggcggaacagtcgaatactctggcgcattggggtagtccaccaccagtgtcatgcgagccaactctgccacaaagtcatccatgccttctccgcgatggttgagtgggtgatcggccatctagagaagacaaaggggtaggatcaatgcatgctcaaatccaatttaaatgaaacagtaaaagactcaattaaaataagcgaataagagcggaattttatgcatagatcatttttgcatgaaggcgaataaataagacgaacttacatagcgataaaataatgagaaaattagatacatactaataacaataagagcataaataccttgcaacccatattcctgagttaggacctaatgcattcctcccatcaaatcccgactgactgtcgaataaatcccaagtaattttactaaaaccctagactgacctgatttggcaaatcccacttaaacgggcgaccaaaattttcccttgcaccacaagaacagatcccaattttcccagaacaaatccaattgcaaagaacatatgcaatgaaaaggattcagagggctcttaggtttttctatttggcttgtcctacggtcaaggtcggctctgataccaactttggatgtggtgtagcattgatcagtggagatctaatttactttaattactcaacagttttactgttttgctcaataaaaatgttttacaaccgcctttatgcaaatagccacaaaccgtccttgtgttccccttgcacgtctgcatcgttggtgtggcttgctgagtatggtggttgtactcagtcttgctattatttcccccttttcagaagtgtagtgcttctgagctgaagacgaagttagaagaccgaggctcaagaccccagttgagttttgcctgtggagtggagctgaagccccgctaggatcgccttttccgctgctgctgcttttgtttcggtgtgaggactaagtgcctcttctgtaagcaatttacgctttatttacgtttggaactatttattacttgttgttttgtgtaccctagctggtcctggacagggatttaatacacaaaatagtctggaaatttgggctaaatttctgggcgtgacactgccttaattaggagttgtttgcttcctttttcaatgttttaatcaagattaagataattgcacttaaatttataagaaagattagtttctaagcccctgtttttcttccttttctcatatttctacctatgccccttcagatggtgaagacaaggaatggttcccatgaatccaacaacgccagtggcagcgaagaatttgggaaaaaaaacttgtgataaaagagatgagaaagaaaaacatagaaaattatatgaaaaagattagaaaacttagttaatttaaattaaattaagtaaaacaaattaaatatttttttacaactttaaaatgatggggaatgaaaacatgaataatttgtggtattatttgataatctaatttgattattttgaatttggaaaaaggaaattgtgataaaagagatgagaaagaaaatgaattaaaattattgtaaaagaatagtaaagtaagttaatttaaattaaatatttatttacaatatttatgtggaatgaaaacatgaataatttgtggtattattttataataattatatataactattgttaatattgtttaattggtttgaatttcgtggattaatttttcatgattttgtgcttttcatgtagatggatcggcaatggatgcgcgcggaccgacggtcaaaagagtttattgatggcttgcataattttctgaaagtggcagaagctaacaagaagaataatggttttatccgttgtccatgcactaagtgcaaaaaccagagagagtattccacagttagaactattcgtattcacttgttcgagatgggcttcatgccgagctataatgtttggacctcgcatggggagcaaggggttcaaatggaagaagatgaagtagaagacgagaacattccgcactaggctcagtacggtggatttgaaggaaatacaatgtgcgaggtggaaggggctgacgttgaagatgatcttggtcagatgttgcaggacatcaaggaggactgcgaaagtgaaaaggaggcttagaaattagagcgtatgttagcggatcacaagacgcctttgtacccaggctgtgaacaggggcacaaaaaattgggtacaactctggaattgttgcaatgtaaggccaaaaatggtgtcagtgacaaggcatttggcgagctattgaaactagtgaagaacattcttccagaggaaaacaagttgcccgaaacaacatacgaagcaaagaagatagtctaccctctaggacttgaagttcaaaagattcacgcatgtccgaacaattgtatcctctatcgcggtgaggagtatgagaacctagaagcatgcccagtctataatgcactatgatacaagattagaagagatgatccaggtgatgttgacggactgccttcgaggaagagaattcctgctaaggtgatgtggtatttccctataataccacggctcagacgtttgttcaggaacaaagagcatgcaagattgatgcgatggcacgcagaagaacgtcaacaagatgggatgctgagacaccccgccgatgggtcgcagtgcactacagaatccggagcattcaggacgaatgcgaggaaaaggcctcgtcccttggaaactaggattcaaggaggacagccacacgtacagtagtcggatcaggagcaagagagacacggaggcgaagatcgtagacctggaatacagggttttgttgcacgaggccaggatagaagaggtggtaaggaaggtggacgaacgactggccgcacatcggagccaggaggagcctgtaatggtcagtccctcaggaaatcgcagcagttgcgcctctacgggataggttggatcatagagcatggaagcagcgctaactcaggaagaaaccacctatcccgttgacggaatcaagcattggacatcgtgcgagctgcatattcccttcaggaacttgaccatcaaggtttgctcttgtacttgtatacattccatatgtcgttgcacacatagtttgattactaatttataacctctactgttgacaaggtggcgtcgggcatggccatcccaacggatccgacagggacataccattgcaggccgattccacctgggtactccaaggtcgaaatcgagcaagtggaagccacctaggaggatctcgagttggagatacctggagaggatggggagatgaaactaggagacacaagccatgccatcatactatggtgcaagcgctacatcgtgtttcccgattctcgatcccctcctcctgcaccatcgcctccggctcctccacctcctgcatctcctccggctcctctgactcctccatctcctccgcctcctccgtctccgctgcaccgtcttcgcgtgctcctccgccacctcctccgcctgcaccctccaagactcgccaagctgcaccacctcctccgcaggcaccttcgaagagttggcaagcaacaccacctcctctagcaaagtcaaggtcccgccaacctcctcttgcaaagacgtcaaggccgatgtagaaggccaaagttgaaccacggctgactccctatacgaagccatacttgtgcacagacgaggaggttgacgccgcggtgaaagaggacgtgaggaagcacttcaagcctcggagtcctgaaaagaagattcctatagacccgaagaccaagaagttcttccaaggcagttgtttgcccagatctttcggtaagttaatgataactatgatttgggagacatgttgacgatccgactataaccgtacaagaagttgcgttgcaccttaccgatcgatacacctttccgtgggttgttgatcttgccagtgcagatcaaccttattcctgcaagcaaatcgaagaaacaagcaataacaagataaaagcaatcagatattgcaaataggaattgaacacaaatgataagttggggttacgaagaacaggcagacggacggtctagccgacacgcgtgctgcaagcaagtagcaacggctaaactttaatctaacaaaacccaagaaaccatgaaggggtaccaagctatttatggagatgggaggaccctaggtcgtcctctacctggttgaggcgcaccccacatgggccccacttgggccaggttcccagacgaagttacaagcccataggtattacaagagacgcaacacattgttccttcaattgcacatgactgacaaagaatttggtgatgaggtggatcgtttggaaagaagactccgaaagctttccatcgagtactcatgggctgaaaacggaggtcgtatgtagattcggtggccgtttgaagccagttgtgcagcagggggtcaaatcggattccagcacttggagggcttgaacttgatatcttgttgttcatccatgatgtaagcaatggttgtatccatagtagccatgatcacatcatcctccccttcttcatagaaaaccgtcctcgatttttccatatggtgctcatctcatggtcgatttaaaacaacctgtttcatccaaacaaaacaagacaaactcgaagtaatatgataagaaataacatgtctctctagcttgcaagttttatccacatgtataggaggttctaaatctgaacatatataaactctatgcaccaaatatatttctctatcattatattcaccaaagatatgaaaaatagcattagttggtcatggcaaatcagatttagcaaataatttcgccttcaaactatcgagctcacaaaaatcatcacactgaatatagcccaaagtatttaaagaagatgtcaattcacgttcctctacttcattagcaatgtgaataacatgcttaaaatcatcacataaagaactagtatgagaaatagcatgttcgttcactagttgtggcattgatataagtgaagcattatcacacaacacttctttatcacaaggaacagcaaacaaatcagtttgtgacaaaggaatctcagcagttggttccactaatggttgctccactttagcatgaaaagtggataaattcaatttattaacaacacactcaccttgattaattttagcaccattaagtttacctttgatgccctcttcagatggtggaggtgcctcgactttgagtgtgaacaatgggattggcggttcatccatgcctttgtcctcttttctatcattatgcacttcctgcaaatggttagtaatagaaggcagaaacatagcgtattgctttttcatgtcctcctctatttgactttcagcattgcaagcaagttgtatcaaataagaaagagatgtatatctttgacaatcaagcatgtcctgaatttctttgtaaagcccacgtaaaaacatcaattctgtagcttctttgcattcatctaaaccacaatgtaataaacaagcatgcatatcatgatagtatgaagtagcagttctgttatcttgttttaagcattgcaatttgttgagcaaaatgtcagcacaatacatgtgaacataaacatctctcatatatcgtttcaggtctttccaaggttatggtattttattatgcctacaaagatgtttccaataaaaaaagcatttttaataagaacacgagaggcactgtcacaccttgaagttccctaccttgctttaaattcataaaataaatcatccgaagaaattgttgtattaacctagagctaattccttaattaataaatacaaagaataatcggaaatggtatgtggaatttttcatgggttctacatgtcaaaatatgctaacaggatttttagtggaattttcagagccttagaagtaattttaactaattaaaagctacaaagtgcaatatttaatccctagaaattcctttttttcctttttctttctttttccccctttttccccctcttgggccgccatcccatttcttcctgcgctgccggccaacttctcccttcccctcccgaagtccacccagcctccctctctctctgaggcgctgataggtggggcccacctgtcggcccttcccctacctctagccgccgaaggagcggcctcctcaactgctgcccgcctctcccgcgcgctcccagcctcgtcccccacctcgccgcaccactcgcccatctcccgcaactgctaccccattcccgcccacgcgcgcgcgcccgcaagggcgggattcaatttgaatctcccccgtctctctctctctctccaccccacgtcgccggcggcatttcccctctaaatccaggcagttcccggccatgtccgccctccccgcgcatataaaatgcaaccaagcgtcctcctctcccttttcccatttttgccgcgctctcctacactctctaccaccgccgcgccgtgcaccgctagcgccgccgcccaccgccgcgcaccgccgcctccggccgcgtgctaccacctctatagccgccgccgcgccgcgcaatcaccgccgtcgcgctcaccgagccaacatgcaccttggccactgctcgcttgccgtgcgccgccgccacatcgctctcaccacgcaccgccacccactacttcctccatccgccgctagccgcggtttgctccaccgtcgtgccactccattgccgccgttggccttgcgaggtcgagggctgcatcgtccacccgctcgtctcgccgtccgccacttgccgccgtcattcgtcgtcgcccctttccgcgccggccaaccccacgatgagaactccctctcctccctctttctctctctcccgtgttcactgccgtccactgcgcgcgcgccgtcgccttccgcgccgtccgtcgccgcctcctgtgtcgccagttgccatcgccggcgaccgtgcaccgccgccgcgtcgccatgcttggccggccttctttgaagccgagtgtcacgcccagaaattcacaagtaatttccgaacttatttgtgcataaaatcctcgtccaggaatcagccgaggtacacaaactgacaatttaatatacaaattcatcaaattaactaaaacgataaatacttacttaagaggcacttagtagcggaaaataaaatctagcgaagctctggctccactcccacaggcagctcaactgaagtataagccaaacgtcttctccttcgcaacttgccttcaactgaggtttgattgattattgcaaggtgagcatatgacatactcagcaagccacacagcaaatatgcaagtgcacaagaataccaaaggatggcataatatagggctcatttgcaaaagcagcatttagcaaacatttgagaattgtaaaacagtagagtaattaatcatcaatattaatcaacactgaacagcacacccatgctgcacaggcccaaccatcctgaacaaccatacccggctgcacagatctatctccaaaccaggaatgtaccattccaaactaggagctaaattaattaccatcaattaccacattatttttaatgagtagtgtgggactaatcacgaaagacattgttcgacccgcccataaccgcgggcacggctattcgaatagtttcactctggccagaggtgtaccactgtactcacaagacacaacccaccgtcatgtcaccgtgtccgcgcagacacgtcaccatgacgagtgattatgacaagacccctcgcataactcaatccaaagcagtgcactattcccggatcatagtcacccccttataaacaaggcatggactccccagcgacccccgtgggcttatctccaccacttctcagtctagtgctccgcagggagccttgttatacaaagtgtccagccgttgcccattctggcttgtggttggcacggtaaatgtttcacaaccgaaaatcgtgaaccggtccttaattgtcatgagcactaccatcaaaaccatgtgctcacaacccaccattatcaagttttagttggcacattaattaatcaaccaatcacgattgaccatcgtgagctatcattaaaccatcattaaataatagtgaagcattagttatcccaattgtgtgctaatgtttctaagcatggctaaacaattatgtctaacatctagctgaaccaatatataaagctcaactagtcaaattataataatccaaggtatcaaggaatacagtaatcaatgcaaactggccttaacaacggaataagttcacaccacccggtgacattcgaaaataaatgcacagttgaaataaatagagaatttaaatataggatcaacatgctcaaaggaattgtgtttaggatctgtgtgacttgccttgcaataactggtcttcaaataatcttctcgaacacttccggcgcactcgcgaaccttcgaaacgacggaaacgacaagctaacacgcaaaacaaggaaaaagactaataaaaaccaaataaacaatacatataaagtaaacaaacatgtagatcataattttagatgaattatgagacttgaacggcctcaatctgacttcatatgaatttattacgaattttacaagattaaatctaattaaagcctatttaaaaaggattaaataaatttagttcaatttatggataattttaatatgtagatctttattttatacaacttttgcaacttgaaccacattaaaccgagttacaatgaattagttatgaattcttaaagattaaaccggattaaagcatttatatggattttaattgaattatgacgcaataatgaattatttttgaaaaggaaaaaggggattattgcgtcagcgggtcgggttcaaggtggaccgggtgcacggcggcggttcacggaaatgaacggccggaatcgatctatccaaatcggacggccaagatctaaacggtctacgaccgatctacggcggacggcgtcgatgacgtcagcggtgacgtcatcaccggcgacggctcggacggtgcatgctcgccggagaacgatggcgcggcggcgcaaacagagggcaccaacatgatgcgggcatcgaggcgaaccttaccgaggcacgaacggcggtagacggcaaccggacggcgacggcgacgaggaagaagcggcagcgaccttcggcttgacgacgacggcggggctccggtgatctacagtaacgaaggaggggcggacgaggtcggcgatgacttgacaatcacgacaacggctttcccgagcaacgacgacgactggagcgacggcggtgctcgactaaactcgcgatggcgacggcggcgcacagcttgacgcggaggcggcgctacaagcgacggcgggctaaggcgaaggtggtggcggagagaggaggcaccgggggtccttttataggggctaagcggcggcgacgaaggcccatggcgatcggcgacgagaaggaaagattagggttcagggagagagacgaatccgattcgaggtcgaatccacggatttccaaacgattttagccgacgattcaaaaagagaaaaggtagagtgaatctcggggatcattttccctctatcaatttcaccggatcgagaaagggatgaacgaatttggaagggcggcggcggcccggctcggctagggttcggccgggcaacggcgcgaggaagacgacgagtctgacaggtgggccccacctgtcagtggcgagggcgcgcgcggcagcgggctgacttgggctggggagagagagaaaggttttgggccgactttcggcccaaagccaaaaagaagaattttaaaaactttttcaatttaaattattcatgaaatgcaattccatttattaaaaatacttccttggctcaaataaatcccagaaaaatctaggaactatagaaacaagagaagtatttaacaaaattttatctagcccacttttatattgagatttaacaaattaaaaaaaatcttcttttttaggtttttaagattatttctaataattccttttaaacaacaatttataacttaaggatttttaagcaagcaaaacatttaacataattataattagatcattaattgattaattcattgattaactaattactgaaatattctttgtatcatttaagaattgagctctgaaaaatccgagaaaatttcagagagtatacttaatcacagagaatttaataaaaattaaattcatccatgctttatatttaggaaattttatttcccacatttaacttcacttgtaaattaatgaacatttaatataaattctattaataatttattaaataatttataaatcctaaaacgaaaattcaggctgtgatcggccaagcccgacggctgctccccgcgccgtccgattggcggggaggccgatttgggccgtcggtcctgtggaccggaggtggaccacccgcgtggtcccggtccacgttggaccgggccccttgagccgctgccggttggggcccgcttgccggcacctctcccctccccttgtgtcgctgatccatggggcctgcttgtcggcgctgcttcccctacttgatgatgtcagccctggaacatattgcgcaataaataattaaggcattttcttttatagtaaaaaacacagataatcttctaaaattcataactaattgatccgagttccgtttaagtccattcaactctcagtaaattcataaaaatgcatagaatccattaaaaatggttttgtttcctgtttcagtagacttatagcatgttttgcttgtgtgctttgcttgtcgcttagatttcggctgtttcgtcaatccgcggtttctcgaagacgttgctgaggtcccatcagtgcgagagcaaggcaagtcatgcattacaattgatcatattacacccaatttacaaatgtcccgcatttctattaaatgttgcattattttacaatgtcatgtggtatgggtcctattagtcagccatatattgtttaccttatgccattgataacttgggtattaaaatgtatagatgttggattaggaattgcttagccatgctgtcagggttatggataccacatacctaatagtagttgactaagctcgacggggcccaccatataccaagtcttgtacggaaacataccttgtatatagaaggagttccagataaggaatgacaaatagagttctatatggaaatgacatggactacgcagactgtattcatatttgtctccctagttctacttggacaagggatcatgtatgggtataaatacaagcctcctaggaggagaggagagagaccaatacaagccgcaaagccgatacaagccaacacacaccaccaaatatcgacattagagattagtctagacataccccatcaggtgtctacgaagatcggcaagagggatctagcgctatctctgatctcgacgagttcatactcgaggaggaagactaccatgtcatcgactacaagttggttatctagccgccaagtcgacgacagttagataggttatcccaattattgtactcggtggtatctatatcaatcctatataaacaggatgtagggctattacctgtcagataaggggctcgaacctgtataaaaatccctgtctccatctcttttacctcaatctcgcatataccctggtaccaacgatccccataccatccaaataccgtagtcatgatctcaaatgtcgacaatggcgcgacaggtaggggattttggtgcttcaagatttcgacgagatgggtttaagagatggattctctaacgacaagctactcgacgactccagctgtgggaagatctaatccgaccggagtatgtctcccgacgagatcggaatcatcgtcgtcaacaatttgactatcaagatcgaccaagtttcaagacgtcatcaccgtggaggatatcagtacaatgtggtctaccgtgaggccttgctccggatcgactacctttgaaccgacacccaccaccgaaaatccgacgaactactgtcctcgaacgtcctcgccctcgtcgtcctcggcaacttgagactagtcggcaaaaatcgccgcctcgtgtaggagtcagaaccggagctactagtccaatcctattcggtgtctgtcattgcatgcaggagccggtgaaaaagccgcattgcagtgcatgccatgtatggcatgtgcactttctctgtttccgaggacaacacaaggacaaatcaggagagtttaattactattatttgttggattcatcgctagaagcaaaaaagcaaaccagggaacgtatacaaggcaagtgtgaacactggtaattggtaggttgatttttgaattaatctagtaatttcgtagatacatccggtatgtatctataaaggtacgcaatattttatatacaatttactgtaacaattttcagatcatacaatattatcatatttataatttattatgtttacctagaacatgttttttaaacgatatctatatgtgagcattccctatattaggccaacaacggtttaatactggggctcgctttattttcttctgtataaatcatgcttgtttacggtttacataatacctcatatttaatctgctcattatatcctaataatactagaagattcatgtagttttttgagtacatactcgatattctctactatatatcttgtcatctagaaaatatttttcaggaacgattgagcactcgagtaggatgtggtcgagtacaccgcattatcgagaacgttctcaaagaatgctgagttgtcacacccaacctaccaacgaagactgacgacttatctcatgtatagcgccagctacagctggactatttgagaaaatgttgttaacggataattcctcgcgaacgttgttggcttgatcacccgacatgattgcgagtaaacatccagatgtgctatatgttgggtatgtgagtcatgctagcccatgagatgcacatgtaatcaccaactctagcgcctcttcaggtgatcgagatacgcctac

SEQ ID NO: 23625 - DNA, 575 bp, Oryza sativa
aacgtagcgatcctcgtaccacaacttctaatggtcgaagatacgactatgactggtcttccactggcaacgtagtgatcctcgtaccacaatttctaatggtccagatatgactacgactggtatcccatcagcaacgtagcgatcctcgtaccatgacttcctatggtcgagatatgactacgactggtctttgatcggcaacgtagcgatcctcgcaccacaacttccactggtcgaggtacgactacaactggtctttgactgacaacgtatcgatcctcgtactacgacttctaatggtcgaggtacgactacgactggttttccaccagcagcgtagcggtcctcgtaccacgacttccaaaggtcgagttatgactacgactaatcctcgaccagtagagtagcagtcctcgcaccttaatttcaaacggttgagagactcctactcctggttctcgaaccagtaggccgtagtgatctctcataccatatctcatacctccacttcaagtggtcgagttatgactataactggtcttcgactggcaacgtagcgttcttcgtaccat

SEQ ID NO: 23626 - DNA, 3303 bp, Oryza sativa
atatgacaacctcaaacaacattttcaaatactaaatgatttcaactgaaaagtcattaataaccaagtggtataactcatcaagatctataacttttatttgggtcatttcttcatcccagaaagttatttttaacattggtcacaaatgacatatctcttatataggttattaactaccagagagagatgtaattttttggggaccatggttactgtcattttgtcggatgaagaaattatcaaaataaaagttatagatattgatgagttatacaactttgtagttgatgaatttttcagttgaaatcatttagtatttataaatgttgtttgaagttgtcataatttgaaattcaaattcaaattattgaaacaaagtcatatagcaaaatgaccaaaataaaagtgaagaatcaaattatataatatcgacaattgtttacagtgaagaatcaaatattgtatattgctagaaaaatgcccgtgcattgcaacgggtgatgctagttttatacggtttagctaggatgaaattcactttgggaatttgcttggatatttttttaagaaaataatgaactgtaattaggagtccgactttcttctcatgttagcatgcgagtttttttaaagatatttcttatacgacttctttttatatttccaaaagaaaacgaatttaaaatcgactcaaacaaggatatgtatttccaaaaacaaacaaacttaaaaaccgactcaaatacgaatgacgtaccaaaatacaggcaaaaacatctttaatttttataatagtagagatgatgtcaagaaaaagtatggtacaaaattaaatatctacacaaaactgatgtaaaagttttttgaaaacacaaattaatgatctacacaaaatctatcatccatatataatcttagaataaaaaacacaaattaatgatctacacaaaatctatcatccatatataatcttagaaagaagtgccaatttcaagtcggtaaattagaacattaaagttagaagatgagtatgtgttacaatttgctaattatcacattttccgctctcaataagtatagaaaagacatcgtattcaaattgtattaaagactactccctccgtttttaaatatttgacgccattgacttttctaaacatatttggccgtttgttttattcaaaataatttaaataattatgaattcttttcctatcatttgatttattgttaaataaacttttatgtatatgtatagttttacatatttcacaaaagtttttgaataagatgaatggtcaaacatgtactataaagtcaatggtatcagatatttagaaacagagggagtaattagttactccatccgtcccaaaatgtaaaaacctaaaactgaatgagacgttttcgtactataaaatgtttcatctagtaatagattcttatattttgggacggagttactacaagatatatacttcctccattctcgaataaaattaacgtggacactaatctagtttagactttgattgcctggcttttttttctaaagaaaactataaacacttagaaatatgttatagatatgctatattattgatgtctgtaaaagcttcatgaatatgagcatccatttttcatcactcataatataatcatcagaagtaatttatggtcataatcaattataaaaatttttaaataagtgatggggcagcaaaatcaagttgagttaaaaaaaaacattgacaaccatgggccgttggtatggtagggaaacttttcaaccactagggtggataccgggtgaatatctaccccgtttattacatgccacttaaatggttatagaaaaatgttttagaaaaataacaagatagattaatatgaaatataacacttcataaatataccagttcaacttcagtttcgataagtactagttagagtttaatatgttatttttgttataacttgaagtcgaatttgaactgacatattaattttattaattttgttgagtgatacatttcatattaatatatttttaataatcatttagtagtttacatggaaaaccgggtggacgttcatccggtagattgccgtaggtaacatttcggcataatgatcggcgttaactctataagtactactagtcgaagagccgagcagcgtgcccgctgtcacgctgtggcgacgcgcctctgatcatccgacgagagcattcgtcctctgatcggcctctctcgcacattgcttaattagctacaagctacgaggcggcaatggcagcgccacctcacgatcacggcggccgcctccgcgtcctccgaaccgagcacgtcacgccgtcgtcgaccggcgatgacgccgacgcgctctccgaacgtgctctgccgctcaagcccgtcgagcccgtcgagcgactcttcctctaccgcctcgcccccggcgccgccgtccacggcgtcctgtcccacctcgccgactccttgtcccgcgcgctccgcgccttctacccgctcgccggcggcatccgcctcgcgcccgggaagaccgaccggtacgagctgttctaccagcccggcgacgcggtcgccttcaccgtcgccgagcacgacggcgccggcgtcgacgagcttgccacggacgatcccagggaagttgccacgattgcgccgctagtgccggcgctcccgcggggcggcgcggtgctcgccgtgcaggccaccgtgttgttgggcctgcggccggcggcgccgcgcgttctcgccctcggcgtcaccgtgcaccacgccgcctgcgacggcgcgagctcgacgcacttcctccacacctgggcggcttccgcctgcgccgccgccggaaatgtcccgccggagccaccagtcatggaccacagcttcattgttgaccgcaaggacatccacgacttgttcgccgcgcccagggctcagaaagggttcgattcgcccgacgccatggacaggctcgtcgccacgtacgcgctgtcgtcagcgcagctgcagagcatcaaggacgccgtcgccggcgaggcggcacgccgcggcgtcgtcccgccgcctcggtgcacgtccatcgtcgcgacgtacggcgtcatgtggctgtgccacctccgagctacacatggccacaacaacgacggcggccacgacgacggcggcggccgcgcctacttcctcttcgtcaccgaccaccggcggcggatggagggccgcgtcccaagcaggtacttcggcaactgcgtcggcccgtgctacgcctcgatgccca

SEQ ID NO: 23627 - DNA, 2674 bp, Oryza sativa
ccgccgccatcgacgaggcggtgcacggcgagaccggatactgggagaggtacccagagcgcatcgtcgaggccagaagggacggcgcgccgttctcggtggctgggtcgccgaggttccgcgtgtacgacgtcgacttcgggttcgggacgccagcgaaggtggagatcgcgtccgtggcgaagaccggcgcgatgtcggtggcggagggccgtggcggctccggcggcatcgaggtgggcattgctctgccgccggagcacatggggaggttcaggacgtacctcgccgacgtcatcgcaggtgtgatctgatcagcgtgcttgtagcaaaatgacatctccagcagcagcccctactttagagccctaaagatcaaatgggggctgccactaattctttaggacactaaaaatatcattaactctagcagtagctctcatattttagcccctatttctttttctcttttattttagtataaattgtatgtttgtgtctactttaacatcacaataatttaaacacaaataattctagcacatgaaattcaaccatattgaaaattacaattttaaacaccatgattcaaatttgaattcaaaatttttaacatgaaaatgacatgtcctacaagaaagtattgaacacaaccgatagttgacagaaaatgcaacgaaacaaactatcgagcaccatgaagcgcccacaaatgttccagaagatcatctcgaagttgctcatgtgcctgtcggtcttcaatttctttatgtatctgtagaaacttctctaaccaaatttattgcgtcgttggtactcctctttcctcaacacctcactatcccctgatcataatcgaagtctacatcttcatctcgctcactgtcaatgaacatgttgtgcattattacacaagctgtcattaattatgtaccatagggtctcggtatcccaaaatttagcaggacccctcaccattgcaaagcgggcttgtaaaacaccaaatgctctttcaacatccttcctcactccttcttgaacttttgtgtaatggattctcttgttaccctgtggattggaaatggtcttcacaaaagtggcccaggaaaggtatatgccattagcaagatagtaacccatagtgtatttcttaccattcaccataaactctagctctggagctgtccctgaagtaagcctttgaaagagtggtgatctctgtacgacattgatatcattaagagaacttggtaatccaaagaaggaatgccaaatccacaaatctttagatgcaacagcttcaagaatcatggttggcccatccacatgccctgagtattgccctttccaacctgttgggcaattcttccaccttcaatgcatacagtcagtgcaacctagcatccctggaaaccctcttggagtgttcatagccatcaaccttgcagtgtcatcagctgttggtgccctcaagtattggtcagcaaacacatccaccacagccttgacaaagtgtttgaaagcttctatcatggtgttttttgaaattctcacaacttcatcaagactatcggctggaatatcatatgcaagcatgcgaactgcaccatacaccttttgcaatgcagtggcaccaagaagacccaccgcgtttggtctttgcctaaagtagtcatcatgtgcctccacactagccactatgcgcaaaaagagctcccttgacatcctcctgaacctccttctaaataattttgcactatatataggaggatctgcaaaataatcagccactatgcgcaaattgccagcaaatctgtccctgtaaattatctcttgacccatgactgaaccacgatgcttccttttggttctcttatgctctatgtcagtaagaagagcagctgcaatatagtagtcatcgtcgtcagacgcttcctcctgctcccaccattgagcaaggagatcatcatcatcgtagaaatccatataaaataatcactaccatcacaatattgtaaattaataagaaaatttaatttccactatctcaaataacaaaatagacaattatattcataataatacacagtacggagtatatatttaagactcaaagcctataaaaagaagtgctacataagaccttgtttatatgggactacttttaagtccctatcacatcggatgtttggacactaattataaatattaaacgtagaccattaataaaacccatccgtaatcttggactaattcgcgagacgaatctattgagcctaattaattcatgattagcctatatgatgctacagtaaacattctctaattatggattaattaggcttgaaaaatttatctcgcaaattagctttcatttatataattagttttataagtagtctatatttaatactctaaattaatgtctaaatacatagactaaagttatgtccctggatccaaacacctagtgatccatagcaacgacagttcagtgcagtgctagtagtatgtacagtcccacgatccaatgcagtgctactagtacaagcacagtgtttgagattcttctctaccaccgaagaagtctactactcctacagttctaaaaaaaatatataaaaacaaatcaatgtctaacacaaaaagtggtcaagtataatacttctctgct

SEQ ID NO: 23628 - DNA, 2929 bp, Oryza sativa
atggggaattgaggaaggaactccctccttttcaatacctgggtaggggtggtaattgagagggaatttctcctttgctttgcctaaacaaatctcagccatccattttcattaatgacctaatctccaactaaactccctgtcaatttccaccacctctgccaaacaagatattgggaataaaaaccaaattcccatcttaatctcaccatcaattccctcgtgtaaactcccaatcccattccctcaaggtgccaaacaagccgtagggggcagagagcggcgagcatagggcggcgtgtaggctggcttggagcggtggccctccggcagtgcgaaggcggtggccctccatccgttgggccaatggggcagcgtgggggtgggcagccaccggttctcctgccggcgagcggatagtggcatgcgggcggacagcggtagggacgatggccgtgcagcaggaggaccatggtagtgcggggtggtgtgtggacagcaacgtgcggaccgacggcgggaggtcgtgcgacactgtgtggacggcggactcgtgagggcggcggccggaggaccttgcggatgatgggcgacagaggtaggggaaattctcacctttttgtgccaatcttgccggaggtgcaggggaatcgatggccgctggtgccggagcccagatgagatccagcatcgtggtgccgtgcgggaatgtgacgagagcgtgaaagtgaattgtcgtttggcgccagaaaaatatcgatggggctatgctcggagccccaggactaggggcttgggggtggatctgagggccttattattttgggggctaggtttagggtctttactggatctagttttttatgttaaccctcaaaatttatttagggactgggtttaaggtccctgctggagatgctctaaggaccatttttggttcgaagcctgcaaaataaatgtcctaataagttatctgcactctgaatagtattgctaccaaaattcaccgataccacacatagctgggttgccaaaatattttggcattaccaaaatatacttatgctttggtagccaacattttttacatgcatggtacttagcaagcctaaacaatcgtaagtaccaccactggactttattttctctcgtataatctattataataatggaatagctagattaaatcgtcatgtgggctttaagggactactgggtgattaagagatcttattcaccaatctctaccgcccacccacacgcgaaaattggctcgcccgcccgggacaatcggtgttgtagtagtgggatcagctttttgcaggcggccagcccaaccgcctgagggcaaaggcctgcgaaactagtgtatttccgtaggcgggcaaacggccgcgtaaagagcaaatttaaagaccacaaaaaaacccagaaaattcaaacattcctataagagcatattcaaaaacctcctaatccattcacaaattcatcacaatcctcaaatccattcaacaaatttatcacaatctccaaatccattcaacgaactcatcacaatactcaaattcatttaacaaattcattagatatcatcataaagcagaaaattcatcgtcggtcgaagccctgccgcaacctgagagcccccaccctgacctcctgacgccaccgccggtcaaagccgccaccactcactccttccaccggcgtatccaagcgcccgaggacagccgacggcagatccgcgctcccgaggatggccaacggcagatccatgcacccgaggccagcaggaagcgaatcccattgctattgtccaagcaccgtcattgtcatcgtcgcagccagtcgcagccgtcatcttcgccattgctgccgtcgtcgtggccggtggcggatccaagcattgtgccgttgtcgtcattatcggctggaggcaatggtggggggatagggatggaggtggggaaggagtgtgaggtagtgggagtaggtgcagggagagagagagctgagggagaagaggggatggaggagaggagccatgacctaataggatccccatattttacggacggcttgcaaaaatcatatattcggacgtccgttatgaaaataaatgtttttataggcggatctcttaagactccaaacataaaaattgattttgccaggcgaggctaaatctctatttttgtaaacggttataagagagtatttttttctctccacctgagaaaataaaaatatgttggtaaaaattgtttttctagtagtatgtgatttagagaggttatagataaacatgaaaatattaaatatctaaataatacacctcagtagagggagtgtagtaggaatcacaagcaatatcataatggatgacaaataaaagtttttacttcctctgttctagaaactaacaacatagctaatactatatcagacacaatctactgttatgaatctgaacatttttttaaaaaagagacacataaagtagtaataatttcccaacccagtgaggtggtgttttgatccagggacttaactttagtctctatatttagacactaatttagagtattaaatatagactacttataaaactaattacataaatgaaagctaatttgcgagacaaatttttttaagcctaattaatccataattagagaatgtttattgcagcatcacataggctaatcatagattaattaggctcaatagattcgtctcgccaattagtttaaaattatggatgggttttattaatagtctatatttaatatttataattagtatttaaacatttaataaaaaagttttagtcccatctaaacagggcctcagagacccgagaatgaaaaaccattggcacccaaaaccaccagacagccaatttcactaactttgaggtcaaccg

SEQ ID NO: 23629 - DNA, 718 bp, Oryza sativa
cctgcagccctgaaagaggaagtaattccgagatagtggtactgtgggtgttggttgacatctcaaaacctctccatcagcagtaaccgtgtaggtttcaggatcgacatcaattttcggaagtgcatcgtttagcttcatattcagctttgtcaaaccacgaacgcgacctacagcttccaccctctttcccagcttgtactgcactgcaacgccagcttctttagcagcctgccattaattgttgactgagaaatcagtagatgtcgttggtcaatgacagatatcaatatcggaaagataaatccaggttgtattcggtgagacggtgagtccattgatatctataacacatgtccaacactgtggagctaagccctaggcccacatgttagtgacacaccatgccatatttaaaaagtttttaattttccgctattgtttttatgtacaacgaatttctgggttgtgctgggcagctatacaaatgtatactgatatgttagtgaagcattatgcctacttacaaattatacatccattcttttctagatgatgtttaaaacatcagtaaaatctgacacaaattgtgaaatgtttgatcaattcttttctaatcataaattcataaaaactattaaaatataactaaatcaaagattttctatgacaaatctactaatgtcattttcacatatcaaaattttgatatttttga

SEQ ID NO: 23630 - DNA, 586 bp, Oryza sativa
acacacactcaagcttttaaccaagctcttacaagatcttaccaatgcaagtggaatggtgatgtacaccgactcaaccaagcaccccaatagaggttggatatatcgatgcctcggtaaacacttgctgtacggctgcaatcaaatctgtggagctctgggtaggcttaaatatgtagcaaaggaatagcaaatgctcaaatcagagaacgcaaagttgaataattgttcaaagtcaagtaccgtgctagtcctaggctagaacgtactaaagacgcgagcctagacacaaacggtaccacaaaatagcaccagaaacaactcaagcacactctgatgtatgaagttcagctcaaacaaaacaatattttctcttttctttctttcttctttcttcttttctttttttttccttttcttttctgatttttttttgtgcggcttttttttttcttttttttagggactcaaattgatgaaccctaagttcctctcgacactcaaggctgttgttggcccgatcttttggtgagttgtgataactacgatttgggagaaacgttgacgatccgactacaaccgtacg

SEQ ID NO: 23631 - DNA, 20785 bp, Oryza sativa
tagaatgaatatatatttcagaatgagtgaagcccacaatgatataactaactcgagtggtgatcagcataacaataagagcggttgtagttttgatcactaattaataatagtgatacacatgtgtcgtacacaacataatagcatatgtcatacatatgtatatataccattgcataatgacacacgcagatactaataatactaataagcttatttctttcctgtccataccaattagcaatttgcttcaccggtagggatcttggcgtatgcataatccatggcctctcccttgctgtccattgcttggcagtagtacaccgtggctgctgcaaagtagaacagctgctctgcaccagacagcagagcatagacgaccaagaggcatagccccagtaccatgttcttcgtgtacgcagcagcgaccaggttcaccgggctgacagctatcgacaagaggcagatggccaccaccagcacgaggccctccttcctcctcacccgcgtcatcagccgccacgcctgccggagcgcccggatcccgcggcgctccgtgtcgcccaccgacacggcgacgctcaccatgccaacgacgttgaagtagaggaaggcgaggaaacagaggacgaagaggaggacttgcacggagagcaccttgatcaagtagtgccgttgcacttgcatgacggaatagattagaacaccgaggagcgccatgtatgtgacccggagtacggtgaccatggcgatggttatgagaggacccttgagattccccttcatcgccttgcggaggagctccgggagcgagtagcggtcgccggagtaggtggaggaggccgcgaagaagccgacgcactgattgacgaagccaagcaccaaagcgacgagctcgacggcgacgacgacgaggatgagctgtgtaacgtcatgtttcagctcctccaggatcatgcggtactcggcgctggaagggtcggtggtctggagcttgattgcaagttcggccatgtccatggagagtggctggacgaataggacattggtagagaggacaaggaagctaggaagcgcgatcaggaggaagacaggtgtgaagagcttggggttctgagttgggaggactagggcttccttcaggaaggtaaagcatgatgagaagttagcgcttgttctggctgccatagcttacagtctgccacgaagctcgatggatctaccagttgggaggatggattggttattctaatatacaggattgctactaactggactacccaacaagggagacttggaaaattcagtctcaagtcattgttgccttaaattttacgctatgaagacgtggattatcttttgtgctgatagctcaatggctgaataaataaattattatttataataattatgcgaggatgcaacactactgcacaaatgatatttgcaaatggctaaaacctaattttgcaaacggctgggtggtcccacatccgccaacacgtatgtaaaagtcggtatttttccaagcgggcaacacaaccatacgtgaaaacaaattaagtcgcgtgcctaaaataaattgccaaaaaataaaaattccaaaaatcaaaaccctatctcgtagccattacaggatccactatgaggccacttgagtggacaccccaggtaatataccgtcgagtgtccaatatgaccaacacacgtatttggatgtgtgatccatacacgcataaatagccacccaaccttggagagcgctatcgcgcggctagtcgtgcgccacccgacacacacttgctagacgacaaaacaacctcctctagtctctcctctctttacacacacacacactttatatacatactttgtatactctacaaagtttatatatacgtatgtagtatatacatacatatatggcaaaatttgctacgggacacccaaaaaacgtgtaattagctgtgggacatcgtaaaactttgatttagctctaggacactcaaaaaaaggtgtaatttgctagaggacattgaaaccattattttattaattttaggtcaaatggagagagaaacaaccaaaaaagacgagtttgccctttagagccgaattgtttccccatctagcacttgcggcgacaatgtagatggcgctatgcagaggacagatccatggcggagcagtggagactgcatcatgcgtcgatgtccatctcctcgtctcctctcgtcgccggcagattcattgccatccaccacttgctgagccaccgcccccactggaggagctggagaggggctctcggggtgagcagccggccaaaatcctcggccttttgcccccctcaaatctctgacccgagattggaagttgcggcagagccagccatgcaatgtccctcatgcttgtcgtgctccagcttaggctcctcttcctcctctccagcctcatcatcaacaccatcctggcgtgccctccctccatcccgaatcctcagctggattggtagcaaaatcttttgttgttctcaatttatcaatagggtgttttaggcgatctgatgcagccacatgcttgcatagctcatcagaggagatcatgcgaatgccgccatcgttgccctcgccacggtggtcctccatggaggacaccacatcactgttgtatgttgttgtgtgggtcatgtgaaacgacggcttgtttctttttctttctcttttttacctgcagacaagaggaaggagagaggtctgaggggcattatcgtcttttaaaaaattgctctctccatttgatccaagaaataataaagtaatggcttcagtatcctttagcaaattacatcttttttaaagtgtcctaaagccaagtcacgtttttatgatgtcccacagctaattacatattttttgagtgtcctgtagcaaattttgcctatatatatatatatatatatatatatatatatatatatatatatatatatatatatatatatatatagcgctaaaccgcaccagagtgcattataagtaaaacgctccccacctctatcctccccacgcgcccaccctctcccacgcccacgttctttttcccgcgcaacaacctccctccgttccttttttacccaacgccgttccattttctttttttcttttttcgttacgccatattccctccgttccttttttttctccgtttcatttttttcttttttccgcactccgcattccctccgttcctttttttcttgttttttttctctttttttttctcatgcactctgctgttttccttttctttggagtaaaaaatttactaacaaattactttctcacctaatcttcttttagtaaataaactattagctttcagtcacactataactttaccagtaaatcaattactcacgtatacattattatagccaaatatatatatatttcggtgttatctcgagaaagaaattacttccgatagaaaaatctactctggtcttcactcagtaaataatttacttcacagaaaatctgctacatccactcagagaataatttacttcacacaaaatctactacatcccttatcacagtaaattaattattcctcgtaaaatttactcctatcttctttcagtaaatggattactttagaatggccattaatttttctggcttttcctcactcataaaataatgcctcctgccttttccaaataaatagattagttttaatctcgccacaccaacaagattgactctggtattctcttagaaaataaatttctcctagactgctctacccacaaaatttactacaatcttctctcattgaaataagttagtccctgactattagagtaaaatatttaccaacaaatcgatatagccaaaataaattacaaccacatttttgtctagtaaaaaactacagacatgtttacaaagattcagggacacagatacattgattctacaattaacaaaagtagactcgctattcctattgcatcggcagaggacaaatagtagccgatgatgaagcctgcaccggcaaccttagaagttctgatgggcaggacttgttggcagccacagcagattagctacaggtagaaatcgatggagaaggccaatgacggttggcggcagctagctcgtgcacaagcgatccccatcaagagagggatctgaaaaaaaacaatgaaccacaggggcttagaatgcgcacaacaatgaaccatgattacaaaaactaaattcaaacatgatcggtagaaatggtgaagtagtgagacttggatcttatcgacaacaacaatggttcgatccagtagacaatgctaggattttagaaagaagaaaaaatgggatttgtttaccatgctattcttcagctgtgcaaccaagtttgtactcctagcctgcaatcaatgacattgtgcaataattgtatatagaatctcctcttgttccagttccaaattcctcaacattgcacagaccaattgacaactaaaatataaaattcagaccggaaaagtaaggaggtgttgaatgcatcctgcaggaatttcattgtggtgagaaccgagcgttgctcggttggctagcatcgctggtgagcgagcagcccgcacgggttcgatccctgggatcgtcacccgcgcgtctcaccgggatttattcccaaataaataaatttccagctctcccgtgccagcgccacaatagcgcacaagatccttaggtggctttgtgtatctcattagcacgtgtgtgtgtatagttgataggtctagcatgcgtgtaggggtgtgtgtgtgtggagtgcgacgtatgttcagatactacagcttgtactcaaagtggagagctctcaaaaaaaaaaaagaatttcattgtggtcaggcttgttgctagactgctggtaggaagtcagagataaattcatttttttacagtgattgattggttccatatatggactgcacgtcatagctacggcaaataactattcatatattcatattagcatataactaagcaaatgcactatcatgcggaacatattcagacggatggttgtgatggcgtgttgaataaaattacctcttgatagcaccaagcaattttcgattttgaatcaaactaaaaataggtaaaaatcatatctcttcaaagcaccaagcaatttttagttctgaaccaaactaaaacaaggtaaaacgggttgctcttacctggcaacttgatagtcgtgccgaaagagatccttgcaacctgaaattataatccaagtttgtggcaatcttactagcataatagggcgctctctagcacaaagaatcaaaattgcagcaatgttaaatctagatgagagcataatcaaatcgtacaatgtttagaaaactgctcttgtcttttttttttcagtcatgaattggtgtgtgtgaattgtttagaaatctaacagtatatacgggacatatgggagatgtgttcgcaaattcatgtaacgagacagaagcaaattgaagtgtatggcttaatttaacccgtgcaaatcaaagcacagtaaggaagatgcaactagctagacaggggacaaatcgatctacgatggaacatgtatgtatgttatacagcacctgaacgaacacaagcaatcaccacatatccggcgcccgcaaataagctgcaattaactgatcaaacacggcaactatgctttttcaaaaaaacacaacagctatagcctatagatatcgatcgagcagatagatcatggagaaaaataaaacaccagatgaataaaacatcgtgacttccattgaacacatacgagcatccatccatccatcgatccctcaacataccaggtgaatttctttgatgaaagaacatacaaccacgtgaccacctcctcctaccaatccttggcaatcaatcgagtcgagggaagaaaatagacaaggcggcaggggcagttaccagagatgtccaagcaagaagccttaggtgagggccagacctcaccgagccagcggccttgaccgccatcgccaccaccgaccaccgttggggagccatggaggcggccaccatgtcgacgacggggagggggttgcagggcgacgggggccggtggctgagaaccgagcgccccacgaggttggcggagcggcgtcgcggcggcttgggtggagcagatcggcaagggccggcgggaggggggtgggacgagctcgaggcggcgacggcggaagggaagccggtggaggccgtgggcagagaacggcgggcgcccgtcgtcgtcgtggagcctgcttccagatccaggcgggggcaccgagatccgggtagccgagggcgacgacgtcgtcgaggtttctcgatcgatccgtgaaaaccggggtgggacgtggggtggtgggagcgtggatggtcattgttgtgtgtgtggggcctgggggctcggtgggtttttttgggaggggggcatggggaggggggggggttgtttaggatgtgatggggagcatcttagttattacgcatcgtaggtgcggtatagtatatagtgtatatatatatatatatatatatatatatatatatatatatatatatatatatatatatatatatatatatatatgaatgatatctatccatcctgttcttcttgtcttccagtcgaattgctttatcaaccaactcctgaaaatcctcatagtcatgagagatcaacataactgacagctcatcctttaagccttccaaaaacttctcctgcctttcctcgtcagtacgcacatcttctggagcataacgtgccagacgattgaactcatgaagatactctgccacggtacgatccttgtgcttcaaagccctaaactcacgcttcttcaaagcaacaactcctacaggtacgtgtgtcttcttgaatccttcggtaaactcttcccaagtgattggttgtcgttctgctctgttcatccggaaatgatcccaccattctgatgcagattagaaaaggtagaaggagaggggttacactaaagacaagaccttaaccaggttaacactgatctgatgtgtgtagaccattatattgttcaagttgattaagcaagcaacctagtatagttacacactcatcaatgaactactccaatgatgggaatgcaaccatacctacacacaaagcaaacaacaagtgttctaccctactaactattcttcaaagacactttggcggcataggttctaagatagattccaaacttcactctatctgaacacttaagattcgactatcatcttcttattcctcgatccacttgacttgcagaagttgacaacatcgacgtcttcgagtttctccatcaagattaacgactactcaagttgaaagaggaagggggaagaacgacaaaacgatttgcaaagaattctagataaggaagaaaggaaaattttcacaaattatgttttcggaagatttgtccttaaggtttgaccatttggcttatcctacagtcaacctggctctgataccaacttgtcacgcccgaaaattcactagtaatttccgaactaatttgtgcataaaatcctcgtccaggaatcagccgaggtacacaaactgacaatttaatatacaaatccatcttaataataacgttacatacttacaaaagaaaagaaaacagcagcggaattaacggtctagcgatggcttcagctccactcccacaggcagctcaactggggtataagccaaacgtcttctccttctggatcctttatcttcaactgaggtttgattgattattgcaagaatgagtatatgacatactcaacaagccacacagcaaatatgcaagtgcacaaggataccaaaggatggcataatataggctcatttgcaaaagcagcatttagcaaagagttaagagtagtaaaacagtagagtaattaattaaaaattttaatcaacactgaacagcacacccatgctgcacaggcccaaccatcctgaacaaccatacccggctgtacagatctaactccaaaccaggagctaagcaaattattaccaggtataacatccataattattgtgagaggtgtgagactaatcacgaaaaacattgctcaacccgcccataaccgcgggcacagctattcgaatagttttactctggccagaggtgtaccactgtacccacaagacacaaccccacatcatgtcaccatgtgcctcaataccaccacggtacctcggaaaggagttgtgacaataccccttgcacaacataacccattacagcgcacctttcctggatcataatcacccccttataaacaaggcatggactccccagcgacccccgtggacttctcgccacttctcagtctggcgcactataatgaatcacgctacacaaaagataaagccgttgcccacgctggcttgtggttagcacgataaatgtttcacaacagtagctcgcgaaccggtccttaattgtcatgagcacgaccttcaaaaccatgtgctcacaacccaccattaatcatattttaattaccaattaattatcataacacgattaaccatcgtgagctaccattaaatataaccataaataataatgtagtatatatgattcatcccattagtgagctaatgtttctaagcattgctaagcaattatatatataacatttagctgaaccaaaccaatacataaggttcaagctaatcaatttattacccaaggtatcaaggaatagggcattcaatgcaaattggccataacaaaggaataggttcacaccacccggtgacattcgaaaataaatgcacagttgaaataaatagagaatttaaatataggatcaacatgctcaaaggattgtgtttaggatctgtgtgacttgccttgcaataatcggtcttcaattaatcttcttgatcacttccgacgcactcacgaaccttcgcaacgacggaaacgacaagctaacacgcaaaacgaagaaaaagactaataaaaaccaaataaacaatacatataaagtaaacaaacatgtagatcatgattttagatgaatttagcaacttgaaccactcaaaaccgagttacgatgatttagttatgaatttccgaagatttaatctattagaaaaacgggaaaaagaaaaaccgatgatgtcatgatgacctcatcaatggccggaccaagatggcgacctcgccggagattggatggtcggctgcgactttggaggacatgaacacgtagaggacgacgagacgaacccaacggtactcaccctcgaaccaaacgacgaacgacgacggccggcgacgaggtctattggcggcgcggcttcggtcggcggtggcgacggggctccggtgaccggcgacagcggggagagagcggccgggcttctccacacctcggcgcaccttacggcgatgacggcgaccggcggcgacgacggaggcggcggcgcgacgcggatggagctcggccggcgacgacggcggggtggagcacgtggcggcggcgctacgaggcacgggagaccacgggagaggggcaaacgaaagaggaggactagggggtcctatttatagccttggattgaagagatcggactcctcccgcaagaaatcgatccggaaaatcaaaaactcggttttggagataaactcgaaaacgagttcgattcggataagatactcaacgattagctccgatttttgggggtaaagatagaggaggataagaggaatatttcccctcaactaattttagaaaaacacaaggggaaaggtcagatttggaggagaaaaaccgagccaaatcggtctcagttcggctgctagaggtagaagataaacagtgttgagggaggcaaattagacttttcgtcttgggctggctgaaaacaaagcaaagaaagaaagagaagggggaaactcggctgggccgactagggctgcacggctgtgcacacaaaagaggggggatgggccggaaagggcccaagactaggaagaggattattattacttttccaattaaattaatcaatgaaatgatctttgaattgttaaaaatacttccaatgctcaaataattccaagaaaaatcttgaacatacttggacactcaaagtacttaacaaaattataattagaccatttaatgattaatttaatatgtgggtaattactgaaatgctctttgtatgattaaaaattaggaattgagctccgaaaaaatctgagaaaattccagagagtataattaaccatggagaatttaataaaaattaaatccatccatgtcttaaatttaggaaattttatttcccacatttaacttcacttgtaaattaatgaacatttaatataaattctaataataatttattaaataatttataaatcctgaatcaaaaatcagggtgtgacacctaacaacaaaacaacttaaactcaactttacttcacaattcattattacatacataacgaattatatgtttgaatgttatatacctagaaccaaaatctaacaaaaaaaaagttcaaactcagttcaaacttgtttgaacaagtttgaacttattagtaaagaagttaatgttcatatctaaacattttaaaaaatttcatactcattcaaattgggtatatactcaatttaaatcttggagcctatactccatgtagcaccagttaatatatatatatatatatatatatatatatatatatatatatatatatatatatatatatatatatatatatatatatatatatgacagcgctaaaccatacccagggtgcgtaataactaaaacgctcccctcacaacctacccccaccccaccccccacccccacccaccggtagtaacaatctatcagcctatgagtaaatgagttgctaccactctcgcgcactgttgtttttcttccgacgtggaaccataggtaaaagaattactagcagattgttcacgaccaatattctttttgtaaataggttattggtttgtaccatccttctcttagtaaataatttattgccaacttttggagaacatctgatggagttataaagacttataggttatatatgttagcatatttcggtggataaatggtttgtcattgtaacatgaatagcaatactgtattgatacaaccgtatacacatttaacacgactaaaaacattacaacagggtattttgcgcatttcaccatcgtacagtaaaaatattagaaaaagacaatcacaaataaaaagacaatgggaaaaaatctactgatatgagcccagccccttgcacaggctaattacatcattgctgttagttcctttaactaactagagggcatcgccactggaaaagcatctgaatcagaccgcccacctacagttcagttcatgcatttcaggccagattaaggacggcgaacaagacatcattcctgtggcgccatcaccactggcatccatcaggactcgatcacttaactgtatacaatatatcctcctgttccttttcccagcttcctgaacataatacagtgaattcacgaatcaaaagaaaattcagatgggagcaaagaagggggtgctgattgcatcgtgaaaacaacactatatcaatagacctgatcatgcaaccatggttttgatcactgcgaaaaccatgggcgtgaaagaagtgtagaaaagaaagaagaacaggagaaagggagcagaacatatcgacgctggaggtgatgccgggcgaatggaatcgctcatggtgttgtttgtctagaacctgcacacaagcaacaacacagcaccaacaagcgttatcaaaatgaggaaaaagggtttgagcaaggtgaccttgtcctcggtgaacatggaacggggaaggagtatcttgaaggattcggcatccaccaagaaccgacatggcgctgcatcaataaaacgagaacctcccaggcggccattagttcagatgtgaggaaggaaggaggtgcaagctgaccacatgattaagatctagtccaccaccatcgataccaagaacgcctcgctgcctcgaccatgccggaggcgacgcctggatccggcggcgggggatcacaggcacgcgatgaggtggtcgccccctgccgcgccgccgcctaggctgccgcctcctgttcgacgaagctgatgccgaaggtggatggccgggcggacgatggagaggcctcctgatccagttgttgccgctatcgcttagagaggagctgcattgatgtgcgctcgatccgccgccgaggatgtagcccaatcaacgttgccgtcgaggtcgatgccgccgctcgatctgttgaggcagacctccgcatcggcactgccgaggtcctcgtcacatccggcgacgaggagcggaggatgatgcaacaggaagggggcaagggtggcgcctgatggttggatggcgtccaccgtcctgttgccaactcacaactggacgacgcgcctccacacctccaacgccgacaaccagcccggatctcgcccgccgttcgccgatcctaaaaaaaaggggtggacagcgacaggagtagaaggcgatggtggcggcgctttatggacgggggaggtggcggcaccaagggaggcaccgatgtggacggggagggtcatctcggcggcgtcgaagccagctctacctcaaacccccgccgctggatccaggcggaggacgaccgccgtcgccggatccgggcgagggacagccccgccgagcccgtcgcccaccgttggcgcaggccatcgtcgtcgctcgctgctggcgcaggccgtcgccgtcgcccgccgccggaggaagctggagggaccccgccgcctgccgcccagcacaccgaggaggcccaagccggcgaccgcctgccgcacccgcaggccgtaatcgtcgctgccgatccataaaaagtggagatggaggggaaagtgggtgaacggtttctacgagggagagggagggagtaaatatagttagcagatagagttgataggaaaaaatttaggctgggttcgtttggacgttttcccagcgcgcgctacagtgttttgcccccgcgcacgctttttaaactactacacggtgtactttttttgcaaaaagtttctatacaaaagttgcttaaaaaaatcaaattaatctatttttgaaaaaaaaattagctaatacttaattaatcacgtgttaatgaaccgttccgttttccgtgttactgtagcgcgctgggaaaacgtccaaacgaacacagccttactccgttaagcgtaggtgcacgggaggtaggggtgaaaacggggcgggtattacccgcccgcccggccgtattatttcgggacaattttgggtaaaaaatttgggtacccggaagtttctacggatagcgggttcgaatacgggtattttctatcggatatgagatgggattcgggaggacggtatccgacggatacggattatctggtaaaaatacgggtattacccggttatatatccggataatacccagataacatgcctagcccaataaagcactagtggccaaaaggtccactagtacaatgaccaccatcaaccaggaaaccatgcctaacaacccaacaaccaaaaatactaattactgttcagtgttcactaatcccactaagcaatgacgccgagactacgagcgccactggtgctacggtgcagcacccgtcgcgccaccacctgctgcatccgttgagctgcggccaccgccgctacatgcctttgctgccagctgatcctcatctctttaggaacaggaagtcagcagctcatcacaagtcaggccgagtttagttccaaactttttctttaaacttccaatttttctatcgtataaaactttactacatacacatacttctaacttttccatcacatcgtttcaatttcaaccaaactttcaatttttccagttaaaaatcgattgttccttgtcgtattgctcgtatatcttaaaccctaataatatagtcacattatggatatatggggatggttgaatatatagctattgtctatatagtatagatgatcgttgctttgacgtgatacccgaaaagatatttgtaaccgatagtggtcgtatccatctaggtacgtattcgtctcatatttgtgcccgatattatccgtgcttgtatccgtattcgatactatccgtatccaacccgattccgattataaaatgtgggttaggatatgggaagagtgagatctgaccgaacccgacccgatttcacccctaacgggaggggatttgattgggggggtgttgcatggggggtggggaggggtgggggtagggtgtgagggggtagggtgtgtggggaagggtgggggtatactgatctaaagcagtcttcaagaaacccactaagatttgaaacctgcattaccccgggtacctgggcttctgtccgagacagctgggtcacgccagctagcccttggtggaactcgggctgcctgaaatagcggcacggttctgcttttgcccgtttagctaaatcaggtggagcgggcatgtttgacactcgtccaagacggcaccggtggtaatgactcagcgctagaatggttggggctccccataaacctgtttcatttataaaagagaggactgcttcacaacagcctgtgtagcacgcccatcaccccaactggccctgaggtcgcgccctcgcgctttttgtcatgattcatctattctcagacgagcttctcgaagatgtctttgatgagtagataatgtagttattttgtatgtttcgacactcttctttgtagaagaatgcaaaaactacaaggactaaggcgtgcctggattccaggacgaggctggaatcgaggaagaccttggtttataccttctaatcatatgcctccaccctccactccttgcaaaaagtgtgacttatgaggactaaggtgagctcgggatctagaatatggtcgagtctgaggcagaccttagtctacttcttaagatgtagatcttatatgtctctacgcttctcttactgagtagcgtaggtcttataaggactaaggtgagcccgggacccaggacaagaccgggtccagggcagaccttatgttacattcttaagacatagattttatatatctcaacactcctcttcacaaagcagtgtgtaactagacgagctaactaagctcgagacccagagcaatgccaggttcgaggcggaccttgtgctacatacttatcccataagaagatgaaggtgggcacggtacccaccaagataggacccctagccgcactagtctgggtgtagctttttatttttaagaatggtttgagcatgccatttattttatttgtaattgttttgccggggaaatgggtatagttggccataaggccggaggcccgatggcccggcccacggcacgggattttggcccggcccaagcatggcacggcctggtagcagtcgggcccgtccttgggcctatggctaggcacggtgggctggcccggcacggcacggaccgaggttggcacgatgggccggcccggcacggcacggcccaacggtcggcacgaccacggctcgcaccaacggtaggcacgagcacggcccagcccaacagacagaggcaggccatggcgccgcaccgcgcgcgcccccatatataagcggcgtcccctccccagcccaccctcgctctccgccactccaccctaacccaaaccctagccgccacgccagcggcggcgcggccactgctcagccacctccgccgcagcgccgctccgcctccaccgctcccccgcccaccagttctcctcctccaccgtccgccgctccgcctccgccgatcaggcgctcaccgacaccgagtcgcctcccttccactcttccagatccagccttcctcttcgtctccgatcgatgcctcgcctgacttgcacgaggggcgcatgaggtccactggccatgcatggtcgcctgagtcgccttccttccactcttccagatccatccttcctcttcgtatctttcccttttgttcttctttgtcagatcccttggtcttctcgtggattcgtgagcctatcgtcttcaacggcaactccggtgctccggctgcgcaggtacaagcatgaaacccatccttttttatctttcttccttctccatttccgagccctaactttgagtgtgcttggctgcttgcaggtcgcaagctcgttgcttagcggcagccgccgttgagggaacgtagtgcccgcgatggacgacgatcctagctcaatcaactacgagttgaggactatgtgcgcggtgatgatgattatgatgtggaggaggatcgtgtggaggtgtacggcaatacctctgacagcccgatccgtgtgaatatcgacgacgacaacccaccggttggcggcagtggcaatgggacaccgactggctctagtgccactgctaccaacaagaagaccaaaacctccatggtatgggatgactttgaggaattttatgaaacgaccaatggtaatagggttcgtatatcaagtctctgctaaatgcaattactgtcataaaactttgagtgctcgttcttctgctggcactggacatttgcttaggcatattaagtcatgcaaacctagaaggcttgggtctaatgctttgcctcagtccatgcttagatttaatgcagatggttctgttattccatgggaatatagtcctgaagttgctagggttgaattgtgtagattgatttctagagaggatcttccaatttgttttggtcaatctcctacttttgtgaactatattaaggctgctcataaccctagatttgtttatgtctctagacaaactactaccatagattttcataagttgtttaatgatcgtcgttctattattgttgagcgtctcaagtctgctagctctattgctttgacatctgatatatggtctggtcatgctaaggaagattatttgagtgttgttgctcattttgttaattttgattggcaattagagaagagggtcttgggtcttaggcgcattgatgtgtcacatactagtgctaatattgctgagcatgtgattgcagttgctgaagattatggtatactgataaggttttctctattacattagacaatgcttctgctaattctaaagcaatggaaacccttactcctgctctgtctggttatgttgctgatttatttttgcatcaacgctgtgcgtgtcatatcatcaatttaatagttaaggctggacttgacaagttcaagcccatgctaagtgacattagagctgctatttcattcttgaatgcatctaatcagcgcatagctacatataaaaatgtttgcattgttgcgggttatcatcctcgtatgtttgattgggacatggatgttagatggaattcaacttatataatgcttaagcatctcataccacatagggaaccattcacagtgtttattagtacgcaacatccttttgttaatggccatccattactcacaaacttacattgggcatgtgctgaatctgttttatgtttccttgaacagttttataattcaactgttgttttgtctggtgtttattatccaacatctccattaatcatgcatcacattttagaggttgctggacatctaaacacttatggcaatgttgaaaaccttgcaaatgctggtggtcccatgaaagataagttcatgaactactggtctaaaattccaattctttattcatttgcatttatcttggatcctagggccaagatcagggggtttagtaaagtgcttcagattatggctcaactcattggtgatgattactctgcttatttaactactgttagggctgcattgtctgatacttttgctaagtatgaaagtaagtttggttctgttagattgcatagttccagtattccaggcccttccactggtaagaaaaggactacatgggggaagatttttggttctgttgctgctggtgccagtccaggtgttgggcttggtgctggtgctagtctaggtcctgggcttggtgctggtgccagtccaggtactgggctcggtgctggttcattatctaggatgacatctactactgctttgcttcagacagcttcttcaactactaatctcaatgcttctgaactgtctgcatatcttgacagtgacacagtcaaccaatatgatgatgacttcaatatccttagctggtggcaacagcacaaacaaacttatcctgttctttcaatcttagctaaagatgttatgactgttcttgtttctactatatcgtccgagtctacttttagcttaactagcaggattatcgaggaccgtcggcggcgtctaaaccctaggctggtggaaattctggtagtgctcaaggactgggagctagcagatgcaaaaggtcagcatactactgagaatgtggagcttcaaaatgcttatgagaatatgtatcttgatgatgaaattgatgtaaacccttgaactaaatgattgtaattgatgtgaacattttagctgtgggctgtactcttttcctttctagggttttctcacgaggtgtgagtttttacctagaaaggtttttaatgaggcagccattgcactaaggagcttatataaaccccttttatattctgactttctgagttctgtttgtgattctgtgattctgtaattctgagatggacttgatgaagcatagtagatgacttgatgactttgatgaattgatttgaaatgattgtaaatctgtgacttgatgaagtgaagtgattgtaaatttatttgatgaagtgattgtaagtttgttgaatggttgatatatttgatgaagtggttgtcaatttgatgaattacatgtgaatttcatgaatttgatgtgttatgacaattttttgtattgaattgaactgttgaaggggttttttttgccagggcgtgcctgggccggcatgggcacgatgggctggccgggccgtcgggctagcccggcacggcccgaggctactagggccgtgcctgggctgtggccgtagcccgtgggctggcacggcttgttcgttgggccgtgccagcccgactgacctcagcccaggcccgatcgtgcttgggccatgccatgctgggcggcccatatggccaactatagaaatgggtaccctggttgtaatttcaccaacaatatacaatatatatgtataatttttatatgtattttttatgtataataatatacacgtacataaagtttgtatacgtatgtgtacaatatatatgtacatatttaaaaaaattggaataaaacaagaaaacacgtatacaaactttgtatatatacttatacaaaatttgtatacacgtatattaaaaactgaaaaaaaaaccgtaaaaaaaagaacaaaaaccaaggaaaaactgaaagaaaccaagaaaacaaaaaaagggaaaaaaaacgccacgtgtcgtcaccgcagcgttccgtggcgccatgtggttgcgtcgcacagggggaggcatgcaaccatctgccaaatatctttttcactcatcctcagtgtatccacaatcacggttgacacctttcaatatactaaccacgatgccgcatggtgagtaagagagacattcgatggaatagcttgtctgtcaacttcaacctaatacatgcttgtcaaacaattcgaaggtggcaaacaaatgtgttgcatatctaaggagacttgaccaaaatactacatttcactattatctcaattactcagaaaccttactcacgcttagctagtccccagcaaaagcgaccagcctcgtactttcatcgcaagcaattgttaaacatttttttctgaacgactcgcacgagaaggtgcgaagttccattgatagagcaggaaaaaattacaagattacaaccctggagggtcgtaaccaggaaaaaggaaaaaatataccacgacccacacaccgacatcgccaacacacaagcccaggataagactagcaccagaccggccgctgctaagcatgaccgaccgccactaggggacacagacaagatcacctcctagggatgccaaaacgacgtctttaagaagagaagtgacagaaaaactgccgccatcgtccgtcgggactcaaaggagccaagactggactttcgcccggcaaccaccctcgaggggtgagagagcacgacaacgccctcaggagggggaatgaaccatcgttgtcaatccggccgaggccggactaggttttcacctgccactcaccacctgcgaatccacggctgacgcaccgatgctccaccaccacacaagctctgccgacatgtgggacccctgcaccggcatcccccgctggccagccttcgtgcgccgaagaccacaccacacccaccggcagctcctcctcacacctaggtcgcctcctccactgccggccacgcctctcgtgccaagccggcctcctccaccaagacgcgcctctcgcgccaacccggcctcccccatcggccgcgcctcttgaacgcgctgatgacgcctagagggggggtgaataggctgtccctaaaaacataa

SEQ ID NO: 23632 - DNA, 16309 bp, Oryza sativa
  unsure (1)..(16309): unsure at all n locations
aatcgcagcggtaaaattcaaacagacccggaacttcctggtaaggaactccggaacttccggcctcccaagcccggaacttccgggtaacagaatagaaatgaaattcaaatttcgaaacaagagactaagccaatcttcacaagatggtgcacaggtattctaagcagaggatatatcatagaatcatctacagaaatatcacagaaagagacaagagcaattttttttcccgaagtttggatcttgcgatcctactctccgttgaggagctccaaagagctgggtctcgattaaccccttgcctcacttgtggaaaaaccccagaggaaatccacagccttcaaccccaaacacccctcggcaaatttctagaattgagtgaccaccaagatcaaactcaacctacttctagaattttgacaggcgggtgctggactggagttgcaacaggacgtggagcttggttgcggttgttattgccagcattgttgttgtagaactgacgctgtggacaaacaacatatgaagatcctccctgtgacactgcctgaggtcccatagtgagacgcggcctctgactattcccttgctaagctttgaactgagcaatcctgcgtttcttctgttccattgggttgtacttatcctcctgacgaatggccttatccaccaacttctggaaatcagaataatccccagtcattagcgggtaagaaagctcatcattcagtcctgccaagaaattctcttgacgctcttcatctgtgcgcacatcctccggaacataacgggccagacgattgaactcatgcatgtactcggtgacagaacgggatccctgagtgagcgccctgaactccttcttcttgagagacaccactctcgatggtacacgagtcttcctgaaagcagcagtgaactcaagccaagtgattggttcagcagtagccctgttgagacagaagtgatcccactactcaaaggcagggccatgaagctgatatgaagcaaaggagactttttcttagttagtgcactgaagcaggtccaacttcttttctatggcgtgtagccaatcaccagcctcaactggattggtagtactggaaaaagtaggcggcctcacacgaagaaattctgctaacttgttctggggaggagcatgattgttcccctggttttgttggttctggagttgttgcatcatcatgttcatgagttgcgcctgttgagctaggacttgggcaagcgtgagattctctccattgttgttgttgttgttgttgggcccatttccattgctgcgggtgttcaccatctggcataggcaagagcacaagaagagaaacaagggagaaagctacttaggacagggaattaatttctactaacttgacttttattgatcttaactgagtttcattattacataaaactgaagactctcacaccacttaactcaaacttcctaacactcgaaaccaaacaaacgcatgcatttacatcccaccaatgatgtaaaccacatgcaagacccacacatagccaaacttaaacaagcaaactaacacaacgaactaaggcaacgacttaacaagacatctagatcttcctggcatcggagttgattgaaggctcgttcggctcgttctcatcatcttgagtagcaccccactcaacctttgaatgggtgcgctttgaatcttcttcctcctcatcacttaaattaacgaccggaggatccactgggactgggacagcttctcttgccaccacacgaaccttgggcaccaactggtagcagggaacaaaaagagctctcttccttgcagtaagatgaaccctggccttctgtggtggcgcttctcccttcaattcggctagttccttctccagacgatcaaccttgtcctctagcttgcagatcttaccacggttccgatcttcacaagcttgagcagctgacacaacttcagcgcgggactcatccatggcccacagcatctcgaccaaatgtcttatggtagcatcattctcaattccttcaggatcaacatagctggcacggtcacttccctggggctgacgaggatggcaacgatactcagtgtcggccaacagatcattgtaacggtcacggagctctcctatggcgatccttgccgcctcctgacaagcttgaggatagcttccccctccagcctcgaacatcatcgatgggatgtcttcacgatcactgttcaaggtgaccatgacacggcacttctcttcatcacgatcatgaggaatctgggcatacaaaggggcagtctcgaatcctatggtaaaggacatcatacgcagctcctggacaaatccctcaataccgaacaagtgctcaggcttgaagcgtggcatctaaagacaagtgaaaggagggagttaagacatttatccaattaatagcacaaggttttggattaaattgaataaagttagaaaatcgaagtgaaaggtaaataaagtaaactaagataagttggaacagttgaaaacaggatcacaaatttttgcacttttgaataacaggtttaaaaaaaagctaaaataaaagagagttataaaatcaacatgctaagtttattatattgcaacatgattaaataaaaataatgttgtaaaacctttgctggtaaatgagtcattagtacagtaatagatgtacagtactaacaacacaggaataataagtaaatttttaatgagaacaattaaagagactataatctgcatgtgccattagcttggtttaattaaaagagaaagagagaagaacagttctacttttttaatatttttagagggcttctataggtaaccatttggcataacctagggtcaaggaggctctgataccaacttgtcacgcccagaatttctatccaaaactccaaacacttacatgtgtgtaaaccctcgtccaggaatcagtcgaggcatacaataacaaattgataatagagtgcaattattactctaattaatagacggatataaattcattatagagatagatagttcctcttaaacaataaagatctaagcagcggaaaataaaataaagagcgtaggcgactccatcccacaagcagcttgaccagggctacgcctaatcctccacaccttcagcctcactgtagaactcctctgatgaatggttgcaaggtgagtatatgacacactcaacaagccacgcagcaaatattcaagtgcaggggataacaaaggatggcataatatagtctcatttgcataaatggcaatcaataaatacttcagaatttagaaaaacagtaaagcatttaattaaacaatattaatccaacgctatacaacatacccgttgcataggcccaaccattctgaacaaccattcctggctgcacagttctatctccaaaccaggaatataccattctaaaccaggagctaaacaagttattaccaattacagcatcatttattatggtgaaaggtgtgagactaatcacaaaagacattgttagacccgcccataaccgcgggcacggctattcgaatagttttattctggccagaggtgtaccactgtacccacaagacacaacctcaacatcatgtcaaccatgcgtcgcgatacttaacaagaacccgaatagagattgtgacaataacctccgcaaaacacaattcaaagcagtgcacctttcttggatcataatcacccccttataaaacaaggcatggactccccagcgacccccgtgggcttatctccgccacttctcagtctggttccccacaatgaaccacactatacaaaagttaaagccgttgcccacgctggcttgtggttggcacggttaatgtttcacaaccaaaaatcgtgaaccggtccttaattgtcatgagtacgaccatcaaaaccatgtgctcacaacccaccattaccatgttttagttggcatcttaataaaccatcctatcacgattgaccatcatgagctaccattaatcgatcattaagtaatagtgaatcattagttatcccattcatatgagctagtgtctctaaccatggctaagcatcctaattactttagctaaaaccatataatgttcttgctaatccaatttgtcgacgtttgatgtcgcaattctggtatttgcatagtatggggatcgtcggtgctaggatatatgcgagactgaggtaataaccctacatcctgtattgtcaggtaataaccctacatcctgttggccgaagccggtattgctcttattcatgataatcacaccagtataatatttggggtagcctatctaactgttgtcgacatggcggtctgactcgtagtcgacaacagggtagcctttctcctcgaatccgtgcccggtaagatcagagatagcgctttcgtctctcctgacagtatccggagacaccgtagggtactagccgtgcttatccctgaagtcgatatccggcggcgtgtcttggcgtatgtaggcttccatgttgtggcttctatctcgattatgttgagtgttgatcctccatggtgggtgccgatcgtgttgatcgtctcctctcccctcttctccttgggggcttgtatttatacccacaggtatccccttgtccaagtagaactagtgaaaccaatatagatacaatccgagtagtccttgtcgttttcatgtagaactctggttgtcattccttatccggaactcctcctatatccgaaggtgcttccgtataggatatggtatatagtgggtcctgccgagatttagtcaactactattaggtatgtggtatccataaccctgacagtagcccccgacttcgatgcaaatgaacgagttcatattctcaaccgcagactttggaggaactgttatcgagctcatgtgaccgttctcggtgagtttagagataacgttagacttcctctatcagcctcgtgcgggcaccgaaagggtttgtctaagtcaatctctgatgtcgaccgagaaagtacagagcgtacgactaagtctcccgtcttgctgtaatcgagaatttggattgaagtcaagaaattttatctcggcgggtacaccatctcttcattccgtattcctcaacaatactcagaaaagaatagaattttcctgaaatcaatactcagaaaagaatattagatagaaataacccctgagcgaatgctcaaagggtgacatgttataatatgacagattagtgaattgaatgtacagaccagtgttttgtatatgagcgtcttctctcttaccgactccaatcagtcagtttgcagagtcatacactctcccttgcccctagccttgtcgtcggagaatcgttctcggatgacaaggctcttggacctttgacctgcctcggttgaacaagcactgatcctagcccccagccatgaagttggaaaactcaatttccgattacacggcttggttaatacgcacggcgagaactcttacactaccagatcttacatggtctttcgtctctgaaggatccgacaaggccttattggctctgggcgtccccagccgaagttcccttaggttcctcggaggccttgtcatgacagcgtaaagggacaatatgataggtttcaacgctaggtgtcttttgtgtaagggatctctgggtaaaacacttggcgatcttgtgtacctgatatcaactttgttggagtacaggtaatgggagaatcgctacaccgctggtcgaggaccaagcagtggtcgtaactcgaccacttaaagtggaagtagtgggagaatcgctacaccgctggtcgaggaccaggcagtagtcgtaactcgaccactagaagtggaaatagtgggagaatcgctacacagctggtcgagaaccaggcagtagtcgtaactcaaccactataagtaaatgtacgagagatcgctacgattgactggttgagaaccagtgagtaggtgtccctcgatcatttgaattcgtggtgcgaggaccgttgtgttattgctgtagtcgtacctcgaccatctaagattgcggtgcgagagattgctacgtactggttcgaggaccagcgaacgcgcagaatcatctctcgacactaatggaggttgcggtgcgagagattgctacgtactggtttgaggaccagcgaacgtgtagaatgatctctcgaacaccaatgaaggttgcggtgcgagagattgctacataccggttcgaggaccagcgagcgtgtagagttctctcgaacactaatggaggttgcggtgtgagagattgctacgtgctggttggagaaccagcgagcgagtagagttatctctcggacaccaatggaggttgtggtgcgagagattgctacgtactggttcgaggaccagcaaacgtgtagaattatctctcggacaccgatggaagcttgcggtgcgagagattgctatgtattggttcgaggaccagcgaacgtgtagaatgatctctcgaacaccaatggaagtgctagagttggtttattatgtgcgtctcatgtggccagcatgactcacgcacccaacttgtagcatatccggatgtccgttcacaatcatgtcaggtgatcaagccgacgacgttcgctaggaattatccgttaacaaccttttctcgagtagtccagcgatgcncaatgctatgagataggtcgtcggtcttcgttggtaggttgggcgcgacgactctgcatttgttgagatcgttctcgataatgtggtgtactcgaccacaacttactcgagtgctcaattgttcctgaaaaatattttctagagggcaggatatatagcagagaatatcgagtatgtactcaaaaaactgcatggatcttctagtattatcaggatataacgagcagatgtaaatgtcagggcattatgtaaaccgtaaacaagcatgatttatacagaagaagatagagcgagcccctagcgttagatcgtagtcgatttaacatcggggacacccgcgcaaccgatattattgtataaagaacatgctcttggaaaacataacaaatcatggatctgacaatactgtatgagctgaataggtacgataaattgcagataaaatattgcgtacctttgtagatacatgccggatgtatctacgaaattagtagatcaatttgaaaaaccaatctaccaattaccttattgcgtactcgttcgacatcatatgatctgacatcttttggtacgccgcgtatcttgaggcttgaatgatctcgatagaccaagttgtcaatgacgatgatggtcccgatctagtcggaagatgtacttggacaagttggatcttcccacagccgaagtcgtcgagtagcttgttgttggagaatccatcttttgaacccatctcgtcgaaatcctgaagcaccaaaatccccctacctagcacgccactgtcgacgtttgatgtcgcaattctggtatttgcatagtatggggatcgtcggtgctaggatatatgcgagactgaggtaaaagagatggagacagggatttttatacaggttcgggcccctgaattgtcaggtaataaccctacatcctgttggccgaagccggtattgctcttattcatgataatcacaccagtacaatatttagggtagcctatctaactgttatcgacatggcagtctgactcgtagtcgacaacagggtagcctttctcctcgcatccgtgcctggcaagatcagagatagcactttcgtctctcctgacagtattcggaagtcgtgcttatccctgaagtcgatatccggcggcgtgtcttggcgtatgtaggcttccatgttgtggcttctatgtcgattgtgttgagtgttgatcctccatggtgggtgccgatcgtgttgatcgtctcctctcccctctcctcctaagggggcttgtatttatacccattggcgtccccttgtccaagtagaactagggaaacaaatatggatacaatccgagtagtccttgtcgtttccatgtggaactctggttgtatatatccgaaggttgcttccgtataggatatggtattagtgggtcctgctgagatttagtcaactactattaggtatgtggtaaccataaccctgacacaattattaaccaggtgacaaagtataggtaatcaataacaaaatggctataacaaaggaaataggtcatttccacccgatgtattcaaaaataaatgcaatagttgaatagaaacaatagctttaaacaggattaacatgctccaagggttgtttgggatctgtgtgacttgccttgctagccttggaattcttcaaagtcttctcctgcaaaatcggactctccaagaacgtcggaatctaagcataaaagagtaaaatcaccaaaacagtacacaaacaatcataaacagcacatgtggatatttttaacatgtagatctcaattttagaacaatttagagacttgaaccaactaaatccgagctaagatgaattagttatgaatttttaaagattaaaccggattaaatcatttatatagattttaattggattatgatgcaataaagaattatttttgaaacggaaaaaggatttattgcgtcagcggggctcgggttcatggtggaccgagtgaacagaagcggtctacggaacgaacggctgagatctaatctaaacaaaacgaacggccgagatctaaccgacctaccacgggtctacggctgacgtggcgctgacgtcgacgatgatgtcattgccgacggcggctcggcaccacttgctcgccggcgaacgacggcgcggcggcgcaaacgaactgcacctacgggtagagggcgaagcggcgaactcaccgagggctttgacgatgacggacgacaaacgacggcgacggcggcgagggcgaggcagcgaagatgttcgggtcgacgacgacggcgatgctccggcaatcttcggtggaaacggagtacgggacgaggacggcgacgacttggtgatcccgacggcgaccttcccgagcgacgacgacgaccagagcggcggcggcgcacggctggacttgcggcggcgacgacggcgcacgggctgacgcggaggcggcgctacaagcgacggcgggcttgggtgaaggtggcggtgaacagaggaggtcctgaggatccttttataggggctagggggcggcagctaggcccatggcgtccggcggcggcttgtgcgcggctagggcgcggctggcggtgggagatggaagacgaccccgacaggtgggccccacccgccagcgggagagaagagggagagagggcggattggcttgatgggccgacttgggccgagcgcgagcaagccggagagagagagagagacttgggctgacttttggcccaaaaccaaaagaaggatttttaaacctttttccttttaaattattcatgaaatgcaattccatttattataattactttcttggctcaaataaatccgagaaaaatctaggaactaatcaagtgaagtatttgataaaattttatctagcccacttttatatttgaatttattacttaaaattagatcttttcttctaggcttttaaaatcatttctaataattccatttaaacaacaatttataaatttgggatttttaggatgtgacatctaagctaggtggaaagaaaagagaaagagaatctattcccatacttctaatatacatagtatacatacattctagttaactgatatactagctaataccctctatccgatgccctcctagtacttcgagaagccacccctgactgccgagttccttacgacagcccgtcatgaccatccaaccggggctaaatacggaggaataccctccccaggaaattaacttaggattatatataggcgcggaggaatactcgtagtgagctatcaccatcagcggctcacctcttatccgcaatatgtaaccccaaataatgatatcccgtaatctagacaccacgcctaaactaccagatactactctaatatcatcgtcatgacatagagtaattgcataagcaaacactatacccgcaccaaagcatctcccagattagctagccgtatattcagtataacatgaacataatgtaaagttggtactcatatactcagaaagtatttcaataccagaaatatatttagaagagtattcggataaaagtacaaagcttacaaaagaggaaaggaaagctactagagccatacccgaactcttccgaaggcttccggactcctgattcctattctaattctattccaccagctagataatactaaactaaacttgagaggaatgagagacctcttgcttgaggtgtgtgagtgcagtgagaaggtgaaatccttttatagctgaactatgacagttgtgacagttggaatggtcggtaataccctccaaccgtcattggggcttcatctccaccgtccagccaaaacctggggctggcccaacccagcccaatttcggctggcggcctcctctactgctttacttcgtagactagtgaattttggcctgattcatcgtgtcaagtctgcgttcttcgcccattcatacataagtatggttctcaacatcgtccgattgattcatcgtctgagttgatgtcgattctccttcactttattgtcattctctgcaaaaggttagtagacctaatactagtggaatattattattctaacatatttatgcattgcaagcatcactagttctctcctgttttagtaatattgacagtcgaaactgatcgataacgaccgtcgacaaaaatctccatcccaaacttttccagacaggcaatcaatcccgtccatctcccaaagagctaaatcggcactagcaacgttaattgacctgtcggctggcacgatctcaatcttgtcaccttgccattgaatcaagcactgatgcatggtcaaaggaatacatcaattagcgtgaatccaatcccttccaagcaataggctataagaacccttcccatcgatgacaaaaaatgttgtaggaacggtcttgctactgactgtcagctccacctttggtctccaatggattgccgccaaaatctttgagaaccatgtttgttttgataagatcatctgaatttctgcccagcttcctgaatgtagcctatggcatcaaatttacagcagccccactatcaaccatcatcttagacatcggcttcccattgacaaacccgttaacatacaatggcttgagatgccgattctctgtcccctctggtttctcaaaaattgcttgctctggcgacaaaaccaatctagcagaggcctcttcaacatcatcaacatcggcttatctggcgtcaaattctgcaggtaacataaacaccatgttcactgatgtagatgcgacattctttcctctagccaacctttttgctttgtcggcctcaacttcatcggctgttgcaatcttactcttgacacgccactcatgcctgggttttgtcttttttagccaatgattgatttcttgttctacctcctggaaacgctccctgctcctcatccgttgaaccctcctcttctgattcttcgtgaaaataccagaagagcaccattgcatcttcctatcctcgttctcatcttgatgacaatcttgattgaccggacccaacctctaatgaacaggaaccctcttatcactcagccgattgcttctatcataagatcggcttgaacttcctgcgttgtcattgcagccagggcaatcttcaattgacggcagcctcatcccctcattctagcaaaacctgaagaactcacaaccctaatgaggaccaaaaccaccatcatcttgctcgtagtacttctcctgttgcttatcatgccttttctgatatttattgatgatcttggctgaattcaactgagaacttcgagtttttcctccatcagctgctctgccagctgtgtgcaccatgttgacgagaaaaggaagtctctccaccttcatcggctttttagaatcatcaaacttgatctttcctccttcaatagccgtttggatctgctgcctaaagactttacaatcattggtagagtgggaatcagaattatgccacttgcaatacttccttttccctagctcttcagccgatggtattatgtggctagcaagaagttgtatctgcttctcccgaagtagcaagtcaaaaattttatcagctgtagtaatatcaatgtcatacctctcttcctttctagaactcggcagtccaccgggtaggtttgtttatccttcctttttcgagtgtcttcttggatagttatagtggccgataggcgcagaatctgatatggaaaacagtgctttctgataactaatcactggaagcacccgattctctctactctgtttcacctctctttcttttggcttcttcttgagaatattttcacgttggatgaagggatgggccctatgctttttgcattctagttcaatagtttctttttgatttacagatcaaacaaaagaaaaaacattacagaaactcaaacaaaataaaatcacacatataaggatacacgtgattgatcttcttgaaacttttcttagcctccgcaaacctttgctcatgcatggtcaaactttcaaactcctgcgatgaaaatttctccttgatcggagctatcaaaccctggaacgcgagatcggttaactgggaatctgtcaaagacaagctgtaacacttgttcctcatatctctgaacctctgtatgtaatcttgcacagtttcatcatgcctctgcctaaccgccgttaaatcagagagcttcatctgatgggtcccgttgtagaagtaactatggaattgtttctccaagtcgacccaaccttgaacagaattgcagggcaatgaagaaaaccgtgtgaatgctgatctggacaaagacagaggaaacaaccgaactcttaaagcatcgacagccgatgcttctccacattgagccaagaatcggctgacatgctcgtacatcgaaatgttgttttgccctgagaactttgaaaaatctagcactttgtatcggttcggcagtggaactctctcaaaccactcaggataagggtgctgatacaaatttccaatgtcttttggcttaagcccaaactgctccctcatcacatctgcaatcatatcggcccatggcttctactggggcactccttgcacttgttgctgtggtgatcctccttgctgatactgaatatgaaggaggctagtattgataattcaaattacccccctgataattctggaaatttggctgtatattatgcaccaaatgctcaggaataacttgggctacaaccgattgatttggttgtacactatgtaccaggtgctcaggaataacttgagccacattttgttgcctctgctgattatcaggtgttctcaggccaggtgatatctactgcaccgtctgctactgaatcggctaagccatctgttctcttggtggtgtctactgaattggtgctgactgtactggctcgacaatcggctgagttgttgggaacattgtagcagtctgctcctgagtcagccgattgatgttctgcccaacatgttgcggctggtctctagacaagagacgaggattaaccacctgcctttgagctgacgaaggtgcaaccggtgctggagcataaactgttgccgtcggctggactgatggtgcattggaagcatgctgctgatttcctatcaccaaattcctgtagtttgggaagacaccacctggtaggtagactggccccatgttctgatgctcagctatcgtgccatcaatgacaaatttgatcttattgttagtgtattgacaagcactccagattggttgatcaaggcatgttgtacggcataatcaacttggtcttggaaatttgtgcacctaggaggttcctcccgcacttcagtaccatcttcaccaagatcttcaaccacaccatcttgaagcccatcacctttatcgcccgagccatctgtagtacctttaccaccttgggatgaacttgttccaacttcatcggcagcaaccaccttcaccttgtacttttggataacttttccttgtcgggttgctgcaaacgattccatgaactgctcctgagcgctcttcatcatcagttcatactccttcttttgttctggtgataacttgtctacagtgactaggactcaaccccaattgaaggtagattagtccctggaggtttcggaagcttggtttgaggaggcactggcggcttgcctgttaatggcggtgattgcttttctgctgacattgttattacttgtcggtcccaccaggcatgccaaaagcgtgttgatgcgaaaaacgcacactggcctggaagatctgcttaacttcagtgcagatccaaaatcttgcttttagtttcgtgagcgtgccagttgatttgatcctgcaatcaacaagaaagaaagacaagaaaaaccgcggttaaatccataaacgatagccgatcggccagtcgccgatgacatatcatgtattttgaagccgatgtcatatgtgaatcgatcggcaattataagtaagcaaagtaagactaaatctactcgatcggctgtagatattaacgctatgtaatccttctgttgatgtatatttaaaccaagtgattgggatagatcggtcgccatgctgagacagtataaatcacttagatcgaagtatacattaacacaaagattataaatgcttatagcatagccaatcagatagatctagcatgtatcggctagtactccgataccactctatattaagatattagaacaagtagaatatatcaaacaagtagcttaatatactttattgcaataggatcttaatataaagggcagacttagcatatcaatcaagcacataacgtataaagtagctaaatcaggtaagatcggctgaaaccccgatactatctctcttgataatcataaaacatgctagatatcataattacagatattacttaatagatcgatctcaaccgatgcagcattaagcataaagacaaatataagatctaggcaagatgatgaaaaactctaagagatggtagatacacgatacaatctagattaataacagaacataaccctatcgattgttttctagcaataagaaccagtcgataacaagttatatctcatagatctcactccaaataagcttcatgatgctgaaatctggcttgttgtagcacatgcgactgaggaggagcgcatgcctacctggaagagctgtagcatctcctactttggggagtaaagaccacctgaagatagagtacaacactctataatatggacgcaaccctcgagtagtccccaaacaatccttgggagcatccttctcatacataaaggtagtgctggtcggtgacagagcatcctctacaaagatatgtggacgactcaggtcatcatcatctaaccccaaagctgcagcaaactgtgccatagaaaccctatactgctgcccctgaatggtccacttcacaaaatcaatccccttcttggtggtgccaaagaaagtagtggagtagaactgtccaatcacttcctcattccaggaatactgcaaggccaacaaatctgccacgtgcttgcgctcacacaccttgcgtacctcattgaagactatgttgttttttcaggacatgtactgccagtctagccacttcatgtctactactggatgagatcttcccatgatcacagagttataccaatcaacctgcaccaaggtcctgaatctgtcatcctgagagtcagctggcagagtatcaggactaaccattctgtcctttccacacttgagtagattcttcagatagttcactcttgtgcgtttaggatcaggatcaacagcccttgtcttgtacagcctcaaaggattgctttcagatccaggctcatcctcattgccaccatcatctgactcagatgcagctggagagggagagcggggtgcatcacgaatgacaatgctaccagccctcctggaatggatcggaatctgactcccactgtaaaaatctccaactttttctttgcccaatctccccctaggaccacgaaccagggggctcgagtcagcaggaacatcttgag

SEQ ID NO: 23633 - DNA, 10008 bp, Oryza sativa
aagtatcgagaaagagaaacgaatctggatctaaacgatagagcaaagggcgtttcggtcatttcatgtgcgaagtctggtaaaaaaatataaacaaaataaaaaaaggctcaaaacagtccaaagtggcattttattaggctgtatcacctatggagtggcatctttataaggtcatccatagtgggcattctgttaaacccacatctatggagtagcatattgttaaattcctccagccatattaggggtctgttcgcttatgctggttgggagcagtctgggggtgttgggaacacagccacacggggtactgttgagtactgtcaagtcaagggtggctattactatcgacatgtggacctctgacaaccaaaagagaggttacatggctatcacaacacatttcattgatgaatcttgggctcttaggaatataatcatgaggtaactattgtcaacatcaatatgattgcatctactttgtaattttgtgctacgaatctgatgtcatatattgtttattcaaatataggttcatttatgttccaagtccccacactgctgaggttattagcgacgagctctatgaatcattagttcaatggaatctcgatgagaaggtatccactagtacacttgacaattgcactacaaatgatgcaacaattcctattcttgtgagaaagattggaaaaaccaagcttattaatgatggaaaggtgctacacatgcgttgttgtgcttatatcctaaacttaattgttaaggatggattagaacatttgaaagatgcaattgagaacattcgtgatagtgtagcatattggacagccacaccaaaaaggatagaaaagtttgaggacatagctaagtttttgaatgttactatcaccaacaagttagctcttgattgcaaaactagatggaattctactttcaacatgcttagtgttgcattaccctacaagactgttttcactagagctagtcgtgtggataagcaatatgagtgtgaaccaactgaggaagaatggttgtttgctgaagagaaggtggaaaaggcttaaaatatttaatgatattacagaattattttctagaactgaatatgttacttccaacatatttttccccaaaatctgtgagatcaaacagaaaattaggctatggtcaacttgtggtaacagtttggttgaagccatgtcagttgatatggtagagaagtttgataagtactggtctgacattcaaggtttaatgggtattgcaactctctttgatcctcgattcaaatctgaaatgttgtatatgtgctttgagtggttacttggtaaaaccagtgctctttgtgatgtggaggttagcaaagttacaactttgcttgctactttgatggatgagtacaatgtaccagaggaagaagataacatagaaccatcgacattgtcacttggcagtatggaagtcatatcttcctttagtgaacgtgttgccaggaaaaggccagcatcagttaggttccaatctgagctagatcgctacttggatgatgagttgatcccaatatcaacaaaagacttcaaggttttggattggtagaaggtggctggaacacgttatcccactttgaggaggatagcgagggatgtatttgctattccaattaccattgttgcttctgaatatgcttttagcactagtgggagagttctcagtgaacatcgaagcagacttatagctgagatgttggaggctctaatgtgcttacaggattggattagaaacaagtacaaaggtaaacatcgtgatgtgcatgtcatattatgtttttgttcactacaaactaacaccaaacatttgtttttcctttcagttcaacacaatggagatcctactagcttttggtcttgtctgcaagatattcaagaaggcttgtaggtactagctgaaaatccacaacaacatctctctttatcaatttactgatttccttgtgccctttattttccatttatgacttatccaatagctaactagctagtttgtctacccatgtaggagctgacactttgattcaagatgtcaaggtgtgtgtacctgctggtgtgaatctctgacaagtgcatatgcaaccctttttgttattaggtatacttttgattgtaatggctaatgatggacctatgaattatctgtatgatgagggctgatgactagggactaatgtattttgttagactaatgtgatggacggatggagtgatggttgtggtgatgcacttgtgcacttttgctacccaacatattcctataagactctacaacatgtgacattgtggattggcacatgctaattatgcttatcagttgatgtgatgaacaagctaagactctacaacatgtgacattgtggattggcacatgctaattatgcttatcagctgatatgatgaacaagctggttggtaccatatgttatgtaatgagtaatgatctatgatgagttatcagattgttcactgatgcaaccattatcaatttattgttgctgctgaattatggtgatctagtgaaatgcttcatgggttatgtgcctgctgctatgctactctgcttcatctgctgatctgcatgattgtcgggtgtggggacccggcgggtgcgcaatacccgcatgggaacgaggatggggaaggtgacgggagatttttctgaactcgggggcagggacggggtggttaaacccggcgggggcagccccattgccacccctaaacacggggtactgttgagtactgtagctgctacagtactttgcagacggacgtctggaggcattaggcacggcatttggctgccaacagcttccgtgaacaaaatggtgccgtgcgcattgagtgctgtagaaggcaactttgcagggcagttaagggggagctgctacgcgcacacgatcagcaggtcgatttgctacgcatcaccatttgagaaggaaatatatgctatccattgacgtgtgattacatgaatggtgtaaataaacaagtagtttgcaaccaaggacgttggggaaccaattggaaattaaagaaagagctgaatgcttctaaatcatggaggaggagaaaaatagataaaattcactagaatatgtggctttcataattggccggtgtaaaattacaaaaccacatgaatagtaaattgcacatatatttgttgcaaaagatataaaactatggagacaatttttattaacggtgtaacatgtatgaataaaattcaaatgtggtactactgtgttatattagatagctggaatcggactgcgaaataaaaaagtagtactatagaagcaattcatgttgtattgcacaataaatggctcactccttacatagctgttacgaacagcacatacaactcaactccaagagaaagcacattatgctgctacacaactttgagagcgattataaacctcattcgcaatgcattcacgccatatgctcatcgcttcctcgctgtttgttgcgtagtacatcacattgaaagatgcctgctgtgtcggaatgggatatctgttgtacggaggattagtgtaaacgcagttcacatcctaacaataaccttcctaaaattatgaagagcaaaagcaaaagcagcatgtatgatccgtggtggaacactggcatctcggtaaaacgtatctctttgagtattttccaccgctttttaatgatgctgaaagttctctccacaatacctcgcaaagaggagtgacaatggttgaagtgctcttctcatccttcgagtggcgccgctcctcttcgtcccagtcgatccctgtgttaccgtacatgtggtacggtgcaagaaatcccatcctgctaggaaaaccaaagtccacaaatagataccttcctgttgaacatattagggaaaattaattaaatcgcactgcaaggttttaaaatgtagaggagtgtgcatcccgaagtttgtaagtgaacaagttaagtgaactaaccatacggaatctgtgggaaatcatggggatagtgctgcacagcctcattcagaatcctttgatcgtaaactgatcctagccatccgaaatcacagaaaataattctaccatcatgatcacagatgacgagaacatttttcgtcgtgacgtggtgtctgtttatgtgttgcatcgtcgtggccgcagaagtcacaacagatacgtgggttccgtcaactgcacccacagactggtaaaatggtttgtaccattcctccgtttcaaacattcattgaaatgtactgaagttgggatctattgatttcaaaatattccctgccaggttgttcaaagcttccaatacttcagcgaaggaaatagacacgattgagttcgaccggacccaacgattgttagcgtctcttgttggacggccgccagccataatgaacaagaaaatcctcagtttttctagtgaacaattcccgcctatatcgacaagtccataagaagttaccaggaggctgtgcaactgtgtatctcgtcagcggtcagccggaacattgcccgaacatttcccaaatattgtccagcatccaactaataccagtctgaattggaatttggttaggtgctctcgcatttctctctaactcactgtccaacaggccgatgatggcatcgtcctcctcgctgctgctatggtctgcaggctgcagcccagccatagggaccggcaccgctactcatcgccgcaatcctttaaagaatatagcacccgaaaatggataaacgtagattggtcatgtaagtatgaaatagagtaatagatgtgaacatgatggaatataatgcgccaggaccatataaaaccaagtcgcaccaatttattttaagcagaaaataaagcataacacatgtatttaaccaaatgaatgttcacgccgaaagtgatgcatacactctaggggtgaaatcgggtcgggttaggtcagatctcatccgctggtggagaagttctttttagtcccggttcgtaaccctttgtagtctcggtttttcaaccgggactacgaatccaggactaaagatcgttatctttcgtcccgagagaattaactgggagtaaaaatccatttttagtctcggttggtgttaccaaccgagactaaagatagagttaggctagctagatccggttgcttcattatttttttcttttcttcattgtttttaatatattgagttcactccatccccatcccaaaatcccaaataaattatccccaaatcctcaaatcctcaaatccccaaatctatcatatccaaatacatcacaaaatcttaaaaaaaaattacatcacaacttctacaaaattcatcacaaatacatcacatattcacatcacacacaaatcaaatacacagatccgaatcacaaattctcaaaaaaaaaagaaaaaaaaaacacccgctgcggctgcggctgctgcgccgctcgccgccgcgaggccgcccggccctctgcccgccggtgcgccgccgcgaggccgccggccgcccggccctccgcgctgcagatgagaagtggggatgatgggggagggaaaggaggagaggagttagaggagaggaggaagaggaagagatgggaggaggaagagataaggtcagggaggaggagatataataggttagggaggaggagatataatcgaaggaggtaaaggctacttcaaggcaagatggtggggaaaaagactttgcctaccttactgaggtactcgattggagaagagcgtttaataactgatcccgtctcctcctcctcgatcttgcgcacgcctcgtactctccgccgcgcatgctgatcttttgttctggttggtgttaccaaccaggactagaaataaatctttagtctctgttagtaacaccaaccgggactaaagataatagggatctttttttcctgttggtgttaccaaccgggactagaaatagatctttagtcccggttgataacaccaaccgggactaaagataaaaatgtagctctaaccttttgaaccgggactaaagataatctttagtcccggtttttattgcaaccgggactattgtggattttggccgaccaactaaagatggtttctccacccgtgatccttcccatatcctaacccatatgtaatcagaatcggatcagacacggatagtgtcgaatacggatacaaacacggataatatcgggtacaaatacggaacgaatacgtaccaaaatggatatcaacgctatcggttacgaatacttattcggataccaagtcaaaacgacgaccatatataccacataggtcctgttcttttttccaacaagagttggatgaagattaatactttcgtggcacgtttttcaatctactaaacggtgcgtttcgggcgaaaactttctatataaaagttgctccaaaatatcatattaatctatttttcaagtttgtaataattaaaatttaatcaatcatacattaatactacctcgttttgcataaaaaaacttaatcttcatctttatcttcaggagaaaagaacaccaccatagacaatagatattcaaccacttcgtgtatccataatacgattatattagaccatttcatatatccacaaatttatattacaactgatacatatcaccataacagtgctcacaaacaaatgacttagccagttgccaatcatatcagctacagctaggacctagccaaccataccaaccatctcaaaccatcagttgcttcagatgggggtgacgccttttgatgccgtgatggccttcacaggcgcatgccgtgcagtggtggtggggcttcgaagggcgcggtgcagtactgcagcggcgcgatggacgcggcggcggcggcttcgaagggcgtggcgctgacggcgctctcctctcagtctcggtggtgattcgtggccagcattgctaaaaatatgtcgccataaaatatgatggatttcagtcgattgaaaccaaccgtcagatgcggatgcgaaattacggcatgtcacatgtgtacgcatatcatccctccgatttacttctcttcacggcatatgctatagttgacttttcttagccacttacacagtagttacacctcacttacatatgtaattagtatgtaatttttgaatttacatgtgtaattttagaacttacatatgtaattttgagatttacattgtaaatacactaaaattacatatgtaatttagaaacttacaatgtaaatacataccgattattttttggtgaaaaaaatatgacgccataaatatagctacacccaagtattatgatttaattaatggcgcattttccatctcgacacttccggccgcaacccactagtaatttagtccattacaaattaactcctttaacacggttggattagagcaagcatatactctggtggagaaagcgtttgtagtcccggttcgtaacccccctttagtcccggtttttaaactgggactaccaatccgggactaaagatcgctatctttagtcccggatgaaataaccaagactaaagatcgatctttagtcccgttttttttttgcatggccctgttgctgcatggtttatatatatatataaaccatgcatatatatgtttcaatacatatatatgcataaataatatatatatatatatatattatatttatatatgtttcaatacatatgtacatgcataatatatatgtatttatacatatatatgttatgcaaatgcatatgtatatatatatatgaccaaaatatatatttacattatagaaaatgtgtacacatgcatatagaaacatagtcatgtattaattataatccattatatgtcctagctagctacgatttcgacgtagtagtagtcgatatctcagaagctaaggacctatgaattgtatttccgtcgtagtagaattcacccttgggatcaaggatttgttcgttgatgaatcccatgagttgttcgtgaaccgccgcgataaattccttgtgtgtgatcaggttatccctcatgcgaataaactatatgaatgtatgaaattgattagtaattaaacaacaaatcgatacgtaatgaaattttgaatttatttgtacgtacatcgagctctcttgtggtgatgatttggtctgcaaggcagtggcaatactcgcacacctagtagccgcacaagttagttccctgcttttgctttgcgcactataaataaatgacaaacgatgagagatctaattaatatacacttgtatgtatttgaatcggagaaatataaatgtagagcatgtgtactcacaggaaatttgaacttccgcctaagtctttctctccatttgccgcggaccaaatgacggaaccgataccaagccctacatggagtttaaagctatgattcgtagtagcaattaactataacaagattcttaattaacataggaacttatgacagtacctgtctataagttcgaaaaccttgtcaaacatagactcttttttatccattgagtcatatacgttgacggtgcaggcctccaggtcgaagagtaaaagcacccagtggaatctgcaatgtgcgtgggatgcattacatatgaaacacttagcatgttcgtacgggattgaaatttggtataggaagacagtaaaattaaactaactctgtgttgtacggcaacagtatgaacgtcttgtaatgctgcgccttcaggagatggacgagattgtcctctgtggcttgtggatattggtcgagcattgcgacgtttactttccgagggtcgatgaatccagtatcgaaaaccccccgccgtcgggccctttgaatctccattctacaacgataaaagggagtatatattatatatagtctacttatatacaaggacctaattaattaaaggaaacgtagtaagaaatctaactgaacgatatacttacaaaatccagcaactcataatagagacgtcgagggcatccagctggtatagttcgtagattcccttgaaattgatccagagaatgtcatctccttgcaagaagtccgtgtccctgatcctcgatccgatcatctctctaccggtggcgctcatctccatgtacagctgatggaacttgtacatttgtgtgggtagggactgcagcagctcaggcttgacaagcggtttaccgagttcgtacatgtatttcacttccgcattttcgattggtgcgtctcgtagcaattgatacgtagttagcccggtgtcattaataaagtcttgtattccaaaatcttcaccggtcaccaacggctcgatctcctggtttggttgctctccaagctgagggactggtttggactttccagaagatgctttcttgagtgttcgctcatagtccgatagctttatggcctccttggcaggtgcagacatacccctgaagaagttcctgacactcgcgtctataggaatcttcttttctagacttcgaggcttgaattgtctcctgacttctgatgccacgtaagcgtcaagctcctcttgcgtgcagtcgtacccccgtcaactttcgccttcttcgttgcccttgtgggggcaggcggtggagcttggggggcccttgacttggaaggtgccagaagaggagcttgcagaggagtcggtgtaggagcctgaggaggagtcggtgtaggagcctgaggtggagacggtgctggagcatgaggaggagacggtgcaggagcctgaggaggagatggcggagccggaggagatggtgcacgagacgccgcttgtcgcccagggaggatgatgtaccgcttgcaccatagaataatggcgtggcttgtgtctcgtagatgcgtctcaccgtctcctccagggtaatccagctcgaggtcctcgtacgcgccttcgaccaactcaacttcg

SEQ ID NO: 23634 - DNA, 2917 bp, Oryza sativa
cctgcagtggtaagtatctgaagggtccgttgggatggccatgcccgacgccaccttcatgtggtgagaggttatttattagtaatcaacatatataagcagcaactagcggaatggccaaatctaaaatctataaactacaagcttacctttattgataagttcttgaagggagaatatgcagctcacatggtgtccgctgagtgatgtcatcaacggggcaggtggtttcgtccagggtttgcatggtgtccatgctctgtgatcctacctgccccgttgaggcgcagctcctacgatttcctgatgggctcagcattgcaggaggaatggtcggctggggatcatgggaccgatgtgcggccatgcgttcatcaaccttccttgccacctcctcttgcatgctgagctcgtagctcgataccctgaactcaagatctgcaatcttcacctcggtatctctcttgctcctcatccgactcctgtatgtgtggatgtcctccttgaacccaatcttccaaggaatcacccatttccctcgtgttcgtcctggatgctctggagtctgcagggcaagtgacagctcgtccctctctctgtccagtcggaacgtgccctgagaagaggcttccactgcgtctgttagtcgacgcgcagcctcatgtatctgatcgccgaagaccagggagccatcagctgggttgagcgttccaccgtgagcatagtaccagaacttcgatcgttccggccaattagtggtggctggttcgatacccgtctcaaccaagctagcctccatctcctcccacttcggcatcgcgacgctatagccgtctgaccctaagtggtgatggtacttcttcttggcggcattttctttgtttctttccatcatcgcctgcccttgttcacctgtcttatatgcaacgaactcgtcccagtgatcccttagctttggaaatgtgtcaaagttcggtgtctgccccttccggatatatttctggtacagatctcccttgaagctttgaaattgttctgccattttcttcagagtccaccttttcactttgtcctctgtacccgcgggaagggtgaatgtctctagcattgtggtccacagcatctctttcactgaatttgggacaaagctctcatgatctccgcgtgcccttattctgcgccagtacaccgtgctgacaggcacgttatcccgcacaacccaaccactatgacgtacatagttcttggcggcttctgccagggcactaggtcagccgtcttcgtccacttccgttatgatgtgccggccctcaagcttcttcgcggcacctcgttgcctgcgtgccctcttctgtccagcggagggttgacttccactagcctcctcctcctggttcccctccacatccctctccacgtgcccctcctggttcccctccacatccctctccacgttcccttcctagttcaaatactggtttggatcctcgttcccctcttcttcattccagtactggctgcttccctccgcgattgtatcgtacaatatttgttcctcatcgcgatcagccatctgttcatacaggaaacagctgctaagtcatgagacatttatgttttaacaatcttatatactaacaatcatatatgctaagtcatatatactacgtctaactgtcgtatatgcgaagtcatatatgcttagtctaactgtcgtatatgctaagtctaactgtcgtatatgctaagtctaattacaaatctaataatcgtatattaaaacaataataatcttatacgaaaacttaaataatcttatactaaaactcaaatagtgatatatgcttagtctaggtgacgtatattataggaccctagctagtcaataattatatactaagtctaattacaaatataataatcttatattaaaactcaaataatcttatactaaaactcaaatagtcatatatgctatgtgtaactgtcgtatattagaaccctacacaatcttaattatatgctaagtctaattacaaatctaataatcttatactaaaactcaaatagtgatatatgctaagtctaggtgacgtatattataggaccctagctagtcaataattatatactaagtctaattacaaatctaataatcttatattaaaactcaaataatcttatactaaaactcaaatagtcatatatgcgtagtctaactgtcgtatattagaaccctacacaatcttatatgctaagcctagttacaaatctaataatcttatattaaaactataataatcttatattaaaaccaagtctaagtgtcgtatattaaatctaatagtcttaattgcattacaaatataataatcatatatataattacgtcacttgcctgcgcgaattccttcgagggctagctaccacttcggcttgagggacgacgacaacaacgtcttttctgcaacatacaaaaatatgtattaggataaacgcgaagtaacatatattacatttgacgttcacgtttcattcacgatcgttcacgttcgcgttctcgttaaggtcacgtttcattcacctacgttcgttcgttcacgttcattcacctgcatatattacatttcacattcacgttcgttcatgttcacgttcgttaatgttcgttcacgctcgttcgttcacgttcgttcgttctttaacgttcaattctcgttcacgttcgttcgctcgttcacattctcgttcacgttcgttcgctcgttcacgttcacattcacattcacgttaattcgttcgatcacgtggcggcagcggagcggcggtgtggcggtagcagagcagcggcggggcggcgcggcggcggcatggcggcggcatggcagcgcgcgcggcatcggcgtggcgcggtggc

SEQ ID NO: 23635 - DNA, 8740 bp, Oryza sativa
ccgggactaaagatattttcccgctatttccaaattctttttaaacccggttagggttaagaaccgggactactgataaatccactgaatattaatttccattacatatgtgtttctaaaatagaaaataatgcgttaaaattatttaaagtagaaaaattaatgacaattacttcgaaaaattattgttgtctgtaataaattaagtggataaaacgtaataagaaaatatatgatttaaaattaataaaaattctaataataatatatacttagcatatgaatgatattaaattgttaaaaactctaattaacatatgtatatacatacgccatgcatgatttaaaattaataaaaattgtaataatcatatataattagcatatgaatgatattaaattaattgttaaaaactctaattaacatatgtaaatgccacatgcatgatttaaaatttttaaaaattcgaatagtcatatataattagcatataaatgatagtaaattaattgttaaaaactctaattaacatatgaaaatgccacctgcgtgatttaaaacttttaaaaattataattatcgcatataactatcatatacatgatttaaaattgttaaaatctctaataatcgtgtgtaattaacatatgccatacaacaattgatttatatggataatcaatacatccaaaatagtttacatcgtgtacacaataattacggcaatacatcggcggtgacggttgaccgcacgtactttctcctcactattgttccctccttgtgatcgctacgtgagtaaggggtgtcttcatttgataggaggatgctagggtcaatcgtcatcgtgaaaggggttgcccacactacaacatactatttattccgtaacataattttagcgacggtttcagaaaacgttagcaacttgctctcatttatattaagcccaaaaaaccgtaatgttttatcaattccgtcacgattcggcccagaacactgtaacgtttacacaaatccgtcgcgaacataaattaaaaattatcaggttcctatgtgaaacaaaattttaaaaaaatctgtcacgaacataaattaaaaattatcatgttcccatatgaaaaaaatttatacataaattaaaaattatcaggttcctatgtgaaaaaaaaattaaaaaaatctgtcgcgaacataaattaaaaattatcatgttcccatatgaaaaaaatttataaaaaggtgcaacatgcagggtttgaatccccgtcttgaattccatcagtaaagtgacctaccactataccatgcattgtgatgtggtaatgtctagtgacaaaatttatttttatagtaaatcaagtatttacccaaaaaaaacccagctcccccgaccgcttgggccacgtcactgcccgcctgcgccagctccccggccacgtcacgcgtgcgcgcccagtcagccgctcccagaatttaatccggcgcgccaaaaaaataggcgacggggcctggaacccacgacctggaggttaagaggcgtctgcattaccactcggctacaagtccggctgtgttggaacttagaagttttgctcttatatacttgaaaagttcgttgattaaacaacaacattcaggcatttggaaatttccccgattcagatccattccggcacgtgacggcgccgcctgccattgctgccgccgttcgccgtcggcaccattaccccaccgtccgtgcacgtaccgccgtcgccaccattagcacgccatcccggccaccagtccccaccacgccgtcgccgccgcccaccacatctcgcatcaacggctgccggaggatgacagcaacggcatcataggcttgcccgccattgccgccaagcgtggcgccggcgtggtgtgatgccgagcgtctcgtcgtccagcgacaggctccagcatgcgccattgcagacaatgacactgtctataaagtattctcggacgtcgttcgccagccccacggctacctccttcccgcgccacccctcctcaccgcctcccgcctccggtgcgccaggacgagcgccgccgcctggacgcctctttccatgacgccggtcgccgacccctgccgcgatctccttccttcggctcgtccgtctcgccggcctccgtcgccgttacgccggccgccgttccctagtgcccctcaccgcgcctcgctctctcctgctcgggcgcgcgcgcgtgagaaagagaaggggatcggaggtaagaacgagaaggaaagtggtaacgaagaggagaaaagaagagaggagagatacacttacaggtgggacccaatggaccccatggttactaatcaagctttgtgcagtaaatccctctttaatccccctctattatatcactgacatgtgggtccgattacactaatctctgattagatctcttttaatccctcagatgattacgtgtgggacccactgttctccagccgctcgcgcacctggtcctcatgcgccgggtctatgaccatcgggccccacgggccctaactgtgaaactttgaagctttgcattttcaaattttgaattgtagaacaaatgtggtttttcattttaatctctggctaaaacttgtaggtagtctttctcccacatactaacttcaaatttgattattcttttttctaaaattttctaaattcatgatctatcaatttgttgtgttattacaactattatttttgtcatattttcatgtgactttgttttatcaattgaagatttaaatttcaaaaagtggcaacttcaaacgatattttgaagcagtaaatgatttcagctaaaaaagtcatgaacacaaaagttgtagaactgattgagatctacaaatttatttttggtcatttgttcattccgcaaagtgatagtaatgtggatcacaagatttacacatctcccttataaattatgaaaccatgtgggagatatgtaaaacttgtgaacaatgttacaatcactttatcggatgaacaaatgaccaaaataaaaattgtagatttagatgtattatacaactttgttgttgatgactttttcagttagatctggatggttgagaatttcgtcagatagttgctctagattgttctgtcagtgttgcgcccttgcgctaattgctagactatatggttagtgaaatccaagttgtctcgtcaaactccatcttagagtttcaaagatagaaacgtttttctttttcgaatcacagggaataacgggaaaaattcccctcttcttagtattgataatatttgtttgtatatgcacgatcatctaagtatatacttgttcttaggtgcaaatcagaaaactttattgaggatatatgaagtagtgaatgttgaatgaccttctcaatggatttaaacgcctcagcattgcctgtggaagatgaacaaccttatgaacaacatgtcgaggttgattttgcataggaggatcatgttgagtctgctgttgctacaatgcaaagatttcactttttcatacagtgaacagagtatgcaggtagattatcaatcatttagttaacatcaagacacattttaaattggtcagaaaaatcatataaataaatgcatatgagttgaatactatacatgtatttggttagtggagataagattagtaaagaacctattagattgattatgaataaataaattggtatatggtgacagtagtagtttatatttaatcaagtgaccatagagggacattcagcagaaacactctgtaggaaattatgctgagcacctaaagataattggaatgtatatcttaacggtagagcatgtaaggaacgaacttgttcagagcatagcacgacaaatactagtttgtacaggtcatgagtaatataaagtttatccaatcgttaattgcatctcgtgagtaatataggtgcaagtctgtaacaatatcaaagattaatattctcatatagtgtgatgctagcagtatgtagtatttatacgattaatatgaatagtgagtgtattgatacatcttgcgtttaatgcagatctatgagcagaactagtaggtctctatagcatatcatcttaaaaaaacagagcagtttagagtaaagcagtcattagaccattcagagaaatcaatcaccatatgtttgtttcttgataaagttcagtaatcgataatctagaattgacatggttatataagttttcatccatataaataaatatagtgttaaagtgaagcttcataaggacctgatcatgatagtgtgttattgactctagtattatttaacttactgaatgcaagtatatataaggaacgatcatattagagtgatttcaaattttagtactgcattttcatatgatgatttctggaagcagacattcattcataagcatattggcataattcaatcatattaatttaattgatcaagtattactattaggcaatcagcggagcataccatgattccatgaatattcataggttgaccaataggacttttctaattagttgttgtgactgttgtacaccaagcatatcatagtgcatttcattagcatcggtactctttgtatttatttgtttcatcgtttatttcagttggttgttatctttgatttcttggagttcttattggcttattcgttcttcgatttcaggtatctcaggcaagtccaacacctttgaccaactcttgttatattttcgtaattgcaatctatatgtatcacattgcattaaattgtactttctataattaaaatatatgttccaaattgtctgatttatcttcattcctataggtttattctggtgacttatctagtggtgtgcttgttcaaccatcgacattgcgtgattatgatgacagagataggttctgcatttttcttttacctgggggtggcaacagaaaggttagttgctcttacttttgcggggtttcgtcccatagtttttatttttatttatttaagcaagcatatcttccttgagtgagatatctgcagttgacaagacttttatattaagaagagggcctctagtaaaaacccttgatgaagctagtgtagaactaattttttatagaaccattctaaactgccatttggttatctttttctagtgaaattccactaacgatgtgcaaacaacaatctctatcaggatattttgccaccgtatatcattgaagttatagtaaatagggatgttactgaggtggccttgttcgtttgcactgctataggcttatttgcacttccagttcactgccttacatttttggtttttggtcttgcaagcagctagaggatggcatgaactggtggactacatccagaattttcaccaccaacctggagctgctggtctgatgcaagatgctcctggttgagcttctgttctgattcaagatgctgatggttgagctgtcctattgttctttgtcctttagacttaggggcaattgcaaatttaccactactttgaatcattattgcaaaactgccactagaaaattgcaaaaatgccactagaactgtcattcgagtggtatccttgcaatattcaaaaaaccggtggcaaatttgcaaatgccccttagacttattgttcttgtgttgagcttgtgctcctggtgttgcaagttgggctacgtctcttagactcatgatttgcatgcttctgatgcaaaggtgaaacttgcgattgttcgcattgcttttgcatggatattgagctgttttgaaatggtctggctgcttctgttctgataatggtttggttgctgttgtgggctgaaatcattgtggactgaaatgtttatgggctgaaatcactccgagcaagaatcattgtgggctgaaatgtctatgggccgaaattttgggccaaaagtggcacacttctaaaatcggcccattaataaatggcccatgaatgtaaattcaacgtctatgtcagcatgcacgtcattgtccatgtcagcatccacgtcatcatgagtaccatgtaagcagcgacgtcattatccacgtaggcagccatgtcattgtccatgttggcagccacatcactattggctgccacgtcatcgtccacgttggtagccacatcactatccatgtcagcagccagatcactatccatgtcagcaggaatccgcgacgtttattttcatcgctaaaactgggctttggactgggctgcatgggccttggactgttctgcgacggtcaaaaaccgtcacggatcacttcaatccgcaacggttttgaagaatcgtcggtcgatttaatcaatcacgctcgatcaataacgaaatctgaaaccatcacggatggtgaattgtaacgaattttcaacgacccgcgacaaaatgattccgtcacagaataaatagcatgttgtagtgccatccaactgatcgtaatccccatcagtcttgtcctcaactccgccgatttttcttttgcctgggagaaccacgtgacgcttaggctcatcaggccctctgcccttctttcctttgctagacatgtccttcacgtaaaagacttgcgttacatcattggcaaggacaaaaggttcgtccgagtatccaaccttgttaaggtcaaccgttgtcatcccactgtcattaatcattacgccttcaccagtcaacctaacccattggcaccggaacagatggaccttgagaggatcatagtcaagttcccatatgtcctcgatggcaccgtaatacgtgtcagttgttcaattgtgtcccatggcatcgacacgaacagcgctgttttggttcgtgctcttcatgtcttgggctctcgtgtagaatgtgtacccattgatcttatatccctggaatgtcgcgatcgacccagacggtcccctcgctaggaaggcaagttgttggttgatcgactcgttacccatgagatgttgtcgtagccacgcggggaaagtatcaatgtgatgccgtgtaatccatgcatcggacttgccgatgttcctggcgcgaactagagccaagtgctcctcgatgtaaggagttaccaatgaagattgttgtagaaccgtgaaatgggctttacggaataaattgttgtctaccgtcattattgctttccttccgagagttccctttccccgtagtctcccttcatggcgtgattcaggtacctcgattgggcgaaggtcttcgataaattcaacgcaaaattcgatgacttcttctgttccataacccttggcgatacttgcctctggacgagcacggttacgaacatacttcttcagaacgcccatgtacctctcgaaaggaaacatgttgtgtaggaacacaggcccgaaaatactgatctctttgacaaggtgacaaagcagatgcgtcattatattgaaaaatgaaggtggaaatatcaactcaaaactgacgacacattgcaccacatcattctgaagggcttctaatctatccggatcgatgaccttctgcgaaattgcgttcatgtatgcacatagctttgttattgttgcccggacattgtctggaaggataccccttattacaactggtagcagttgtgtcatcaatacgtgacagtcatgagactttaggtttgtgaacttcttctccttcgtgcttattattcgcttgatattcgtggagtatccagatggtacctttatgctctccaagcattcaaacatactttccttctctgccttgctaagagtgtagctggctggactcaagtaatggcttcctttctcctttggttccgggtgaaggtcgacgcgttgttccatatgcttcagatcattacgtgcttccagagtatctttcgactttccgtatacacctaggaagccaagaaggtttacgcaaaggttcttagtgaggtgcatcacaccgattgcgtggcggacgtccaagaattcccaatagggtaactcccaaaatatagagttctttttccatatcgccgcgtgaccatcttcgctctctataggctggcttccaggcccctttccaaacactactttaagatctttaaccatagcaaacactgttttcccgctgcgatgtttaggcttcgtacgatggtccgccttatattcaaagtgcttgcctttctttcataccgggtagtttgctgcaaggaatcgacgatgacccatgtatacaaccttcctacagtgcttaagatacgtactttctgtttcatacatacagtgagtgcaagccttgtaccccttgttggactgtccggataggttgctaagtgcaggccaatcgttgatggttacgaacagcagcgcttgtaggttaaactcctcctgtttgtcctcgtcccacatggggacaccttccttcttccacaacagtttaaaatcttcgaccagtggtcttaggtacacatcgatgtcgttaccaggttgcttggggccctgaataataatcggcatcattatgtacttcctcttcatgcatagctagggggaggttgtagatacacatcgtaacgggcctagtgctatggccgctgctcatctctccaaaaggatttatgccatccgtactcaaaccaaaccgtatgtttcgtgcgtcctttccaaagtatttaaattttctatcgatgtttcgccactgcgaaccatcggcggggtgtctcagca

SEQ ID NO: 23636 - DNA, 3270 bp, Oryza sativa
atataggatacaatcattcggacatgcgtgaatcttctaaacttccagtcctagagggtagactatcttcttagcctcgtacgttgtctcaggcaatttgtttccctccggaagaatgttcttgacgagtttcaataaatcgccaaatgccttgtcactaaccccattttttgccttccattgcaagaactccagagtggtatccaactttttgtgcccctgctcgcaacctgggtacaacgacgttctatggtcctctaacatcttgtccaatttatgggcccccttttcactttcgcagtcctccttggcatcctgcaacatctgaccaagatcatccgcaacgtcgttaccatcagcatccctttccttctcgcccgtttgatttccttcaaatccaacgtactgagcaaagtccggaatattgtcgtcttccacttcatcttcttccatttcaacaccttgctcttcgtgggatgtccaacaattatagcttggcatgaaccccgactcaaacaagtggaaatgaatagttctggatgcagaatactccttctgattcttacacttattgcatggacaacaaataaaacccttttgcctgttagcttcggccactctcaaaaaataatgcacgccgtcaataaactctttggaccgccggtcagcgtacatccattgccgatccatctacatgacatgaaaaaaaatcgtacacaaataattattcttacaataatgacagtcatacaataattataagataattacaaactctttcaacagtcatacaataatgacatatctttattcatacaaaaatcataaaatattacaccaaataattcttatttactatttctattaatgtgttttacttcttttaattttaattttactttgttttctattatttaagattaactttcactatattttccttctcaactattttataaaaccttctttagcaaatcaactaaatttctatatattctttcttccccacacaaattttctctctcatcaacttacaactaaattttggagacaaaaaagtatgcaaaacatagctccaaatgtaatatgacaaaaaaaaactttggaggatgaagttgcaaaccttttaggcacctctgatttgtaagtaatcaccaaaataaattcactagaaattttggcatgacctcccctctcttttttgaagaaattttgaagcttgcttggccagctaggggaggaagaagacatatatatataggggtgagactttagtcctagttggtaacaccaaccggggctaaagatccccgggatctttagtcccggctggtaacaccaaccgggactaaagttaactttgcctgacaggccctgacagcatttgaaccgggactaaagatcaaatatgcccgttaccctttttaaccgggactaaagatcatctttagccccggtttttattgcatccgggactattgtggaattcggccgaccgacaaaagatggtttctccaccagtgataggacggatgatggatgctagctgctcgtgcaagggggtaggcttcattgggccctagcctaccctctgatttttaaaaaaagaaaatctgaaaaaaaaatctaagatgggcatgcattggagaagagaccagcgttgggaattgaggaagatatgcacattcagcgcttggggatcatgattgggatggacactcccatttggctaattcgacacttcacaccacaaatccactgctccctccgtcctaaaaaagacaaaccctagttttcgtgtccaatgtttgatcatccatcttatttgaaaaaattatgaaaaaaaataaaaagacaagtcacgcataaaatattaatcatgttttatcatctaacaataatgaaaatacgaattataaaaaaatttcatataagacggacagttaaagttagacacggaaacctagggtttgactttttttttagaacggagggagtagttatttggctgagggctccttagccaggattggactgcagcaagagctagacgtcatgttattatatagctagcgagacagtctatggagtatcacattatataattatctatatctagtataaaaaggagttcacccctaacaattctacaggtaaaatcatcacatctcatctcatccgtccatccgtcatctcatctaatctcatccgttaatcgctatcctgctcgctgtagaaatcatcaccaatctcacccgattcctccaccgcactttctgcccgcgcgatgactccgccgccacgaatccccgctgcctcctccctcctcctccctcccccatgcctagggaggccacgatgggctcctggccagtcaccgccgccagcaatgcccgacaacgcaacgccctactacgccaagggaaggccacgaggggcttcccgcttgccgtcgcggccgccatgccctcctccgcactggaccgctgccactcactccgcgcccggcgacactatggcctccctctgtcgcaccaaagggagcttcccattcaccgcctccatcgtgtcgtgagggacctccacttgtggcacttctgacgctgcgacgcagtggagggcattgcctctggtggcaccatggttctactgccatttaccggaatcatatcatttagtggtttcaatctcttctcccccttccaattcattgttttgtttctgcaatttggttgacaaagcaagttcctttattgtctggacatactgtattttgcccagtaggtgttcaattaaatgccactgaaataatctgaatcagagccggtttaatcatgcatctacgtggacacatcctttagttttattgtctaataggtattgattatgtatatagcagtgccataagaatttttctctacagctcattcaagcattcaacaatgctgggctgatttttggaatgagcaatataagtttaacattgttccatgtttttgcttgtaggatgtatacttctattgttgtccttaccctcatacctgcgtatgtgtagtaataaatattggttgcataagaatgacacagaagactgagtgggtctttgttgcgaacccaaaaggcctatagatcttactggtaattcctacaaggaccaaactccatttatagatatttgcacatttatgctatttgcttttgcttgttctgtacaatattctcctatttaccctctggggtcaacctgtactcaacacgtgccacaccaat

SEQ ID NO: 23637 - DNA, 2896 bp, Oryza sativa
tcctgcagccctaatgtgcagcctctagacatattgcaaggaatttggcatcaatgtttttctgttactgtattttctatgtatctgtcaatgcttgactgaatattttattgccatttaaccacccatgatgtgttaatgccacaagcagctatgatagacggtgatgatgacaacgatgatgaaagttatctcatgagaggtcaaggtaattatgactcaatttctactgttggtcaagtttatcatgacaagtatcacagagaagagcaggctttcagatttattatgaatcgatttcattttcatgcttatactacattacaaacaatgcacatattggtaactctttacatcataagtggtagatcattttagaagccctgttcacttttagaatttacaggttgaatttgattggaaatcagctctgcaatgtcctctcaatcaaggaggagcctatgtcgattacttgagctttttagccatgttaatgattgttgatatcgcttgtaatctttgtctccaacaacacattgctcacaagtgggctggttgaactccatatgaatgtgcataaactcaaggtgactatgatattataaatctttctgttgatatttcccataagtcttccacttgagatatattagatattccaaatccatattaacctgtttacagtgaaatttggggccactttaaagaagaggggcgaagaagatctgtaagttagaaggtgtgctgcttcattagaatatatcatttgcgtatttctcaaataaaatattttggttgattatttccagtatgcactcctctgaagtaattcatggtctttgtatttttcttatggatgtatacttggtgttttctgttgttggtgcaaataggtgagcaacatggatggtgatggtgttctgacgtccaaatatgaaaccagccaaccaggtcaccactatgttgcattatttttcttcgtattgtctactcaatatattgctgattttaagtatagagtcaatcgttaatccatgtgtaggatgttcagaagcaatgctaggcttaattagtgcgattatcatggtgtggcagatgaggttgagttcttgagtttatagccttcagtgatgttttttaaaactaattcactgctgcatgtcactgttacgttgaattgctgaactacgtccctgtggcattagaggatccaaaattcttgccttgctacatgctactatgattaatcagggtcaattttctgccatacatattcatttgagcagtttttttgttatgttcaatcagtggatgaaaaaagtcaatgccatgcattttaatataggggaatacagaaatccacctcagttgctttcactcaattaggtagtctactcgaatcctctgctattatttgactcaaaccaaatttaattatatcttttttgtgtttggaaaaatgtgtctaatttagtttgagcatgggatcagagtaggattaaattaataatcaatatttgaattcaaaagataaatgataataatgctgatacaattaatcaaaattctaaaaatgaactaattgaggattatagataatatcttggtaaatatatggaggcattgtaagagaacctacagatcatatcagttgaaatagacatgcagattaccttgtgatgtgcccattctccatgttaatctggtacatctccatcaatttttcacgagttacatgagataaattgattcaataattgatattttatattttcagcttggcagcctgaagatcttttggaccaaaagggcaggcctctttcccaaggtgaagcacttcgtagctacaatatgcgagtgctcagcctatacaccatatccttatatgagtatgctgagagttttattctccattgaggtgaagtatgctcaaaagtttcgttaaaatatattcagtttagtgattttgttcatgaactaactcacttcactaccatgaactcatttctccaaaattttggatcttttattagcaaatctatggactgaagtggggttttggccagagctccaatcccctgcaaatcccaaatgcagtacgagtaatattttgcaaaattatgtactccagttctattggaattgatgtaaaaccaacaaattcttagttttgtcagttattaaaacgcatagatgcatattgtgtatgacattatatcaaacgtgcgttgcacgtacatgattactagtaactacaaaaagaacgtgcctcttggaacgcttgctaattgagcctgtaatattttatttagatattatttggaatatgagattcttttaaagcaaatagttttaagacttataaagttgatgtaaatatcatacgttaagtatcctttagtgtgttctagttttaattttgtagaataccgaggaagaatatcatggtgtggaataactttcagctccatccttaggagcataatatttgcaaataaaaattaatttatgaataaaacttttatatatgttcttaatgatctaaaagcaaatgctgaaaaataaactacaatgaaaacccctaaaatcaactctaaatttagagttaaaaattgaaatttaggctgataagtataagcataagcgaaaagataagttcgtttgttttaaattttaacttattggtgaagatgatatttttaatatataaatgcttattttttaaaatattctacaccgctttggtaatttttaaagttttgaatacaaatagttataataattagaataaaataatgtttatatttataaccttccacccaattccctgcatccttgcatcacatctccaacccctgcctccacgcgatcttccacaatcgtaccccccacctct

SEQ ID NO: 23638 - DNA, 7012 bp, Oryza sativa
gcaatgggcacaaagtagtgcacctaaggcccatgaagaggtccaaacatcacagacctaaggctgggacacctcgctgcacgacttgccagtgctggctccacaatgcacccagcctcacctgttcacttagctgcaaggttattttcatcatatatgcacaagtactgttatttatcatgatcatgttgactcaattgattttgtttagtgggcaagctatgtgctatatattgatggataaggttgtttgttgtgctttactagatttcaccctacgtagctagactactagctattgttaactttttttttctaatatctctcttctccaattctgatagaaaaaggcaggtatatcaccaaatgacttctcagggtctgaagcttcaactcgagtttctcgttcacggaaccaagcatcagatgccaatcagaaacgtccaattgccaatacaaagctgcgtaaaaggccttgcaagcaagcgaaccctgaaagggctccattcttttgatgtgaatgtgtcccaaaactgctgaataatttagctgcaagaccgcagctttcgtgcgtattatttatttgtcatgtttaagttgtactgtgcaacatgtttgtcacattccgactgatacctggcattagttgctttctcatttgctggtcctttgctccttatcaaaataataatccagtttaaactggtgaacattaattattttgtgattgactattgttctatcccttcttttgtttcttattctgaacacaggtgttgcattttctttctgagatttgtgtttgttgatttggtgatttggtctgactttgaaacgataattacctttccctttcaaattattattcgaatattcaatatgtgagttgacatgagtttgctaacttttgttggagtcaattttgtcgtgaattttcattgttatcttgttcagaagtccaaactaacatataaatagtatatggcatccgcattgcaattttttgctttcttattctattgtaacttaaatcgagcaaaactaccaaccgtgatgcaaaatctctatctcagttcacagtctacctaatgagatgactaggagacaaacacaaagaacaagattacacaaacacatgaagttcctcgggtctaggtaattccttcccgccctctgaacacaagttcaagaataaaaacaaacaagaactaagcacacccaacaaccagaagagggggaggaaaactctaggcactcacactacacatggtacaaaaggtgcacaacacaaattgatttatcctcagcctctgtagcgattgaaaaacaccttttcccaattgctagtgcattgatcccgtccccggaaaagccagggtacacttcaacaatcatgatacaaaagacacatatttattgtatcgataatatttacattattacaaaggctcttcaggcctaacaaacaaaaaataaatagcagcagaccagcgggcctacgacaacatcttcataggcgctcaactggggtataagccaagactccacctcggactcttttctaaagtttcttttactgaaggttggaaagattgagcaagaatgagtacaaccacagtactcagcaagtcaaaccgggagaggcatgattaatgcaaggggtacaaggagtaataacatgggggttaggttaaaaattagtttgactccaaattgaaaaccatgcttctcaacaaatgaaacttttctatggttgacatgtacactctttatttttgctaacacttacttgtgaacatatatctattgtaggaacccttgctaatctaagtaattgatatttgtgatatggagatgacaaaagaaattcctttctaactgtcatgatatttgggattttatctttgcaaaaaaataaatttttgagcaatactccttagtgactatatgattacctaccaaaggccaaatatgattcatcttgcaaaccatatattttggttgcttgacattacattgagccttgtgtgtgacctatgtgagatgcttttcatgctttatgatcaagatcacacacactccacatagattaacatcctgaacttctacactagaagctagtgtccatttcatccatcatccacaaaataaatactcctcgttatttatgtatttttctccaaagttcattcaaaggaaaagggaggcatggctatgcaaaagaaagaaagaaagaaataataaagtcttgctcatacaaatatgaagcatgagaacaaaaagatagccatgccatctctcaagtctcaaaagaaggagaaagatgtgtagaaggagttatcattttccttttccacccacaatcatacacatgcacattcttgatcagaaagtgtgacttgctatctccttggggccccttttttggcctggcaaaatatgtgatgcaggtacaccccgattgatccctaccgagctccacatatatagccttctagaatagggacaattcggcaatacatgccttggtgaggatccaacaatcaaaatgagtgattcaagagagtcatatgaggagtatagctatattttgaaaatatatgaaaaactcaagtgattgacaggaggaacaggaacgacttgagtcacgaccattcgatttatcaattacccaagatggtaagatagacactgcaaagttcataggtataggtgtggcttagaataaattgtatactagtaccataccttgggatgttttattccacaatagtccttaacctttagtcgagatgagtaaagagctaagtgtgggggtttgttgtaatgccccgattttcattcaggattaaaaatcaattaataatgcattttctagaaattaaataaaagtaaagcaatttaatcaagtgaaattattgagggaatttaaaatttcctttaaaaatcatggccgggaatattttgtaatattctttgcgccctaaaatattctctaaaattttcccgtgaattttcagagctcaagaagtaattataataatacaaagttcattaaaccaattaaataaaaacgaaaacgaattaaaatcctccttctttgatttgggccgtttccggcccaagtttcctcctcctcaggccggcctccctcctctctccttccttctcggcgcccaaggcccgtccccttgcaaagttcacttctccttccccaaccgtctcctcctccctccctcgccgacaggtgggcctggtgaccccacttgtaagctcctccttctaccttcggcctccagagccgaagccgccatgcggcgcctttgccgtcccacgtcgcccatgattccggcctctcccgctcgtgccctcgcgcccaaaccgcatgaaatcggtttccctccacctcctctacactctccccatgtttcccccaaaaatcgtgccgggatcgaactccacttggcccatgatgttgcccatgtcgccggccattgccgcccgattctgccttctcgaccacaattttcctcccccgcacccatataatgcatcgcccagctctcctctaccgtttcccctcctcccccgagcttcccatagcctccctcgctctccccatgccatcccccacttctgccgctttccggcgagctacagccacgtgctaccgccgccatagccgccgtcgcaccatgccaccgccaccactggctccgcagcgccgagccaaagcccggccaccacttcccctccccaaaccgccgcggaaaccccgtcgccaccaccaatccgagccaccgccgcctccaggtgcctcccgccatcgagcgtcgcctcgctcagccatgccgccgccacccacagcgccccgtccaccgctcctcttccccaatgcattgccaaaacgccgccgccacgttcaccatctctctccgccaccattgccgcctccagccgtgccgcgtcgcctctctggtccacctcgcgctgcgcagtcgccttccccagcaccgcagccatcgtgcgcagctcggcatccactccatctccctcctccacccccgaagcactactcctaccgcgaacccaagccgccactgccattttgtcacatcctgatttttgtttcaggatttataaattatttaataaattattaatagaatttatattaaatgttctttaatttacaagtgaagttaaatgtgggaaataaaatttcctaaagcatggatggatttaatttttattaaattctccatgattaagtcaactctctgaaaatttctcggatttttcagagctcaattcctaaatgatacaaagaacagttcagtaattatttgatcaataatgatctaattataattgttaagagcttttcttgtttaaaaatccttaaattataaattgttggttaaaaggaattattaaaaatgatcttaaaagcctaaaagagaagatctaattttaatttgctaaatctcaatataaaatggggccagataaaatttcattaaatactttgcttaattctataattcctagatttttctgggatttatttgagctaaggaagtatttttaataaatggaattgcatttcatgaataatttaaattgaaaaaggtttttaaaagtctcttttggctttgggccgaaagtcggcccaaaaccttctctctctctccctcggcccaagtcggcccagtccgcagtcgcagccgcccgcgcgagcgccctcggtcgctaacaggtgggtcccacctgtcaggttcgtcgtcttcctcgcgtcggtcgccgctcgaaaccctagcgccgcgccgccgtcgtctccttccaaatctggccgctcctttcccgatccggtgaaatcgattgaggggaaacaatcttcgggatctcctctaccttttctcttttggaatcaccggctaaaatcgtttggaaattcgtggattcgaggtcgaatcggatcggtctctttcgtaagtatttatcgttttagttaatttgatgaatctgtatattaaattgtcagtttgtgtacctcggctgattcctggacgaggattttatgcacagataagttcggaaattactagtgaatttccgggcgtgacaagttggtatcagagccatctcgactgtaggataagccaaatggtcaaaccttaaggactaattttccgaaaatatgatttgtgaaaatttctcctttcttccttatctagaattctttgcaaattgtttcgttgtctactcccctctctctttcaacttgagtagttctgagacattgaaacttgaagacgccaatgatgtcaacttatggaggtcagtcaagtggatcgtggaaggaccgaagtgccaagtggtcaagatggaatgaagtttggatcctatcttagaacctatgccaccaaactatcctcgaagaatagttagtagggtagaacgtttgttgtttgctttgtgtgtaggtatggttgcattcccatcattggagtagttcattgatgagtgtgtaactatactaggttgcttgcttaatcaacttgaacaatataatggtctacacacatcagatcagtgttaacctggttaaggtcttatctttagtgtaacccctctccttctatcttctctaatatgcaacagatggtgaacactcgcgccagtggaagtggaaacaataacaatgaagggaacccaactcttgctcaagttctggctcaacagactcagttaatgaacatgatgatacagcagatgcagaaccagctcaaccaagggaacaacaatgctccaccgacgcagaacaagttagctgattttcttcgtgtgaggccgcccaccttttctagcactaccaacccagtggaagcgggtgattggctgcacgctgttgagaagaagttggaactgctccagtgcacggatcaggagaaagttgttttcgcttcacatcagttgcaaggacctgcatcagaatggtgggatcatttccggatgaacagagcagaaggtcaaccaatcaattgggaagagtttaccgaaggattcaagaagacacacatacctgtaggagttgttactttgaagaaacgtgagttcagggcattgaagcaaaaggatcgtaccgtggcagagtatcttcatgagttcaaccgtctggcacgttatgctccagaagatgtgcgtactgacgaggaaaggcaggagaagttcttggaaggcttaaaggatgaactgccagttacgttaatctcccatgactatgttgattttcagcagctggttgacaaagtaattcgacttgaagacaagaagaacaggatggataaccgtaaaaggaaaatgactgtattctaggaggcacaaggtagtagccagagacagcgtatcaagccactccaaattagtgaacctttttccgctggtcaaggacagtcgcaacagttgaacatcggtggtgagatcaaatcagagactaatgaaagcaatgaagttaacatcgagcaagctaatcagccggtgccagttcagcaggaccagtctcaggagaataacagtagtggaagggagcagcaggtatgtttcaattgttacaaggcaggccactttgcaagagagtgtccgaagccgaagcatcagcagccgcaaggtcaggtctacaacattgtcgtcacaggagccaatgcggtgccagttgtgtcttcaagtgttacaactcagccaccagtttcaaagcggcagtagttttctttaaagccttagaataattatcggagttatggaataagatagactgcagtttacctattcccttttctttctagccgttccgaatctcgggacgagattctttgtaaggggggtagatttgtcacatcctgatttttgttttaggatttataaattatttaataaattattaatagaatttatattaaatgttctttaatttacaagtgaagttaaatgtgggaaataaaatttcctaaat

SEQ ID NO: 23639 - DNA, 13690 bp, Oryza sativa
cctagcgccgcgccgccgtcgtctccttccaaatccggccgctcctttcccgatccggtgaaatcgattgaggggaaacaatcttcgggatctcctctaccttttctcttttggaatcaccggctaaaatcgtttggaaattcgtggattcgaggtcgaatcggatcggtctctttcctccaaaccccgatctttccttcgtgtcaccggtcgccgtgggccttcgtcaccgcctccttgcccctttaaaaggacccccggtgtctcctctacccgtcgccacccttgccttcgtctctagccatcggaagcgccctagtgccgtgtgacctcgagccgccgtcgtcgccgccgctccagccgtgcttcgccgtcgctccagtcgtcgccgtcgctcggggaggtcgccatcatggtcgccaagtcgtcgccgtccccgtccaccgcttcaccgccgccgaagaccgccggagcaccgtcgtcaccgtcgacccgaagaccgtcgccgcttcttcctcgtcgccggcgccgtccgttgcttttccgccgttgttttggtcaccggtgagttcgccgcgtcgccctctacccgttggtgccctccgtttgcgtcgtcgtgccgtcgttcgccggcgagcatgcgttgccgagccgccgccggtgctgacgtcatcgctgacgtagtcgctgacgtcatcgtcgccgttccccgtggctcggtcgtggaccgtttgatctcggccgtccgttttggataggatcgacctcggccgtctgttcccgtgaaccgttgccgtgcacccggtccaccgcaaaccctagccgctgacgcaataattcccttttccttttcaaaaataattcaatattgcgtcataattcaattaaaatccatataagtgttttaacccgatttaatctttaaaaattcataactaattcattgtaactcagtttaatgtggttcaagttgcaaaagttgtgtaaaataaagatctacatattaaaattatccataaattgaattaaatttatttaattctttttaaatgggctttaattatatttaatctagtaaaattcataataaattcatttgaagtcagaatgaggcccttcaagtctcataattcatctaaaattatgatctacatgtttgtttactttttatgtattgtttatttagtttttattagtctttttcttcgttttgcgtgttagcttgtcgtttccgtcgttgcgaaggttcgtgagtgcgccggaagtattcaagaagattaattgaagaccgattattgcaaggcaagtcacacagatcctaaacacaatcctttgagcatgttgatcctatatttaaattctctatttatttcaactatgcatttattttcgaatgtcactgggtggtgtgaatctattcctttgttatggcctgtttgcattgactactttattccttgataccttgggttattataacttgactagttgggctttatatatattggttcagctagatattagttatgattgcttagccatgcttagaaacattagcacactattgggataacttatgactcactattatttaatgatggcttaatgatagttcacgatggttaatcgtgattggttaattaattacttgccaactaaaacttgataatggtgggttgtgagcacatggttttgagagtcgtgctcatgacaattaaggaccggttcgcgagctactattgtgaaacattaaccgtgccaaccacaagctagcgtgggcaacggctttaccttttgtatagcatggttcattgcggagcaccagactgagaagtggcggagataagcccacgggggtcgctggggagtccatgccttgttttataagggggtgattatgatccaggaatggtgcactgtggtgagttgtgttgtgcagagggtattgtcacagcctctattcgggtaccttccagtatcgcgacgcatggtagacatgatgttgaggctgtgtcttgtgggtacagtggtacacctctggccagagtaaaactattcgaatagccgtgcccgcagttatgggcgggttgagcaatgtttttcgtgattagtctcacacctctcacaataattatggatgttatacctggtaataatttgcttagctcctggtttggagttagatctgtacagccgggtatggttgttcaggatggttgggcctgtgcagcatgggtgtgctgttcagtgttgattaaaattcctaattaattactccactgttttacttctcttaaatgttttgctaaaagctgcttttgcaaatgagcctatattatgccatcctttggtatccttgtgcacttgcatatttgctgtgtggcttgctgagtatgtcatatgctcactttgcaataatcaatcaacctcagttgaagaaaaaggatccagaaggagaagacgtttggcttataccccagttgagctgcctgtgggagtggagccggagcttcgctagattttattttccgctgcagttttcttcatggtgaggactaagtgcctcttaagtaagtatttattgttttagttaatttgatgaatctgtatattaaattgtcagtttgtgtacctcggctgattcctggacgaggattttatgcacagataagttcggaaattactagtgaatttccgggcgtgacacatttgccacctccagctgccgctcgtcgccacttccgaccaccccaagtcatgccacgaccaccattagctccaccaccgctccactggctccaatcaccgctccagccttcttctccctgttgacgtcgtcccggtcgctgtccgtcacctcacgcccgcagtacaccgtcagaccgccgccatcgtcctcaccctgaggagctcaccgccacctccctccgtcggccatctccctccgttgccgtgtcgctcggtaagcatccccctctcctcctcccatcccttccatcgcttcccgcgccaccgctcgccgtcgattgctggtggctgtgcgccgccgcctcttagctgtccggccgtgagccaccgccgtcccctttggccgtgcaccgccaccatggactcggtccatggtggagcaactcctttgacccgctgacgagtgggccccccgctttgtggacgtggtccgcgctcctcctcttgctgacgtcagcgagcacctattttcctttgagaaaataattattaattgcgtcataaattggtaataattatagaaatttattaaaatggctcaaaacttctaaaattcatatctaattcatacgaactctaaattgggccattcaagttgcaaaattcatctaaaattgagctctacatgtttgtttactttttatgtactgtttccttggtttttattagggtttttcctcgttttgcatgccaacgtgtagtttccgcagtttcggaagtccgcggtcgcgaggaaaagagttcggaagatcaaagtgaagaagcaaggcaagtcacacattacccttgagcatattgatgctactttataaatgttttgtcgtttgcaaataaatatacatgttttgctaattacatgggatccgggtattacctatgctcgcttgtgccatgtttacttgttacccgacctttgtcaacctcgggtgataatttatctagctcgtgatacttatgttgtcctagctagaattatatatgcttagccatgcttaattaccactagctcacaaaatgggataattacattattagacatctagtattctgacgagctgtgtgctcgatgtcacgcccggaaattcactagtaatttctgaacttatttgtgcataaaatcctcgtccaggaatcagccgaggtacacaaactgacaatttaatatacaaatccatcataataataacgttacacacttacaaaagaaaagaaaacagcagcggaattaacggtctagcgatggcttcagctccactcccacaggcagctcaactggggtataagccaaacgtcttctccttctagatcctttttcttcaactgaggttgattgattattgcaagaatgagcatatgacatactcaacaagccacacagcaaatatgcaagtgcacaaggataccaaaggatggcataatataggctcatttgcgaaagcagcatttagcaaagagttaagagtagtaaaacagtagagtaattaattaaaaattttaatcaacactgaacagcacacccatgctgtacaggcccaaccatcctgaacaaccatacccggctgtacagatctaactccaaaccaggagctaagcaaattattatcaggtattaacatccataattattgtgagaggtgtgagactaatcacgaaaaacattgctcaacccgcccataaccgcgggcacggctattcgaatagttttactctggctagaggtgtaccactgtacccacaagacacaaccccacatcatgtcaccatgtgcctcaataccaccacggtacctcggaaaggagttgtgacaataccccttgcacaacataatccattacagcgcacctttcctggatcataatcaccccctgaaaaaccagaggcatggactccccagcgacccccgtggacttctcgccacttctcagtctggcgcactataatgaatcacgctatacaaaaaataaagtcgttgcccacgctggcttgtggttggcacggtaaatgtctcacaacagtagctcgcgaaccggtccttaattgtcatgagcacgactctcaaaaccatgtgctcacaacccaccattatcaagttttagttggcaagtaattaattaaccaatcacgattaaccatcgtgaactatcattaagccatccttaaataatagtgagtcataagttatcccaatagtgtgctaatgtttctaagcatggctaagtaatcataactaatatctagctgaaccaatatataaagcccaactagtcaagttataataacccaaggtatcaaggaataaagtaatcaatgcaaattggccataacaaaggaataagttcacaccacccggtgacattcgaaaataaatgcacagttgaaataaatagagaatttaaatataggatcaacatgctcaaaggattgtgtttaggatctgtgtgacttgccttgcaataatcggtcttcaagtaatcttcttgatcacttccgacgcactcacgaaccttcgcaacgacggaaacgacaagctaacacgcaaaacgaagaaaaagactaataaaaaccaaataaacagtacatataaagtaaacaaacatgtagatcatgattttagatgaatttagcaacttgatccactcaaaaccgagttacgatgatttagttatgaatttccgaagatttaatctattagaaaaaactggaaaaggagaagatgatgacgtcatgatgacatcatcaatggccggaccaagatggcgacctcgccggagatagagcgaccggctgcggatttggaggacatgaacacgtagaggacgacgagacgaacccaacgatactcaccctcgtgccaaacgacgaccgacgacggccggcgacgaggaggcgacggcggcggctcgggttgcacggggcggcggagctccgatgaccggcgacggaaaaggaagggtggccgagcttcccctcaccacggcgcacccaacggtggtgacggcgaccggcgacgacgatggagacggcggcgcggcggcaccggagatggccggcggcggcggtttgcttggcggcggtggcgacggagctacggagcacggaagaggacgggagagggggcaaacgaaagaggaggactagggggtcctatttatagccttggattgaagagatcggactcctcccgcaagaaatcgatccgggaaatcaaaaactcggttttggagataaactcgaaaacgagtttgattcggataagatactcaacgatttgctccgatttttgggggtaaagatagaggaggataagaggaatatttcccctcaacaaaattggaaaaaaagagcaacggggaggcaagatttggaaggaagaggcggcggcactgtgcacggcacggctggctcgggctctgcctgagttggaagatgaacagtagcgcagggagggaaagtagacttttccggctgagctgagaggagaggaggcggctcaggttgggccggcggaagagagaggaaggaaaggaaggaatgggccgaaaatggcccaagctgaggaggaggattttattactttcccaattaaaataatcacttaaatgatctttgaattattaaaaatacttccaatgctcaaataatttcaagaaaaatcctgaaaatacttggacactcaaagtacttaaaaaaattacaattagaccatttaatgattaatttaatatgtgggtaattactgaaatgctctttgtatgattaaaattaggaattgagctccgaaaaatccgagaaaattccagagagtataattaaccatggagaatttaataaaaattaaatccatccatgctttatatttaggaaattttatttcccacatttaacttcacttgtaaattaatgaacatttaatataaattctattattaatttattaaataatttataaatcctgaaacgaaaatcaggatgtgacactcgagacatctggccatgtttcatggtcgtaattatccaactaaaatatgactgaatggtgggctatgggtgcatggttttgtgagtcgcacccatggcaattaaggaccagttcacgggaaaccctagaagacatacagtgcttgccacaagcgggagtgggtaactgcttgatctgaagtatagctcaaccctttcctaggcatcggtggcaagggtgggcgtgatggagttaggtcggccggggtgtccggttgtctagctgccggattcaccgcagcgcacaaggggactgcccacctccggggtagggggtgggggtgaaaccttagagtggtgtggatggttaggggagggttatatgaagggtcttgtcacaatcactcgacatggtgatgtgtcaggcctggcgcggtgacatgacgatggattgtgtcttgtgggaacaattgtgcacctctggccagagtaaaactattcgaatagccgtccccgcggttatgggcgatcgaccagattcaccgtgattagtcccaccttaataaattgactcaatgcactgtagttcaggtgggttggttggacctgttcaacgtggtgtagcgttgatcagtggagatttaatgttactttaattactcaacagttttaccgttttgctcaataaaatgttttacaaccgcctttatgcaaattgccacaaaccgtccttgtatccccttgcacgtttgcatcgttagtgtggcttgctgagtacggtggttgtactcagccttgctattgttcccccttttcagaagtgtagtgcttctgagctgaagatgaagttagaggatcaaggctcataccccagttgagttttgcctgtggagtggagctaaagcccagctaggatcgcctttttccgctgctactgcttttgtttcggtgtgaggactaagtgctcttctgtaagtattttacgctttatttacgtttggaactatatattacttgtcgttttgtgtaccctaactggtcctagatagggatttaatacacaaaatagtttgaaaatttgggttaaatttctgggcgtgacatttgttgacgactattaaataccaaatttacgtcgtcaatacctgcataaatatgaaaatatagaacatccaacatagtggtagggtttatttctaacaaattccacgagtgttggtatatatttggatgcatgtgataaattacaaaagttgagatgaaatgtacataaaggagggaaagaattacattcgtatcgaagcccatagactcttgggcccataaacccaacgaaatacctgcaactaggccaaactaccatgccaatgaaataaggacccacatgccatggcctaagaggaaggagtgggccagggggagccagccaggggtcagtcgaccacgcgccgatctccaatggccgcgtgccgtgcggctccgaaacagccacgcagctgctcgtaagtcgtagccatccctcctttgttttccctcctcgtccagtccttatctccttcaaagtgattgagccgaagttcgctattcctctgtagacatcaagagctaatctcgttttcatcccaaaacttctcctgccagatccaagtccggctgtgcagccgtttcgccggcgtcaatcttctgccactgcaccacggcaccgcaggaacacctctcatcggtgagaacatccccaacctttctccccttctttccttgcttgggtcgagctcccatcgtgctcctgtccaccaccatggctaccaccgtggtcagtttttccggcgcctcatctatatcaactaaccacaaaaatggaaccttctcatcccggaacgcattttgacacgctcactcgccccgttcgccaccggagctgccacttccatgcccggtgtggcggtgtcaccatagctccagatctggaactcgcgttccggctagcttcgttgtcttccagcccagcgtccacgtcctgtgggggtgtcagcctgtggaacacgtcatgctatcgtatccgtcgccgttccctcactggagctctagagcttttctctcacctctgttactcacgtgaaaagccaccggaagaagatgaatggcagcactgtttcctattggtaccatcaaaaccacctaaatagtgcctaaccacagtaaaaccagtccaaacaattctattatgatgtttttctcatgttcgagctctaaaacaccaaatcaatttcagttttcacccttgtcatctatagcattaattgcaaattgcaatcgctactacatataccatgaatcataaccctagaataaatcttttgtcatccaaatcaagttaactcttgatttatcattttcttttgttcgggctccgattcacaatatttattttatcgtttatttataatatttttattataggcttatttggtcgtttcttcgtgtgcgcatgttagatcgtgttgaagattccaccggattcacaggaactgaagtggacctagaaggctacgctcaagcttcagaaggccacgttccacaaggcaagccacagttccaatctttgatcatattgaaatatagtagagaaccacttagttattttctgcattgagtatttataaaattattttgcgtatgaattattttttaataaacttgttagtttagttattacccattattacattgttattattggccaaatccatgaattgctatatcacgtcctttgataacctaggtgtagatttatatacttcacaataatattctagtggataagaccaccaaatatctatactcatatacatggtttacccgtcgtcacgtggtagcgtgtcgggtgatataaaatgtgttatttgatatgactcactcgcctggagtgatatggaagaacaattccgggtgaagatggatgctgtggtatgtgaggccgtgcatattgttataatattttgtggaaagtgtatattacacttgaagtatgcacggacctatgctagttttggtggctttccccggatataaggactaccctcttatgccatggaaaatgatgtaatttgcgcccatccacaggactgagtaattagacttagcctagtacattgtcccactatatgaaagactgtagggtggctctatgagcaggtttggggtggacatgtggaaggggcttcggccaggttgacatgatccgcaacggtggaacccgtgaaagcagcaaccgtctagccttgcttaggcccagcaagtgcccgactgctaggacggatcaatatcccattgggcagtaactagtagtaagtgggactctcgagtggctatgttgtcctcagtctagctagctgttgacatcaggtgggtaaagctaggcagtctctacagagatgagtcttaaatcatttgaatgtgctgtgcttccggttcagaagctatgtcattgggtgattcctatttatcatggtatgagtagatttttaaattaaaatatagaatatgacgaagatgaggatgaatggtgattaatattgctgctattttaacatgatgatttacaactgtttgcaaatgaaatgttttacaaagtagggaaaaactatttataataggcttgttatcaaacctccttgatgagttcggacgatcaatccttcccggaggaggtgcaggcaggggaagaattctatggtgctgatgagttcttgttctaggtcgatctgctctcaggcgttgcctgtggtgtttttatcctattttgtgtatgggtcttttgtttgtagggagtgtttttggcctgtcggcccctaaagcctgtcttagttaaagatcgctaccaatccgggactaaagatcgctatcattagtcccgggtgaaataaccgggactaaagatcgatctttagtcccggttggtaacaccaacgggactaaagatggctcagccacgtggccggatgagccatatttactcccggttggtggagctgaccatttttttttttcatggccctgttgctgcatggtttatatatattttatatatatatataaaccatgcatatatatgtttcaatacatatatatgcatatataatatatgcatatatatatatattatattatatttatatatgtttcaatacatatgtacatgcataatatatatgtatttataaatatatatgttatgcaaatgcatatgtatatatatatatatatatatatatatatatatatatatatatatatatatatatatatatatatatatatatatatatatatatatatagaccaaaatatatttacattatagaaaatgtgtacacatgcatatagaaacatatgtagtcatgtattaatatatatgtatttatacatatatatgttatgcaaatgcatatgtatatatatatatatatatatatatatatatatatatgaccaaaatatatttacattatagaaaatgtgtacacatgcatatagaaatatatgtagtcataaattccttgtgtgtggtctggttatccctcatgcgaataaaatatatgaatgtatgaaattgattagtaattaaacaacaaatcgatacgtaatgaaattttgaatttatttgtacgtacatcgagctctcttgtggtgatgatttggtctgcaaggcagtggcaatactcgcacacgtagtagccgcacaagttagttccctgcttttgctttgcgcagtacaaataaatgacaaacgacgagagatctaattaatatacacttgtatgtatttgaatcggagaaatataaatgtagagcatgtgtactcacaggaaatttgaacttccgcctaagtctttctctccagttgccgcggaccaaatgacggaaccgataccaagccctacatggagtttaaagctttgattcgtagtagcaattaacataacaagatgttcttaattaacaaaggaacttatgacagtacctatctataagttcgaaaaccttgtcaaacgtagactcttttttatccattgagtcatatacgttgacggtgcaggccgccaggtcgaagagtaaaagcacccagtggaatctgcaatgtgcgtgggatgcattacatatgaaacacttagcaagttcgtacgggaatgaaatttggtataggaagacagtaaaattaaacttaactctgtgttgtacggcaacagtatgaacgtcttgtaatgctgcgccttcaggagatggacgagattgtcctctgtggcttgcggatattagtcgagcattgcgacgtttactttccgagggtcgatgaatccagtatcgaaacccccctgccgtcgggccctttgaatctccattctacaacgataaagggagtatatattatatatagtctacttatttacaaggacctaattaattaaaggagacgtagtaagaaatctaactgaacgatatacttacaaaatccagcaactcataatagagccgtcgagggcgtccagctggtatggttcgtagattccgttgaaattgatccagagaatgtcatctccttgcaagaagtttgtgtccctgatcctcgctccgatcatctctctaccggtggcactcatctccatgtacagctgatggaacttgtacatttgtgtgggtagggattgcagcagctcaggcttgacaagcagtttaccgagttcgtacatgtatttcacttccgccttttcgattggtgcgactcctagcaattgatccgtagttagactggtatcattaataaattcttctattccaatatcttcaccggtcaccaacgactcaatctcttggtttggttgctctccaagctgagggactggtttggactttccagaagatgctttctttagcgtttgctcatagttcgatagctttatggtctccttggcaggtgtagacatacccctgaagaagttcctgacactcgggtctataggaatcttcttttctggacttcgaggcttgaattgtctcttgacttctgatgtcacgtaagcgtcaagctcctcttgcttacaatcataccccgggtccttgttcttggcggcttcaactttcgcctttttcgttgcccttgtgtgggcaggtggtggagcttggggggctcttgactttgaaggtgccggaagaggagcttgcgaaggagtcggtgcaagagcctgaggaggagtcggtgcaagatcctgaggaggagatggcggagccggaggagatggtgcacgagacgccgcttgtcgcccagggaggatgatgtaccgcctgcgccatagaataatggcatggcttgtgtctcgtagatgcgtctcaccgtctcctccagggtaatccagctcgaggtcctcgtacgcgccttcgaccaactcaactttgaccttggagtatcttgctagaatcggcctgcagtggtaagtacctgaagggtccgttgggatgaccatgcccgacgccaccttcatgtggtgagaggttatttattattaatcaacatatataagcagcaactagcggaatggtcaaatctaaaatatataaactacgagcttacctttattgataagttcttgaaaggaatatgcagctcacatggtgtccgctgagtgatgtcatcaacggggcaggtggattcgtcctgggtttgcatggcatccatgctctgtgatcctacctgccccgttgaggcgcagctgctacggtttcctgacgggctcaccattgcaggaggaatggtcgactggggatcatgggaccgatgtgcggccatgcgttcatcaaccttccttgccacctcctcttgcatgctgagctcgtagctcgataccctgaactctagatctgcaatcttcgcctcggtatctttcttgctcctcatccgactctgtacgtgtggatgtcctccttgaac

SEQ ID NO: 23640 - DNA, 2636 bp, Oryza sativa
atcaccccttttccctcgtgtttgtcctgaatgctctggagtctgcagggcgagtgacagctcgtccctctctctgtccggtcggaacgtgccctgagaagaggcttccactgcgtctgttagtcgacgcgcagcctcgtgtatctgatcgccgaagaccagggagccatcagctgggttgagcgttccaccgtgagcatagtactagaacttcgatcgttccggccaattagcggtggccagttcgatacccctctcaagcaagctagcctccatctcctcccacttcagcatcgcgacgctatagccgcctgaccccaagtggtgatggtacttcttcttggcgacattttctttgtttctttccatcatcgcctgcccttgttcacctgtcttatatgcaacgaactcgtcccagtgatcccttagctttgggaatgtgtcgaagttcggtgtctgccccttcaggatatatttcttgtacagatctcccttgaagctctgaaactgttctgccattttcttcagagtccaccttttcactttgtcctctgtacccgcgggaagggtgaatgtctcgagcattgtggtccacagcatctctttctccgaatctgggataaagctctcatgatctccgtgtgcccttgttctgcgcccgtacaccgtactgacaggcacgttatcccgcacaaccgaaccgctgtgacgtacatagttcttggcggcttctgccgaggcactaggtcgtccgtcttcatccacttccgttatgatgtgccgaccctcaagcttcttcgcggcacctcgttgcccgcgtgccctcttctgtccaacgaagggctgacttccactagccttctcctcctggttcccctccacatccctttccacgtgcccctcctggttcccctccgcatccctctccacgttcccttcctcgtttaaatactggtttggattctcgttcccctcttcttcgttccagtactggctgcttccctccgcgattgtatcgtacaatatctattcctcatcgcgatcagccatctgttcatacaggaaacatctgctaagtcatgagacatttatgttttaacaatcttatatgctaacaatcatatgctaagtctaggtgacgtatattataggaccctagctagtcaataattatatactaagtctaattacaaatataataatcttatattaaaactcaaataatcttatactaaaactaaaatagttatgtatgctaagtgtaactatcgtatattagaaccctacacaatcttatatgctaagtctaattacaaatctaataatcttatactaaaactcaaatagtgatatatgctaagtctaggtgacgtatattataggaccctagctagtcaataattatatactaagtctaattacaaatataataatcttatattaaaactcaaataatcttatactaaaactaaaatagtcatgtatgctaagtgtaactgtcgtatattagaaccctacacaatcttatatgctaagtctaattacaaatctaataatcttatactaaaactcaaatagtgatatatgctaagtctaagtgtcgtatattaaatctaatagtcttattagcattacaaatataacaatcatatatataattatgtcacttgtctgcgcgaattccttcgagggctagctaccacttcggcttgagggacgactccgacaacgtcttttctgcaagatacaaaaagatgtattaggataaacgcgaagtaacatatattgcatttgacgttcacgtttcgttcacgatatcgttcacgttcgcgttctcgttaaggtcacgtttcattcacctacgtttgttcgttcacgttcattcacctgcctatattgcatttcacgttcacgttcgttcactattgttcacgatcgtgcacgttcacgttcgttagtttacgttcgttcacgttaacgttcgttgacgttcgttcacgctcgttagttcacgttcgtttgttctttcacgttcaattctcgttcacgttcgttcgctcgttcacgttcgttcgctcgttctcgttcacgttcgttcgctcgttctcgttctcgttcacgtttctttcgctcgttcacgttctcgttcatgttcgttcacggcggtggggcggcagcgggacggcggtgtggcggcagcggagcagcggcggggcggcccggcggcggcgaagcgcgcggcacgacgccggcgttgcgcggcggtggcgtggcggcgcggcgccggtgccgtgccgcggcggcgtcgtggcgtctcgtcgtgtcgtgccgccgtggcgtcgttgtggcgcgacgtcgtgtcgtgacgaggtcggcgtcggcgtctgcaacgaggcggccggcggcaaccgagagggagagagatagctgatgagagggaggcggcggcggcggagatggcggcgatgacgacgagcgcgagacgacagcgagatacggcggcggtgtcagcacggggatgccctaggcagtggcggcgaaggagaagccaagagagatcgatcgggcaaaaacttctaagtgttggtggagaagatgagggcgcgcatcgggaatatatatacccctagatcttt

SEQ ID NO: 23641 - DNA, 9523 bp, Oryza sativa
catcaaccgggactaaagatatttttccgctatttccaaattctttttaaacctggttagggttaagaactgggactactgataagcgcactgaatattattttccattacatatgtgtttctaaaatagaagataatgcattaaaattatttaaagtacaaagattaatgacaattacttcgaaaaattattgttgtgtgtaattaagtggataaaatgtaataagcaaatatatgatttaaaattaataaaaattctaataatcatatatacttagcatatgaatgatattaaattggtaaaaactctaattaacatatgtatatacagacggcatgatttaaaattaagaaaaattgtaatcatcatatatacttagcataggaattatatcaaattaattgttaaaaactctagttaacatatgtaaatgctacatgcatgatttaaaaattttaaaaattcgaatagtcatatataattagcatatgaatgatagtaaattaaattgtgaaaaactctaattaacatatgtaaatgccacatgcatgatttaaaacttttaaaaatttgaatagttatatataatttgcatatgaatgatagtaaattaaattgtgaaaaactctaattaacatatgtaaatgccacatgcatgatttaaaacttttaaaaattctctagtcaattataattagcatatgaatgatagtaaattaaatgttaaaaactctaattaacatatgaaattgccacctgcgtgatttaaaacttttaaaaattgtaagtatcgcatataactagcatatacatgatttaaacttgttaaaacctctaataattgtgcgtaattaacatatgccatacatcaattgatttatatggataatcaatacatccaaaatagtttacatcggagtctttctcagagtcccaattgctagggttgtcattttgggtgccatcattgatactatcgttgacatcttggtgaatgatgttgacattgcacgcttgattcgagtggtcactattggggcaagaagcatggttgttggtggtaacatcatcatcattagtattgctaatgttgttgtctgcattgtgtccatcttcttggggcggaaactcttgatgcgcaacagaagatccggtgatctgaagtggctcagtgcgctgtccttggttaccacatggaaatactgggatgttgaccatccttctcttgcagttcgtcatccgattatgctcactttcaagttgcatggctttgtccacaagtttctcaaaatcttcataatcctctaggagtagttgcactgcaagctcatcttttaacccctggagaaacttctcttgtttgtcttcatccgcttccacatcttctggtgcatagtgagccaaacgatagaactcgtgcaggtactctgtgacggtcaaatctccttgcttcaggtagcgaaactctcgttttcttagtgtgatcattcctgcgggaacatgtgatctcttgaatacagatgaaaactcgttccaggtgatggtatgtccttctggccgtgatgcttcgtagctatcccaccactctgaagccggtccaaccaactgatgagttgcgaagccaacccgctcctggtcggtgcactgaatcaaccctagcttcttctcgactgtgcgcaaccaatcactggcttccataggatcgacggcaatggcaaaggttggaggctcagttttgagaaattctgataacttgcactgttgctggactgtgggtacttgaacgttggttgcccctgctgggttgttccaattctgtaatagttgaaaggctgttgccaacatgttggtttggttaaccacaatttggattagctctggtgaggtttcgttgatgcttttctcattcccattggcttgggttcttgagtcatcggatccatcattcccatagcctttgttaccagtgttatccatctgtcacaaggtagaggttgagaggggaagcatacaaggaaagaatcgaccagaactagggacaagaccttaaaggaactaactctttttgttgatgtgttgtttgttttgcttattctgcaggttgattaagcaaacaacctagcatggttacatcacaacccaccgatgcaaaccacgcgctacacacacaagcaaggaacacacgactaacaacactaccctatagggtggcttaggttctgcgatgggttcccaagatcttcactccttcacagctggcttcactgcttccttcacttcactagcggatcctgcagccttctggagcttcggcagacaattgacgacatcttcttcttcactgacctgaccatctagtactagttgaaatttgaagaaggaagaaaagggtaaaccttgtgcaaatagcattagggaaaggagaaaaagagaaactttcgcaaatagttttatttataaaatatgtccttaggttttatccacttggcttatcctacagtcgaaatggctctgataccagcttgtcgcgaccgagaaaattgtattttcccgaacgctagtgtattaatccccgtcccaggaaaagccggggtacaccatacaaacatgatataaaagacacatctttattatatcgataatatttactttattacaaaggcacttaaggcctgacaatcaaaaataaacagcagcggactagcgggcctacggctccatcttcacaggcgctcaactggggtataagccaagactccacctaagacttcttctccaaagcttctcttactgaagaggggagaaagatagagcaagaatgagtacaaccacagtactcagcaagccacaccggcggatgcacgattaatgcaagggggtacaaggggtaatgatataggggttaagttttgcagaaaacagcatttaaaagtcacttagttgcccaaagccattttaaaaagacgatcctaaagctacacagtattattaatcaaggtcgtgaacccgcacgaacctgccttaacccaaggcctacgatgattcagaccgaactggcaacccgaccctgggtcccaactcgtcccaagccaacccaggccaaccattccacattttagttgttaagcaaattttaagaattaaaacactgacttgggtacattgctcggcttgcccataaccgagggcgcggctattcgaatagattatactctgatcagaggtgtacatctttacccacaagacacatcttcctcacgtgtaaccacgtgccacataccaccacggtatacggacggaagacgtgacatagtttccaacccatcctagccataaacaagagtaccgacccaaccccacctacggccggaacccccgggacaggcaggcaggattgagccccctagcagcaggacaccaaccctgtgccatgacatctcgactaccgggccgcagctcgtgtagccttcatttgtcctagagatgtccatcgacccccgacttcgtccatctccatccgtgtacttttgtttataaccagactgagccacaaactaagccttacccactagacatgtggaagtacggtagtgctttgcaacagaggcccgagcttaatccttatagtacccgaggtacgactaacaaaacccaaccacgcacctcgagcccagcctaaaaccattttgggggttttgattagagggggaggtgtgtgtccaattccaacataagccaaccattccatagtgtccaaatgatatgagaattcccaaagtctaaagttataaaaaccacctaatgttgtcctattaaacagcgaagcatctacctaaattcatactagtggaaccatgaatagagtgcccactagttggggttttgtttattctagggtgaacaaggcaataataacaatagcaataataataaggtcataacaaaggtaaataggcatggctaaataaaacagtgataacgcgggaatttaaataaagcgataatgcaataagttaaatcaacataattttacaaactgggattcaatatgttcaaagatgatgtgacttgccttgctcgctttcccaaacgccggcttcaacttccacgaagagcggatcttccgaagctgcagcgtctacacgaccaacggaaaagaaaaggcttttactctactaaactccatataacaagcagaaacaaagcacaaaaatgggttcttggcttcttaaggaaaaattagagacttgaacggtccaattccgagttcaaatggccaagttatggccatttgaagtttatatgctctttaaatggatatttacgaatttcttcatttaaattttaatttaaaaacggatttattgcgtcagccgaggggagggacgcgcggaccgggtccacgggagtggggcccacgcggcagcctcacggtccacggtggaccgggtgcacgcggcttgcgccggccggcgccgtgggtcccacgcgtcagccgcacccgagggcgcgggcggctgatggccgggtcccacatggcagccgcggggcgcgcccgaaggcggcctcgccggcacagccgacgggaggcgacgcgcccgcgccccgatggtcgccggcggcgacctccggcgcgacggagcggcgcccgagagaggggagggaagggggaaacgaaagggcggtccatggctcaccccgggtcgacggcgacgacgggaacggcgaccgaagcggagagaggcggcgctgcggctcgggtcgacgaggacggcggcgttccggcggtcggcgggcgaaacgaaagagtggacgagatcggcgaggacgcggcgaagccgaaggtggcgatgccgaagcgggaggaggtccgaggcaacgactgcggcggaccggagctcggcggtgacggcggagagaggggacgacggcgcgagctcgattccgacggggagagagagcggcgagaggcggaaacggaggagggaggcacggggaacgtttatatagcgttgggagggagagagggcggccggagtggaaggaaaccggcgcggcgatctcgggctccatcaaagacgccggcgaggtttgcgggaggattccaaacgaatccgagggagagagagagggaaaagtggggggaaagagggagggaatcacggggagtgatttccccctctttattgcgcgcggggacggcgggaggcggcgggattcgcggcggcggcggcgctagggcacgggcgaggcggcgggagcggcgggaggatagggatgataggtgggccccacccgtcagcgagggtggcgggcgggcccgcccgtcagcggcgcgcgcgcggggagaggccgagtgggccgcggggaggaggagagagagggaaagagatgggccgagccggcccaagagggggagggggggaaaagacttttagggatttttctttttataaaacctttttaactttgtttatttcttaataattattatttgtgctctgaaaattccactaaaatttgagggttccttttagaccaaggagaatttaacaaaaattctccggggcacatttgaatttttattgtacgtattttagtgtttgccaatttcttttcgaattttaattaattctattattccttttagagaatgatttttatttcgggatgaatttatcaggacgtgacattgttccatcgtgtcccatggcatcgacacgaacaacgctgttttggttcgtgctcgtcatgtcttgggctctcgtgtagaatgtgtacccattgatctcatatccctggaatgtcgcgatcgacccagacggtcccctcgccaggaaggcaagttgttggttgatggactcgttacccatgagatgttgtcgtagccacgcggggaaagtatcaatgtgatgccgtgtaatccatgcatcggacttaccgatgttcctggcacgaactagagccaagtgctcctcgatgtaaggagctaccaatgaagattgttgcagaaccgtgaaatgggctttacttatgttcgaagtgcttgcctttcttccgtaccgggtggtttgctgcaaggaatcgatgatgacccatgtatacaaccttcctacagtgcttaagatacgtaatttctgtttcatccatacagtgagtgcaagccttgtaccccttgttggactgtccggataggttgctcagtgcaggccaatcgttgatggttacgaacagcagcgctcgtaggttaaactcctcctgtttgtcctcgtcccacacggggacaccttccttctttcacaacagtttaagatcttcgaccagtggtcttaggtacacatcgatgtcgttaccgggttgcttggggtcttgaataataatcggcatcattatgtacttcctcttcatgcatagccaggggaggaggttgtagatacgtatcgtaacgggccaagtgctatggccgctgctcatctctccaaaaggattcatgccatccatactcaaaccaaaccgtatgtttcgtgcgtcctttccaaattctttaaattttctgtcgatgtttcgccactgcgaaccatcggcggggtgtctcagcatcccgtcctgttgacgctcttcagcatgccatcgcatcattctagcattccccttgttcctgaacaaacggcttagccgtggtattatagggaaataccacatcaccttagctggaattctcttcttttttagctgcccgtcaacttctcctggatcgtctcgtctaatcttgtatcgtagtgctttgcaaacagggcatgcttctaggttctcatactcctcaccacgatataggatacaatcattcggacatgcgtgaatcttctgaacttctagtcctagcgggcagactatcttcttagcctcgtacgttgtctcgggcaatttgtttccctctggaagaatgttcttgacgagtttcaataaatcgccaaatgccttgtcactaaccccattttttgccttccattgcaagaactccagagtggtatccaactttttgtgccactgctcgcaacctaggtataacgaagttctgtggtcctctaacatcttgtccaatttatgggcccccttttcactttcgcagtcctccttggcgtcctgcaacatctgaccaagatcatccgcaacgtcgttaccatcagcatccctttcctcctcgcctgtttgatttccttcaaatccaatgtactgagcaaagtccagaatattgtcgtcttccacttcatcttcttccatttcaacaccttgctctccgtgggatgtccaacaattatagcttggcatgaactccgactcaaacaagtggaaatgaatagtcctggatgcagaatactccttctaattcttacacttattgcatcgacaacaaataaaacccctttgcctgttagcttcggccactctcaaaaaatagtgcacgccgtcagtaaactctttggaccgccggtcagcgtacatccattgccgatccatctacatgagtcgaaaaaaaatcgtacacaaataattattcttacaataatgacagtcatacaataattataacataattacaaactctttcaacagtcatacaataatgacatatctttattcatacaaaaatcataaaatattacaccaaataattcttatttactatttctaaagttttaaactaattttaacgtgttttacttcttttaattttcattttagtatgttttctattatttaagattaactttcactatattttccttctcaactattttatgaaacgtactttagcaaatcaactaaatttctatatattctttctttctcacacaaattttctctctcatcaacttacaaataaattttggagacaaaaaagtgtgcaaaacatagctgcaaatgtaatatgacaaaaaaaacattggaggatgaagttggaaaccttttaggcacctccgatttgtatgtaatccccaaaataaatttactagaaattttggcatgacctcccctcttttttgaagaaatttagaagcttgctcgggcagctggaggaggaagaagacctatatataggggtgggattttagtcccggttggtgttaccaaccggtgctaaagatcctcgagatctttagtcccggttggtattaccaaccgggactaaagttatgatctttaatcccggttggtgttaccaaccgggactaaagatcccgggggggcctgataggccctggcagcatttgaaccgggactaaagatgatctttagtcccggttggtgttacgaaccgggactaaagatcaaatatacccgttaccctttttaaccgggactaaagatcatctttagccctagtttttattgcatccgggactattgtgaaattcggccgaccgacgaaagatggtttctcgaccagtgcatactcaacccgggtatccccagacatgtcctctggcgtcgggtcgtctccacccctgtccagcacctccttgaggttcatctcggggtgtgtgagttttaggcacatgagaacgtgacatgcaccggtccgaacaccagagcatgtttcatcggcaactcgctcggcgagcttggcgggaactccttcgagtttcccgattaaaaagccaagcaaggactccacggtggtctcatcggggaacgtggggcccgcttattggattctcaggttgcgtgccaccacgtcgagccatggctaatcgaatccaggtggccctgcatctccatcatcagcttctccatcccctggcgctgccccacgtggctggcaacgaggtccttgaatttctacaagtcctcctgagcctccgtgggcatgttctccagctgtgcaacactcccatccgaggacgaaacgattttctcagttcgtttgatctcggcgagcatgtcgcatgtgctggcttcgagcaggcgacgcgcctcccctactatattagcgccggggcgggacgtggcggtgagtggggtgaggcagaggagcgagcattgttggtgcagtggcgataacagtcgggtaggagctggtctccacgcgcccaacgctttgagcggaagcagtggaagaaacgctgccaaagacgaagtcggaaatgctaatgggtgggtgatcgctcccccaccagcctagcgatcacccgcctgccccctctctatactagatacactcctccctcctcccctactacagtacacaacacaaaaattttttaaaaaacaaaaagttagaaaaatttatgtatagaaatactatatataaaaaatttaaattcaaattcaaaattgaatcgggtatgtaaacattttgacttataaactttgggtctataaattttaggtgtataaactttagatgtatagaaatactatatatagaaaaaatttgaattcaaattcaaatttgaatcgggtatgtaatctttcgacttataaactttgggtctataaactttaggggtattaacttta

SEQ ID NO: 23642 - DNA, 4362 bp, Oryza sativa
  unsure (1)..(4362): unsure at all n locations
tatatagaaaatatttgaattcaaattcaaatttgaatcggatataattcaaaattcaaattgaaacaggttgaatcggatataattcaaatataaatttgaaacatgtatctaaactttagatgtgtaaacttgaggtgtataaactttaggtctataaactaactttaggtgtataaagtttagatgtatagaaatactatatataaaaaaatatttgaattcaaattcaaatttgaatcggatatatgaacttttgacttataaactttgggtctctaaactttagatgtgtaaacttgaggtgtataaatttactaaaataggaaagtaacacggtgccaaaaaagaaaaccaggtggagggaaggaggggggaggggggtanngaatntgatngctacccccattggcgggcgatcgatcacccattagggctgcccagacgaagtcagcgagtacgctagatgatgtgatttgatatatgagaatcaggggttagtttttgacttactcaggcttcagccgctttaaaagtctgtccctctttcgtgtagagggagcagccactactacgaaaatgcaatccgcccgtttgcaaaaacggtttttgtagtagtgagcaccgagggtggcctgcaagatgtataagtgagaatcctatacttatctcaagaataccaagcaaggatcggagattgagatttacctcggagcttctcgtttgtacgagcgtcccaacactaggcgaaggtttagatatccctacccatttccgtttggagattttcgtgccactgctgctccaagcggcagcgacatcagcctgcttggacaccgccttttccttaagagatgaggtggcttggtgatcgatgagaggaccgatggcatccgtcaacggtagatactatacaacttcagattactacgtctttggatattgttacaaaagcaaagaggggtagtttgaagtcaattacgttgatggcggcgtccttgttcgaggacaggaggtcacacaagtgggtcgggaacttgtcgtagcctgatggagaattgatcaccaggtgacctactcgtgtggccatagtgttgttatcgagctccgcaaatggaatagtaacattagcatttgagatcaaggcattacacaactcgaggtcaggagggttgtgagaacgactaccccgaaccgagatccatgtcttattttcagttcctaagtaatcgtacgcggggtgagcgcgagcttgtagtggctcgatctggcgacgtatgaagtccctagcaagttcataccccgacaactctcattctcggaggtcgtggattttttctatggaaacttggagtgagggttcaatgaaggtttggatgtccaagagggaggccgttcgggtttctcttctaggatggcaaggttggaggggcggtcctctacatggaggtagaaccatttagacctccataagctccttgaggaagggcagtcgaaggggatgtgctctgccttcatcccgtccaggagatggaaaaccacaacattcggagattctgtgggactctatccatctgagctcataaaaatgcctaaaacagatctaggaaggtgattgagttggggtttaggtggagcagatgtaggccatagaagttgaggatcaagagaaaaaattcggaaggagggggtagaaaaccgcatcgaacaaaatactcaagaactatgatttgacctaaagagggattaggttcaatacctccttccgtacgctccaagttctgtcaccctgttgacgaccaaatttggtaagatatgaaccaggttcgacattggaatcgaggcggattcggtaaagagatagattcgaagaacagagtttgcatcggctgtgaaggcatcggctggagtctgcatcggctgagatggatcggatagaggacagccgatacagccgatagaggtgatgcagccgattccgatgacgatggtttcaaggatgtttctagaatcgatcaaattgcttcacgaggattgccacgatggagataaagttctcggataggcaaatgtatctattaattaggatatttcatgtaattttcttagagatatgtttgggcaaaagtctgccgtaaaggcttatggtatcttagagtttattagagataagtgtcgtgtccggcaaggacatattttgtaatctcgggtataaatataacccgaacccatgtaatcaatcatcacacgatcaatacactttcggcgcatcgccaccctttttactttcgttctatttcggcgagttcttgctttcgggttgagctgcatcgatttgatcttcaactagaggtaaacttgtcatggcggcttgcgttatcgggattagtgcttccatatttatgacactctaatcctgtttatgtaattcgtcgagttatcatatacacgtcgcaatctttgttagtcgcattatataacttgttatcgactggttcttattgctagaaaacaatcgatagggttatgttctgttattaatctagattgtatcgtgtatctaccatctcttagagtttttcatcatcttgcctagatcttatacttgtctttatgcttaatgctgcatcggttgagatcgatctattaagtaatatctgtaattatgatatctggcatgttttatgattatcaagagagatagtatcggggttttagctgatcttacctgattgtgcttgattgatatgctaagtctgccctttatattaagatcctattgcaataaagtatattaagctacttgtttgatatattctacttgttctaatatcttaatatagagtggtatcggagtactagccgatacatgctagatctatctgatcggctatgctataagcgtttataatctttgtgttaatgtatacttcgatctaagtgatttatactgtctcagtatggcgaccgatctatcccaatcacttggtttaaatatacatcaacagaaggattacataacgttaatatctacagccgatcgagtagatttagtcttactttgcgtacttataattgccgatcgattcacatatgacatcggcttgaaaatacatgatatgtcatcggcgactggtcgatcggctatcgtttatggatttaaccgcggtttttcttgtttttctttcttgttgattgcaggatcaaatcaactggcacgctcacgaacctaaaagcaagattttggatctgcactgaagttaagcagatcttccaggcagtgtgcgtttttcgcatcaacacgcttttggcatgcctggtgggaccgacaagtaataacaatgtcagcagaaaagcaatcaccgccattaacaggcaagccgccagtgcctcctcaaaccaagctgccgaaacctccagggactaatctaccttcaattggggttgagtccaaggtcaatgagacaaacatcgtcccagtcactgtagacaagttatcaccagaacaaaagaaggagtatgaactgatgatgaagagcgctcaggagcagttcatgaaatcgtttgcagcaacccgacaaggaaaagttatccaaaagtacaaggtgaaggtggttgctgccgatgaagttggaacaagttcatcccaaggtggtaaaggtactgcagatggctcaggcgataaaggtgatgggcttcaagatggtgtggttgaagatcttggtgaagatggtactgaagtgcgggaggaacctcctaggtgcacaaatttccaagaccaagttgattatgccgtacaacgtgccttgatcaaccaatctggagtgcttgtcaatacactaacaaataagatcaaatttgtcattgatggcacgatagctgagtatgagaacatggggccagtctacctaccaggtggtgtcttcccaaactacaggaatttggtgataggaaatcagcagcatgcttccaatgcaccatcagtccagccgacggcaacagtttatgctccagcaccggttgcaccttcgtcagctcaaaggcaggtggttaatcctcgtctcttgtctagagaccagccgcaacatgttgggcagaacatcaatcggctgactcaggagcagactgctacaatgttcccaacaactcagccgattgtcgagccagtacagtcagcaccaattcagtagatgtcaccaagagaacagatggcttagccgattcagtagcagacggtgcagtagatatcacctggcctgagaacacctgataatcggcagaggcaacaaaatgtggcccaagttattcctgagcacctggtacatagtgtacaaccaaatcaatcggttgtagcccaagtta

SEQ ID NO: 23643 - DNA, 4559 bp, Oryza sativa
ggcacccttatcctgagtggtttgagagagttccactgccgaaccgatacaaagtgctagatttttcaaagttctcagggcaaaacaacatttcgacgtacgagcatgtcagccgattcttggctcaatgtggagaagcatcggctgtcgatgctttaagagttcggttgtttcctttgtctttgtccagatcagcattcacatggttttcttcattgccctgcaattctgttcaaggttgggtcgacttggagaaacaattccatagttacttctacagcgggacccatcagatgaagctctctaatttcacggcggttaggcagaggcatgatgaaactatgcaagattacatacagaggttcagagatatgaggaacaagtgttacagcttgtctttgacagattcccagttaaccgatctcgcattccagggtttgatagctccgatcaaggagaaattttcatcgcaggagtttgaaagtttgaccatgcatgagcaaaggtttgtggaggctaagaaaagtttcaagaagatcaatcacgtgtatccttatatgtgtgattttattttgtttgagattctgtaatgttttttcttttgtttgatctgtaaatcaaaaagaaactattgaactagaatgcaaaaatattctcaagaagaagccaaaagaaagagaggtgaaacagagtagagagaatcgggtgcttccagtgattagttgtcagaaagcattgttttccatatcagattctgcgcctatgggccactataactatccaagaagacactcgaaaaaggaaggataaacaaacctacccggtggactgccgagttctagaaaggaagagaggtatgacattgatattactaaagctgataaaatttttgacttgctacttcaggagaagcagatacaacttcttgctagccacataataccatcggctgaagagctagggaaaaggaagtattgcaagtggcataattctgattcctactccaccaatgattgtaaagtctttaggcagcagatccaaacggctattgaaggaggaaagatcaagtttgatgattctaaaaagccgatgaaggtggagagacttccttttctcgtcaacatggtgcacacagctggcagagcagctgatggaggaaagactcgaagttctcagttgaattcagccaagatcgtcaataaatatcagaaaaggcatgataagcaacaggagaagtactacgagcaagatgatggtggttttggtcctcattagggttgtgagttcttcaggttttgctagaatgaggggatgaggctgccatcaattgaagattgccctggctgcaatgacaacgcaggaagttcaagccgatcttatgatagaagcaatcggctgagtgataagagggttcctgttcattagaggttgggtccggtcaatcaagattgtcatcaagatgagaacgaggataggaagacgcaatggtgctcttctggtattttcacgaagaatcagaagaggagggttcaacggatgaggaacagggagcgtttccaggaggtagaacaagaaatcaatcattggctaaaaaagacaaaacccaggcatgagtggcgtgtcaagagtaaggttgcaacagccgatgaagttgaggccgacaaagcaaaaaggttggctagaggaaagaatgtcgcatctacatcggtgaacatggtgtttatgttacctgcagaatttgacgctagataagccaatgttgatgatgttgaagaggcctctgctagattggttttgtcgccagagcaagcaatttttgagaaaccagaggggacagagaatcggcatctcaagccattgtatgttaacgggtttgtcaatgggaagccgatgtctaagatgatggttgatggtggggctgctgtaaatttgatggcataggctacattcaggaagctgggcagaagttcagatgatcttatcaagacaaacatggttctcaaagattttggcggcaatccattggagaccaaatgtggagctgacagtcagtagcaagaccgttcctacaacattttttgtcatcgatgggaagggttcttatagcctattgcttggaagggattggattcacgctaattgatgtattcctttgaccatgcatcagtgcttgattcaatggcaaggtgacaagattgagatcgtgccagccgacaggtcaattaacgttgctagtgccgatttagctctttgggagatggacgggattgattgcctgtctggaaaagtttgggatggagatttttatcgacggtcgttatcgatcagtttcgactgtcaatattactaaaacaggagagaactagtgatgcttgcaatgcataaatatgttagaataataatattccactagtattaggtctactaaccttttgcagagaatgacaataaagtgaaggagaatcgacatcaactcagacgataaatcaatcggacgatgttgagaaccatacttatgtatgaatgggtgaagaacgcagacttgacacgatgaatcaggccaaaattcacaagtctacgaagtaaagcagcagaggaggccgccagccgaaatttggctgggttgggtcagccccaggttttggctggatggtggagatgaagccccaatgacggttggagggtattaccgaccattccaaccgtcacaaccgtcatagttcagctataaaaggatttcaccttctcacttcactcacacacctcaagcaagaggtctctcattcctctcaagtttagtttagtattatctagctggtggaatagaattagaataggaatcaggagtccggaagcctttggaagagttcgggtatggctatagtagctttcctttcctcttttgtaagctttgtacttttatccgaatactcttctaaatacatttctagtattgaaatactttccgagtatataagtaccaactttacattatgttcatgttatactgaatatacggctagctaatctgggagatgctttggtgcgggtatagtgtttgcttatgcaattactctatgtcatgacgatgatattagagtagtatttggtagtttaggcgtggtgtctagagtacgggatatcattatttggggttacatattgcggataagaggtgagccgctgatggtgacagctcactacgagtattcctccgcgcctatatataatcctaagttaatttcctggggagggtattcctccgtatttagccccggttggatggtcatgacgggctgtcgtaaggaactcggcagtcaggggtggtttctcgaagtaccaggagggcatcggatagagggtattagctagtatatcagttaactagaatgtatgtatactatgtgtattagaagtataggaatagattctctttctcttttctttccacctagcttagatgtcacaccgtaaaaatcccaaatttataaattgttgtttaaatggaattattagaaatgattttaaaagcctagaagaaaagatctaattttaagtaataaattcaaatataaaagtgggctagataaaattttatcaaatacttcacttgattagttcctagatttttctaggatttatttgagccaagaaagtaactataataaatggaattgcatttcatgaataatttaaaaggaaaaaggtttaaaaatccttcttttggttttgggccgagagttagcccaagtctctctttctctccggcctgctcgcgctcggcccaagccggcccatcaagccaatccgccctctctccctcttctctcccgctggcgggtggggcccacctgtcggggtcgtcttccatctcccgccgccagccgcgccctagccacgcacaagcctccgccggacgccatgggcctagctgccgccccctagcacctataaaaggatcctcaggacctcctctgttcgccgccaccttcaccctagcccgccgtcgcttgtagcgccgcctccacgtcagcccgtgcgccgtcgtcgccgccgcaagtccagccgtgcgccgccgccgctctggtcgtcgtcgtcgctcgggaaggtcgccgtcgggatcaccaagtcgtcgccgtcctcgtcccgtactccgtttccaccaaagatcgccggagcatcgccgttgtcgtcgacccgaacatcttcgctgcctcgccctcgccgccgtcgccgtcgtttgtcgtccgtcatcgtccgagccctcggtgagttcgccacttcaccctctacctataggtgttgttcgtttgcgccgccgcgccgtcgttcgccggcaagcaagtggtgccgagccgccgtcggcaatgacgtcatcgtcgacgtccgcgccacgtcagccgtagacccatggtaggtcggttagatctcggccgttcgttttgtttagattagatctcagccgttcgttccgtagaccgcttctgtccactcggtccaccatgaacccgagccccgctgacgcaataaatcctttttccgtttcaaaaataattctt

SEQ ID NO: 23644 - DNA, 10432 bp, Oryza sativa
  unsure (1)..(10432): unsure at all n locations
aatgattgtttgtgtactgttttggtgattttactcttttatgcttagattccgacgttctcggagagtccgattttgtaggagaagactttgaagaattccaaggccagcaaggcaagtcacacagatcccaaacaacccttggagcatgttaatcctgtttaaatctattgtttctattcaactattgcatttatttttgaatacatcgggtgggaatgaactatttcctttgttatagtcattttgttattgattaccaatactttgtcacctggttaataattgtgtcagggttatggttaccacatacctaatagtagttgactaaatctcagcaggacccactacataccatatcctatacggaagcaaccttcggatatatgaggagttccggataaggaaagacaaccagagttctacatgaaaacgagaaggactactcggattgtatccatattggtttccctagttctacttggacaaggggacaccaatgagtataaatacaagcccccttaggaggagaggggagaggagacgatcaacacgatcggcacccaccatggaggatcaacactcaacacaatcgacatagaagccacaacatggaagcctacatacgccaagacacgccgccggatatcgacttcagggataagcacgacttccgaatactgtcaagagagacgaaagcgctatctctgatcttgccaggcacggatgcgaggagaaaggctaccctattgtcgactatgagtcagaccgccatgtcgacaacagttagataggctaccctaaatattgtactggtgtgattatcatgaataagagcaataccggcttcggccaacaggatgtagggttattacctgacaatttaggggcccgaacctgtataaaaatccctgtctccatctcttttacctcagtctcgcatatatcctagcaccgacgatccccatactatgcaaataccagaattgcgacatcaaacgtcgacagtggcgcgctaggtagggggattttggtgcttcaggattttgacgagatgggttcaaaagatggattctccaacaacaagctactcgatgacttcggctgtggggagatccaacttgtccaagtacatcttccgactagatcaggaccatcatcgtcattgacaacttggtctatcgagatcatccaagcctcaagatacgcagcgtaccaaaagatgtcagatcatatgatgtcgaacgagtacacaataaggtaattggtagattggtttttcaaattgatctactaatttcgtagatacatccggcatgtatctacaaaggtacgcaatattttatctgcaatttatcgtacctattcagatcatacagcattgtcagatccatgatttattatgtttacctagagcatgttctttatacaataatatcggttgcgcgggtgtccccgatgttaaatcgactacgatctaacgctgggggcttgctctgtcttcttctgtataaatcatgcttgtttacggtttacataatgccctgacatttacatctgctcgttatatcctgataatactagaagatccatgcagttttttgagtacatactcgatattctctgctatatatcctgccttctagaaaatatttttcaggaacaattgagcactcgagtaagttgtggtcgagtacaccacattatcgagaacgatctcgacaaatgcagagtcgtcgcgcccaacctaccaacgaagaccgacnnnnnnnnnnnnnnnnnnnnnnnnnnctggactactcgagaaaaggttgttaacggataattcctcgcgaacgtcgtcggcttgatcacctgacatgattgtgaacggacatccgcatatgctacaagttgggtgcatgagtcatcctggtcacatgagacgcacataataaaccaactctagcacttccattggtgtgcgagagatcattctacacgttcgtggtcctcgaaccagtacatagtaatctctcgcaccgcaagcttgcatcggtgttcgagagataatcctacacgttcgctggtcctcgaaccagtacgtagcaatctctcgcaccgcaacctccattggtgttgagagatgattctgcgtgttcgctggtcctcgaaccagtacgtagcaatctctcgcaccgcaaccttagatggtcgaggtacgactacagcaatagcgcaacggtcctagcaccatgaattcaaatgatcgagagacacctactcactggttctcaaccagtcaatcgtagcgatctctcgtacatttacttacagtggttgagttacgactactgcttggttcttgaccagctgtgtagcgattctcccactatttccacttctagtggtcgagttacgactactgcctggtcctcgaccagcggtgtagcgattctcccactacttccactttaagtggtcgagttacgaccactgcctggtcctcgaccagcggtgtagcgattctcccattacctgtactccaacaaagttgatatcaggtacacaagatcgccaagtgttttacccagagatcccttaccacaaaagacacctagcgttgaaacctatcatattgtccctttacgccgtcatgacaaggcctccgaggaacctaagggaacttcggctggggacgcccagagccgataaggccttgtttgatccttcagagacgaaagaccacgtaagatctggtcgtgtaagagttctcgccgtgcgtattaaccaagccgtgtaattggaaattgagttttccaacttcatggctgggggctaggatcagtgcttgttcaaccgaggcaggtcaaaggtccaagagccttgtcatccgagaacgattctccgacgacaaggctgggggctagggagagtgtatgactctgcaaactgactgatcggagtcggtaagagagaagacgctcatatacaaaacactggtctgtacattcaattcactagtctgtcattttataacatgtcaccctttgagcattcgctcaggggttatttctatctaatattcttttctgagtattgatttcaggaaaattctattcttttctaagtattgttgaggaatacggaatgaagagatggtgtacccgccgagataaaatttcttgacttcaatccaaattctcgattacagcaagacgggagacttagttgtacgctctgtactttctcggtcgacatcagagattgacttagacaaaccctttcggtgcccgcacgaggctgatagaggaagtctaacgttatctctaaactcaccgagaacggtcacatgagctcgataacagttcctccaaagtctgcggttgagaatatgaactcgttcatttgcatcgaagtcgggggctactgtcagggttatggataccacatacttaatagtagttgactaaatctcggcaggacccactatataccatatcctatacggaagcaccttcggatataggaggagttccggataaggaatgacaaccagagttctacatggaaacgataaggactactcggattgtatccatattggtttcactagttctacttggacaaggggatacctatgggtataaatacaagcccccctaggaggagaggggagaggagacgatcaacacgatcggcacccaccatagaggatcaacactcaacacaatcgacatagaagccacaacatggaagcctacatacgccaagacacgccgccggatatcgacttcagggataagcacggctagtaccctacggtgtctccggatactgtcaggagagacgaaagcgctatctctgatcttgccgggcacggattcgaggagaaggctaccctgttgtcgactacgagtcagaccgccatgtcgacaacagttagataggctaccccaaacaggatgtagggttattacctgacaatacaggatgtagggttattacctgacaatacaggatgtagggttattacctcagtctcgcatgtatcctagcaccgacgatcgccatactatgcaaataccagaattgcgacatcaaacgtcgacaaatttgattagcaagaacattatatggttttagctaaagtaattaggatgcttagccatggttagagacactagctcatatgaatgggataactaatgattcactattacttaatgatcgattaatggtagctcatgatggtcaatcgtgataggatggtttattaagatgccaactaaaacatggtaatggtgggttgtgagcacatggttttgatggtcgtgctcatgacaattaaggaccggttcacgatttttggttgtgaaacattaaccgtgccaaccacaagccagcgtgggcaacggctttaccttttgtatagtgtggttcattgtgttgaaccagactgagaagtggcagagataagcccacgggggtcgctggggagtccatgccttgttttataagggggtgattatgatccaggaaaggtgcactgctttgaattgtgttttgcggagggtattgtcacaatctctattcacaatctctattcgagttcttgttaagtatcgcgacgcatggttgacatgatgttgaggttgtgtcttgtgggtacagtggtacacctctggccagagtaaaactattcgaatagccgtgcccgcggttatgggcgggtctaacaatgtcttttgtgattagtctcacacctctcaccataataaatgatgctgtaattggtaataacttgtttagctcctggtttggaatggtatattcctggtttggagatagaactgtgcagccgggaatggttgttcagaatggttgggcctatgcaacgggtatgttgtatagagttggattaatattgtttaattaaatgctttactgtttttctaaattctgaagtatttattgattgccatttatgcaaatgagactatattatgccatcctttgttatcccctgcacttgcatatttgctgcatggcttattgagtatgtcatatactcaccttgcaaccattcatcagaggagttctatagtgaggctgaaggtgtggaggattaggcgtagccctggtcaagctgcttgtgggatggagtcgcctacgctctttattttattttccgctgcttagatctttattgtttgagaggaactatctatctctgtaatgaatttatatccgtctattaattagagtaataattgcactctattatcaatttgttattgtatgcctcgactgattcctggacgagggttttcacacatgtaagtgtttggagttttggatagaaattctgggcgtgacaagttggtatcagagcctccttgaccctaggttatgccaaatggttacctatagaagccctctaaaaatattaaaaaagtagaactgttcttctctctttctcttttaattaaaccaagctaatggcacatgcagattatagtctctttaattgttctcattaaaaatttacttattattcctgtgttgttagtactgtacatctattactgtactaatgacccatttaccagcaaaggttttacaacattatttttatttaatcatgttgcaatataataaacttagcatgttgattttataactctcttttattttagctttttttaaacctgttattcaaaagtgcaaaaatttgtgatcctgttttcaacagttccaacttatcttagtttactttatttacctttcacttcgattttctaactttattcaatttaatccaaaaccttgtgctattaattggagaaatgtcttaactccctcctttcacttgtctttagatgccacgcttcaagcctgagtacttgttcggtattgagggatttgtccaggagctgcgtacgatgtcctttaccataggattcgagactgcccctttgtatgcccagattcctcatgatcgtgatgaagagaagtgccgtgtcatggtcaccttgaacagtgatcgtgaagacatcccatcgatgatgttcgaggctagagggggaagctatccttatgcttgtcaggaggcggcaaggatcgccataggagagctccgcgaccgttacaatgatctgttggccgacactgagtatcgttgccatcctcgtcagccccagggaagtgaccgtgccagctatgttgatcctgaaggaattgagaatgatgctaccataagacatttggtcgagatgctgtgggccatggatgagtcccgcgctgaagttgtgtcagctgctcaagctcgtgaagattggaaccgtggtaagatttgcaagctagaggacaaggttgatcgtctagagaaggaactggccgaattgaagggagaagcgccaccacagaaggccagggttcatcttactgcaaggaagagagctctttttgttccctgctaccagttggtgcccaaggttcgtgtggtggcaagagaagctgtcctagtcccagtggatcctccggtcgttaatttaagtgatgaggaggaagaagattcaaagcgcacccattcaaaggttgagtggggtgctactcaagatgatgagaacgagccgaacgagccttcaatcaactccgatgccaggaagaactacatgtcttgttaagtcgttgacttagttcgttgtgttagtttgcttgtttaagtttggctatgtgtgggtcttgcatgaggtttacatcattggtgggatgtaaatgcatgcgtttgtttggtttcgagtgttaggaagtttgagttaagtggtgtgagagtcttcagttttatgtaataatgaaactcagttaagatcaataaaagtcaagttagtagaaattaattctctgtcctaagtagctttcccccttgtttctcttcttgtgctcttgcctatgccagatggtgaacacccgcagcaatggaaatgggcccaacaacaacaacaacaacaatggagagaatcccacgcttgcccaagtcctagctcaacaggcgcaactcatgaacatgatgatgcaacaactccagaaccaacagaaccaggggaacaatcatgctcctccccagaacaagttagcagaatttcttcgtatgaggccgcccactttttccagtactaccaatccagttgagactggtgattggctacacgccatagaaaagaagttggacctgcttcagtgcactaactaagaaaaagtctcctttgcttcatatcagcttcatggccctgcctttgagtagtgggatcacttctgtctcaacaaggctactgctgaaccaatcacttggcttgagttcactgctgctttcaggaagactcgtgtaccatcgggagtggtgtctctcaagaagaaggagttcagggcgctcactcagggatcctgttctgtcaccgagtacatgcatgagttcaatcgtctggcccgttatgctccggaggatgtgcgcacagatgaagagcgtcaagagaatttcttagaaggactgaatgatgagctttcttacccgctaatgactggggattattctgatttccaaaagttggtggataaggccattcgtcaggaggataagtacaaccgaatggaacagaagaaactcaggattgctcagttcaaagctcagcaagggaatagtcagaggccgtgtctcactatgggacctcaggtagtgtcacagggaggatcttcatctgttgtttgtccacagcgtcagttctacaacaacaatgctggcaataacaaccgcaaccaagctccacgtcctgttgcaactccagtccagcacccgcctgtcaagagggagcaaggaaacaagccaggggtgtgtttcaactatggtgaaccaggtcattattctgacaagtatctgaagcctcgacgtgtgaagattgttcctgtgcagaataactccaatgcaccagcgtcaaaggctcgtgtcaatcatgttgctgctgtagaagccaaaggtgctccagatgtgattttgggtatgtttcctgttaactcagttcctgcaacagtgcttttccattctggtgctacacattcctttttatctatgagttttgtgggaaatcatgggatggagatagaagatcttagatgtcctttgatggttagtacccccagtaaccaagcactctcatcacaacgtagcccttctgtcagaatagagattcaaggtgttccatttctgaccaaccttattttgttagaatctaaagaccttgattcatcctagggatggactggttagccagatataaaggtgtgatagattgtgccaatagaaaagaaactctcaccagcaatgatggtcaagttgtaactgttcatgcattgccttctgaacctttaaggtcaagtttgaaccaaataactttggaagagattcccatagtacgggactacctagatgtgttcccggatgatttacctggtatgccgcctaagagagatatagaattcagaatagatctggtaccagggacaaccccaatccataagagaccttatagaatggcaaccaatgaattagcagaggtcaagagacaagtagatgatttgcttcagaaaggatacattagaccaagttcatctccatggggagctccagtcatttttgtggagaagaaagatcatacccagaggatgtgtgtggattattgtgcactgaatgatgtgaccatcacgaataagtacccgctgcctagaattgaagatttgtttgaccagcttaaaggtgccactgttttctccaagatcgatcttcgatcaaggtatcaccagtcgaggattaaaaaggaagatatacctaagacggcttttaccactcggtatgggttgtttgaatgtactgtcatgtctttcggacttaccaatgcccctgctttcatcatgaacttgatgaataaggtgtttatggaataactggacaagttcgttgtggtcttaattgatgacattcttatttactcccgaaccaaagaagagcatgaagaacaacttcgtcttgcattagagaagttacgagaatatcagctttatgccaagtttagcaaatgcgaattttggttgtctgaagtaaagtttcttgggcacgtcatctcagctggaggagttgtcgttgaccctagtaatgcggaatctgtaaccaattggaaacaaccgaagacagttttagagattcgtagtttcctaggtcttgcaggctattaccggaggttcatagagaatttttccaagattgctaagcccatgacacgcctgcttcagaaagacgtgaagtacaagttgtcagaagaatgtgagcagagttttcaagagttgaaaagtcacataatatcagcacccattatgattttgcctgatccaaagaagggtttccaagtgtattgcgatgcatctaagcttgggttaggttgtgttctgatgcaagatgggaaggtggttgcctatgcatcttgtcagttacgtcctcatgagatgaattaccctactcatgatcttgagttagctgcagtggttcatgccttgaagatttggcgtcactacctctttggtactcgtacggaggtgtacacggatcacaagagtttgaagtatatcttcacccagccagatctgaacatgaggcagcggagatggttggaattaattaaggattatgacatgggaattcattaccacctgggaaaggctaacgttgtagcagatgctctcagcaggaaaggctattgcaatgctacggaaggacgacagttgccgtgggagttatgcaaggaatttgaaagactgaatttgggaattgtcagtagagatttcgttgcagctttagaagcgaagcccactcttattgatcaggttagaaaggctcaaaccaatgatcctgatatccaagatctcaagaagtatatgagaagaggaaagactatcggttatttggaagatgagcaaggaactatatggttgggcgagagaatttgtgtcccagacaacaaggagttgaaggatacaatcctgaaggaagctcatgacactttatactccattcaccctggtagtaccaagatgtaccaagatctcaaggagaaattttggtgggcaattatgaagcgtgagatagcagagtatgtagctgtgtgtgatgtatgtcagcgagtcaaggcagaacattagaaacccgcaggtttgctgcagcctttaaagataccagaatggaagtgggaggaaattgggatggatttcatcactggtctgcccagaatgtcatctggccatgattctatttgggtggtagtcgacaggcttaccaaagttgctcatttcatccctgtgaggacaacatattccgaaaatagtttggcaaaattatatatggcaaggg

SEQ ID NO: 23645 - DNA, 1940 bp, Oryza sativa
tcctccacgtgcgttctcctcgccgtacacccacgccgatcagcaccgcaaaccagcggcgcctctactggtatccacacgtacagggacggaatgccacgcgcagatgtgctagcacccgcgcgcggctagggttttgctcggggagggaactgacggctagggtttctcatgtgatgcaatgcctcagccggtcacacccctcacgaatatataggatccatcactcgggcctccaaggcccgtaggactcctattcggatccctatccaaattaagctcatattggatctctatccaatccccttattccggcccattaagcgtgcgaccctgtaggttcatatatactcagctgtaacccgaaaactccttttcggtccacgcgtcaacggcggctcctagcagaacgtattgacccaccgggcatacataaatatcatatcggctgaacctctagtgtttacttgtatgaaccactttgcctcacgatatcgattaagctcaaggctagatatgtgccatcctctaatagctcaaacattcaatcgaacttgttgatagattatataactcctcaatcaccgttggcatggccatgcacttccataatctgcaacatcgaggggcccagagatatctctccataggaggggcaaatcccatcttgattattcatatcccattacatgtttcatagcatacccgaaaactacttttatagctacccatttacggagtagcgtttagcagtccctaagtaagctactacacatgttgaaaaccatgataatctcaggtctaaggattcaacaccaacactaaatgagatcactgatgacacaacacatggctcttgcagtgtctcatgttgggtctatccaacaacatgttcaccaacatgtgtccacattattaatttggtatctctataccatgatccatgagacatgatcatcaattaatacatgtgctgatcatataaacatatttgttgcacatatgatatttgatcagggatcctttagaaatagtaacaaacaacataaagagtctcttgaaagaatcacatattaattcaccaataaggagttatctattttaaggaacaatgtcggataaatatgtaaacatagtatgtgatacaatcatctctatgattgcctctagggcatatcactaacagtctcccacttgcactattgtcaatcatgaacgcatcttatacccattaccctagtgtgtgcctcatgcttaggctgagggagtggctttgtcaacgaatctgcaacatttaaatccgtatgtattttgcatatcttcacatctcctctatccactatctcgcgaatgaggtgataccgccgtaaaatgtgtttggacttttgatgcaatctaggctccttggcttgcgcaatggcaccactattatcgcaatagtggtccatagggctagaagcactagtcatcacacctagttgagaaacgaatttctttatccaaacagcctcctttgctgcttcagaagcggcaatgtattcagcttctgttgtagaatcagccactgtatattgcttgcaactcttctaactcacagtgcctccattcaggcagaacacaaatacagactgcgatctaaaatcatctttgtcggtttggaagcttgcgtcggtgtatccatttacaatgagctcttcctgtcctccatagactaggaacatatccttagttcttctcaagtacttcaggatattctttacagctatccagtgactctcacctggatctgattggtatcggcttgttgcactaactgcatatgaaacatctggacgtgtacatagcatagcatacatgatggatccaattgccgaggcatatggaatcacactcatcttgtttcgctcatcagtcgtttgaggacactgattcttgccaag

SEQ ID NO: 23646 - DNA, 25349 bp, Oryza sativa
atggaatggagaaagcaaagaaagaattgtatggatgttgggaggaaagttttcaattgttgtatagttggaaggaagaggtacttaggagatcacctggaagtgttatagaaattgacattagttgatgggagagcatactttcataggtttttttaacaactcagaggaatgtggacttggaacaatacgttgatatggtttactcagtgcagaaattcagggcttcatatgagagagagataccagcaattccagacaagtcacattggccaaaggtgaaaatgcctttcgatttgggcgcaccactagagaagaggggtgttgggagacagaggaaattgaggattaaaggatgccttgagaatggtggcaaaagtagtgcgaagagtgatggcaagaacaagaaaatcataagaggtctagttacatgcaaaagatgtggtgagaaaggtcataggcaagctagctagctacaagtgcccattgaatggaacaaaaaacggtattaatatttctgttttttcactttatatcctttcaaatttgtggtgtatcatcctatatgtataaatatatgcatgaaaaggaagcctaggaaaagcaaccaaaagaaccttccacctgaaccttcgacaccaaaaagaacaaccaatgaagctacaataatgcaagaaagcccgggaatgtttacaaggaagctacaataatgctcaaatctgacaagttagaattattctacttggtgtgcatgcttcaaaccaattgtgtgtaacttggcttttgtgtatacatgcataggcgccttacaatgctattgggagaaaccggtacttctggagtggaagggctaaagaaatggctagtacttctggaggaacatctatcctaagaagaaaaaaatgactcccaagaaaatgaagacaacctaatgtattttagtcgtcaaatgtgaacttcaaagagatgtgaactagtattgtagttgcaaatgtgaacttgtcacacatgtgaactcctctttttgggtctctttgatgcttcatgtaaccaagatatttgctatgtgatgtgctgcaatgctctgtgcatatgctgctgtgtgctatgtgctgttgtgctatgtgctgttgtgtgctatgtgctgcaatttatttgtatatatgtgctgcaatgctgcaatttgatgatggtgtatttttgttgctgcgatgcaatttaatgctgcaattggagggaacaatctgacccgaacatgtgagaaaggatccaggggtatgctgcaattagagggagcaatctgaccctaacatatgagaaaggacccaggggtatttttgtcatttcgcatgctatttctgattaaaaggctcaaaacagcccaaagtggcattttattaaggtgtatcacctacggagtggcatatttataaggtcatcctatagagtggcattctgttaaagccacctctatggagtatgatattgttaaatttctcgttggggtcatccgttatgaccgacactgataaccccgagccaaatttgaaaatttagctgccataaattcatgagtgctaattctagccacagattagcactgataaatgcctcatcagtgccaatttttttccaccaattggcacagtccaccacatcaatggaggtttctttcttaaaccgtactgatatttgtcactagtgccagttgttgccctcccggagcgtatgcggggctaagcgggcaggagactatcaatgctggtttttgtttgtgtctaactggcactaattgggcgtcacatttaaagcgttctatggttgtgggacacatgctcaccaatattatctctttacaaagagttaccagcagatcaccgacagatgcaaatagaccatccaacattgaaaagaaccaagaataaacatggaacacaattccaagaacatagagatcacattaccgtgctaaagaatggacatagtttccccaccgccacaggctgccactacggattaagtcgctactgctccagatcaagtcgttgttgctattgatcaggctatcatcactccaattcaagccacagtgaaaggcacaaggaggtgggaggagggggggttgaatatgcgttctgatttatgaaatattctccaattgccgtaggtagaatcaataggcaggcacttcctaccaactctcagccaactctcgagtgatggctactacttccgagcttgtggaccagtaaagttttggttggctgggaattgttcttcctagcccctcacagaaagtataaatgtgattaacagagagcctaacacagagcaaatgcggatcacaaaaattgcagcaatttgaacacatacatgagggaccaaaacaaggggagacaaagatttttttcccgaagtcggactgcacggattgtactctccgttgaggagctccatagagtcgggtatctattaaccccttgcctcaccgagctagccaatgggaagaagtctttagcctccaagcaaccacctaggtttcccttgattccaagcgaccaccaagatcacaccttgggcagtgagttccaatcactagtgaagcttgctctaccaagataacctccaactcggaattcactcaaaatttcctcttttccttgcggaggtgcggttcaccctcacaaagttgcttggatcaatgacagcttgaggaagctcatgggagacacctagccatctaggaagtcaccctccaagagtaataagcaccaagcagtagcctggcgatgatccccaaatgcgcatctccttctaagtcacttacaagcactaatcctcaccacctccaaagaatcatactcgaatcaccatggtagcttaggaagtagttggaggaggtcaagaaaccctaggaaaagctaggagatagataaacgaaagtggaattgccaaaggagatgtagaggggaagggtggattttatacccactatcatatgtcatgtagccgttactcacatagttgaacttgataggtgccaaagaagttcgagccaaaaccactaggaatttttggccaacacttaaacaccttgaaaaacaagggccaagaagttttgggccagaacaccaagaacttccgacccacactttctgtttacatctgaacccgtgtaggttttgtacaaatgtgtctctcatctacaaggagtggacagtgagcacttggataaacgcaagcaaccatttcagtatgctccttaacagtgcagctttcctaaagtcaagagcaaaagatacaaagatttttaaataatgccatgagtccttgcgccgctttcgattctgtttgtaggggtctctatgcacacctaggcaccccgggacaaattatctgcaccactacaaaaaaaagctcatagagatttgttggagggacggtctgaccggtttagtagggcggtcagaccatcagacacatcctaaaaggtgttttagcctccaacggctagttttggtggttgggggtatatatacccactccccagcagcaagggtaaggttttggcattccattgcattatcttgaacccttgcgagagctctcacatacttgtgcacttagtttatctagtgaggtgttggagagtgagtttatccaatccatgtgcattgctttattgttagagctagtgcggcacttgatcatcctcggtaagcatcccaaacttgttactcttggaggttgctacctcctagacggtttgaaggagttgctcggtgacctctccgagaaggttctggaggaggcccggtgttgattgtgagtggctcagtgttcaccatctccggagtggaggaagaacaaccatagtgatagaggcttgggagaccacttcatgggccagcacccaccttgctcaccccttgacgaagggggcttgcggtggcttcgtggtttgagctatgaagaagttggacttgccacaacggtgacgtaggaagttggcaagcatccgaacatcgggtggaaaaatactttgtcacttgcctcctttattttgtgaaaatttactttgagcaagtttacatactagagtttatttgtgctattatcaccctagcaagccataacataggctagctactttgtgcacttagttgagactagttgatttaggttttgaactgtgcaaaaccgttttgatttacgtttccacgtacaaaactcggttctagccaaaagttttaaaaaccgcctattcacacccctccctcttagtcgacctccttgatcctacattctctctctcaagtctgtcttggtagcagccaagtggcggcccggaggaagcggaagtgacggcggcggccgcaccctcccctcctccagattctcctcctcgtcgtccttagcagatgccggtgccactccaacctcctcgccgcctccgagttgcaccaccccggatccggtagcctagaggtcgggggccgctagatccagcctcctagagttcagtgctctccggatctagtggcctgtgacctcaccgtcgtctccgatgccggcaccggcgctacggccactgctggtcgctggcactgagtggtgggtggtgggggccagatccggcagccccaagctcgggactaccacgttggcaagaaggatggcgaggaccgtggcgtcggggtggtggttttcttgattttgtgttgggtcttcttggatttggggggaaagggaatatgcaggagtttatgttctaggcagaaccaaacattgtttgcaatgtgatgaatattcttgattcttttttgagtgaaatatgatggatgttcttgattttttttcttccatggcttttccatgtatgcaagcttgaagcatcggctcgattcattaccaatagactattctttagtagtgttgtatacatcttgataaaatcattagtcccttataacagttttgtcatcattccgccaaaacccacttagggggctagatgcatttttacatatctcctacggattgggccactgccggcataatatgcttagtccacaccacctcttgtctgagtccagccacccccaactagcctccctgcacaacctaccagatctgctggtagatagataaggtttggacatagagacgacaacagtagtaggaggacttagctggctgagcaagtcaccatggcatctcgttcattgtgcccgacatccgccgaccatgagctgatccttgttatgttgtaagccaaaccaccggtgagctcaaggaggccacctcactggtgccaagaaataggagcattcggatggaggccctatttaattcccacgaaaaaactttttaccttgtctcatcgatcgtttgaacacctgcatgaaatattaaatataggctaaaagaataactaattacacagattgcgactaatttgcgagacaaatcttttaagcctaattgctccatgatttgataatatggtgctatagtaaacatttgctaataacggattaattaggcttaataaattcgtctcacggtttactgacgaattctataattagttttattattagtctacgtttaatacttcaaatgtgtgtccgtatgttggatgtgatacgccaaaacttttcacccctggatctaaacacagccgggacagtgaactacgcttgcgtcttgataatgatagatgtactgtgggccagagggcttctggtgcgtcccgaatttgattaccatttgaatagagagtggatagagcaaaaaggaaggagatcccacacatttgagttattgttagcgacctataatgggctggtgcttgcaaggttgtggcgtccaaatatggctggagatggtgagcaactagggaggggacaagaatccaccgttggcaggggcggatccagcaattaggattcattaggctgtagcctatcctccaaattttgcaaaaaaaaagaactatatgtgatatatgagatgaacatgcattcgagaagaggaacggacaccgggaggtcgagcaagatagaaaggaacacttggcattgttgtgattggggcagatgctaaagtggtacttcctccgcttcacaatgtaagactttctagcatcacccacattcatatagatattaatgaatctagattcatatgcgtgtctagatttattaacatctatatgaatgtggacaatgctataaagtcttacattgtgaaacggagggagtacatcttaatggcccatttggccaatacaacacttctttggcatggttggactggagcaagtgtatgggacggggaacagtggtaggctgctcatgtaggggtggatctcgcaaagcaaggtccaataggttcaaaccttaacattttaaagtacatatgatatctgatatgaacaagcaatggagaagaggaacatgcatcaagaggttgaggaagatgagcgtgcttgggctgattctaccttcatggctgtgcgtgagtgctctgcaaactccggtgtccaatccaatcctctcaggattagtcattagtttggtggctggtgggccttttgggcttggtttagtggtttaagttggactggttgtggttgtttttgggcttgctatccgggtaatatccaaattatttaccggatactctatatctgtcagatatcaagctcccgaacctgatcttgtatccgagagaaaatacacggattgggatccgctacccttgtaagcatccgcgtaccaggatttttgacccgaaattgtcccaaactaatatggtcaggtgggtgagcaggaaatacctgccccgttttcacccctaaacactcaacacagcacaccaaatgttagcatgcacaaattatttcacatagcaacaggttaatttggaaaacaacacataggccttgtttggctaatgggtttgggaaatgatttcccacccatcaaaaagcatctttaaatcctaaccattcattctccctcttaatcttaatccttcattcatttttcaattccaatcccacctcttatttcccattatccaaacatagccagaagacaagaaacgaacatgactagtagctgatagaaggaactactgcgaaccaccagatgcagaaccaggcccgttttcactagttaaaatatattgcaagtgcccagctgcgtctgtgaggcgcgcgaacataaagcagtggccattgcttgcatcacgtagcaagcgcgcagccatataccacactggactacctggacggtggccatcattttccaccatctccatgcaagtctcagggccggtagccttcgctgcagctagttcccttgcgcggctctccaaggacgccatgcgcagggtagcgagcctatcaagcgtctcgccagtaccactgctgcaggaccgcttattagaacttccagaggcatcaccctctgatgccttcctttttcccttactaccactgctctgagcatactgtcctttgatggagacagcgccggtggtggaggagtgtacgctgctgtgagctgctcgacatcaatgggctgccactgaacgggttgttgcggcgtgccttgggcagccccagcgacggcggaatggttgcggacaacggtgcgcatgctaaacaccgcatgatgaagatcaatgtgcttcaggggatcgtttttgaaggctatcacacccttcctcacctgtcacacagttgtacacatggaactttatacagcaaatatatgaaaaggcacagtacacacaagaggacataaatacagtataggcagcatgacaattattactgaagtttgcgacatgattaacatatatcatagccataggactcgaccactatttataaacattgaaaggaagaaacaagataagcctccactacaagaaatcttatgatagatgacgcttcatttacgtcacaaatacataaaatttcgtcacgtttcgtactgtgatgctcgcgtgacgaaaattcattcgtcacctatcatacgtttctaatggcgttttatgacgaaaccttttttttctgtcattaatctagtgacgatccttctatcgtcataactttgtgacgctcatattcgtcattatctagcctaaaaaatgtcataaagtatctgatggcccattaaaatccatgtattgagcaccatgtttatgggcttagcccaatggcaagcccaactagattttagcctagcccatcatagatgtagcatatttcagcccaattctattatatccatttgctttaataacaaataatgaatgaataaatgggccagtccattgcaaaagcctatataggcccaaatattataccacaccattttcagcccattatattatcatttacattagtatcaaataacaagtgggctaagcccatatagacccaacaatcaaacacaataacaacacatatagcacaaaggctacagcccaatagcatctaacacaacccgacaaacatccaatacaacacaaaatttactacccaggtaacagccaaatccagccaattgctcacacctaggcaagcacaaatcctttcaaatctctaaaccgactgccatgagagcacccccaaagtcccttccataagctaaactgaaaatctgccaataccagattaatgatgctcagtgcagtttctagctagattgcataaactcaaggatatcacataggttcgacattatttttgctactgtggctgtgtggcataccagcattcatctctgtaagcattgtccatgacagaaacatcttgtctgatagcgtcacaagcttgttaccctgacattttgtagtaattggagttttcaagaacaaaagaaatgcagcacgaaactatgatagatgcagctttgacattctctataaggagtacatacctctagattcaatctgaataacttggaacagccagcaagttcatctggcagtacggatatagtgttgtttgattcctacatgtagggcactacattatgtttaggacagaggatgaacagggaagctatagaaatgacagctgtatatattttcatcaaacaaagaaaccttatggtgaaaataaggaatacatcgatggtggcttacattgagttctgacaactccaggcaactggcaagactagctgggagatctgtaaggcgattatttgagcagtcaaccctaacaacaacaatgcatcaacttacatgaatataatcatatatagtctcaaacattgcttctggtatttagacatcatactaattgtcaacatcattatatctaaaatatgtgacaaatttgaaattcaaattcaaattattgaaacaaagtcatatagcaaaacgaacaaaacaaaagttgtagatcttgataaattatataactttgttgttgagaattttttcatttaaaattatttactacctgaaaacttatttgaattgagagaagggaggcaaaatggacttctcggcgagggaggagcaaaagggttggaccgcggcccaaagagggaggaggggaagggaaagccggcccgaggaggaagagagaggctgtgggctgaggagggagaaagtaacacttgggccgaagaagcccaaggggagagagagattttaatttgttttccatttattttaatatgttaaatgaactttgtggtattaaaattagttattgagctccgaaaattcacggaaaaaatcagagaataatttagaacatatagaatattaaaaaaatatttccagccatgatttttaaagaaaaattttagtttcctcagtaattcacttgattaaattgcttcaccttttaatatatttttctagaaatgcattataaatctgtgacgtttgcttttaccgcttatgacaaattaatattcgtcacaatgtcccattgaaatactttatgacgatttctagttggtattaacgacgaacacctttttttcgtcactaagccaccccatctcatacttatcgtcataaaatggaatgtgctaatgacgaatagctccgatgtcacgagaaattcgtcacagaaggtcatatttcttgtagtcacacatcaaagtgttccccttctcagtgcactgaattttattccgacatatctgaaaagtttttttcattttggatggtagtttataaatttgagaatgggcaatgaaaactaggggggcagtgaaagcaaatgccatttcatccaagaaacaagaaagttgtaatgaaaattgcctttgtgcaaacagggcccatccatggttgaatctaaagaggctctgtttgcattctctttttttttgtcccactggattgtctatactgtgatggcagtaaatgagtaactccaaaaacttgatagcagcatgatccttcagcagctggatcatttacaaatgtacttggcacctacagttatgaagctaagaaattatgaactattaaaaaccaagaaagaccaagttgacagcatcattctgttctagcaaacaaaattatgtaccaggagcttctaaattacaggagaacactatttgttattacaaggagctagtcagtgatactcaacagtcaattcaagccttcaaaattgagcctaactgcctatgttcatattacacatgaaggtaacaccatggtagcaagatatttggtttgcaaaatgaatttgcggatgagttacataccccattttggctttcccaccagctttcgtcagtgacaatggctgaagtaagggggtcccggccttgtccggttgcctgcgattcaagccacacccacagctggaaccgcttctttgcactgccccagatgtactccaattgcccttttgtcaccttcttcctgcacttggtgaacattttcttcgccaagttctcccatgccttgggtttgggggagttcgaggtgttgttgtatgccgccatctcctccaagcaacactcaagaaacacacgcagctcgaaatcggtccagcgaccacgcggttcggacatctactgaaatgctagtcaacaaaaaatgaaagagagaaaagaactacacaagtcaattgaacggctgacggtggcaaggctcattcgacgcacgaactcgataacggctttgggggacttggcacacaccgtacagagggcattggcgatgtgcacgacgtcgtcggctagagccttggcggtgcccgtgtccgaggcgaccgactcggaggagccctcgccggactccagagtggatcggcggatagcgattggtagaggtgacgtggttggaacaatctccctttccaaggcagggtgtgacagctcaacctctcctttccgcttcttccccctcgcctccattcccctacttcaatttattacactccgagtttatgttgagcctaacagctctccacaccacctcgttactatatgcacctggaatgcacttcatcggccggaaacgatcaaaagagcgacgtgactgagtgtgcaaaactaagatcagctccattcatctgtgtagtgcattcctcaccatatatgtagtctgcaatttcaacatttacatttatttttagtcggactgaaattctgctctaaggaatgttttatattaccaaccatttgttatttggtaaagtgcaggtgttgttagaaattctaattaatctgtgaaccatgtactactagaatttatttaagagctagtatatctaagcaagtaagagtttatttagctgtggattgtggttccatattaaccactgtgcagaccactaatgtgagccctaaaactcccaactcctcttctctctccttatgtctttctcacgcacatgcaagctgctgcagctagcttagctcctctttcttcctgctgcctgctgctgctaaggctcttcctccttcccaaatcacggtccaaaccatggctaccgatttgccgctgctaggtgtggatcagctctgctttgactgcggctgtggcggtggctgctgcagctacgactgcggctgtggctatggtgacggaggctgctgcagctgcggctgtgctgtgggtgctctttctctccctctttccttccctctctggctctagcatttgtgcgctgtggatacaagtgcagagaaaatcgatgctcatgccatgactgctctatgtgctaaatgaatgatggtaagaaatgaggggttcacctttgtgtaggtgacgaattcgttcacagtcatgcacccttgtgcgtcctcgccgatctgttcacctcccctcctcctcggtaaatcacctccctgcctacccgttttttttttttttgaaaatgtcaacgggggcgaagtgcccacctgaatatattacgccaaacagacttacacatggcaaagcaatgacgggcaaagcaatgaccgcgcaagtgcaggcgccctggaggataacagagtgaatacatggggaaatacaagggaagagaaacacacaggggcaacataaccacccaaaacacatattgatgttttccatcaacaagatcacaccgccaaacacccaaaccggctgtatgagtatttggcctgattggtaatgaaggttggttcttgcagtggatggggcagattcttgcatttcactgattcgtggattttggggctttggctatttcttctccactccctgctactccctttcttctccccaactctgctcattgctcaatcctgccatgtactacttgggtttcctatgcatatgcaccggcttgcattaattgctatagacatggccatactttgaccgcttgactgcggtgcgctaagagcgagaacaatagcaggctataagtcagctgtaaatatatatagagaagagagaagagagagaaggaaaagcggactacagatccccaagtccgctatatttgtgtaacggatttgctcaaatttcttttccgagccgatctagggtttccaaaaccgattccgttttggccgttaccgcgctctcttttaaatagtaaccaccgctcttctcgtttcacggcgtcacttccgttttcaccgctctaaccaaaaactttccccaatcttccacctcgagttctccggcaacacccttcaagctttccggcgatccgcagacgcttccggcgactccaatctccgccaatgacaatgtcaacctccgccagtccaccgagctcgttggccaccgaatacatcgaggtaagtatccatcggctaaatcccttcttttcctcgtagatttggttcttcttccgctcaatcctcgattttcttcctctgtagcacctcacccaccaggttgcaattcctagtgtagccgatgaattccagtttttccttggcccaatcggaaacttagaccccacagagttcatcaatggagaaaccaaccgaatccccttcagattttgccaatcctgaccttagcccttggaaaggcaccttcaaatcctggccatcagccgaagtcagctagcctgcgtggtacaagaggatgttgactagcaaatcaggtcactggaaagaaattggcatagcccaagccttagcccttactgcagcaaatatggcaaggaatgaacccatgatggcagcatccacctatttttggtccatagccatgaacacgttccttttctctcaaggaccgatgaccccaacactattagatatcatcatgatcactggtctagatatcacttcatcggctaacttgtccagcctaaacactcaactcacccatgagttcaaaaccagaagcataggtggttggtcaggttatgttgccaagaacatgggaactgggccggttaccccaagagaacacacagcttttcttatgatgtggctggaaaagttcttattctgtggtccaagctgtggtccgaccgcaaactggcaatgggttgctgaaaatctagtagaaaagaagcattttccccttggcaagtatctgctaggctatttgtatcagaccctcaatactgcaattgacaaaatagcctctggaaaaacaatcggcacagggggtccatggtggctactccaaatttggctgaatctgcataccagaaaagtggccaatcggccagcactagccgatgtagaattcccaagattcgagccgatcatcagggacgatggagaaacaagcaccacatgccgatgtatgtccttcgaagaagcagcatcggttagcgcaatgtccaagctatcggctgaacctttcagggaatggttcaataatttctatgatgggttccccaagaatgataggatctggtttgcatatgaaggatctgctagctttgaactaccaggtgacttttgatttgatgaaatcaactctgacaaatatgataaatctagagaagtattctcaacagctatcagccccttcatcatccatgtcggcatccatcaaggcaagaatatccagatgacttacgaattctatcatccaacaagcgctgtaaggcaattcggcatgggacagctaccaattagcctattctttgctgacaagatccaaagtagaggagagatttcatcattccttatgatggatcggctgctgaatctaccaggaccacctcttggcagtattgacaacatcagactaaggactttcaggagtgtggcctttgactgatggtggatataatggaaaagacatttgttccatcaattgccgtccatatatttgacgaacctgtttcctgacgatgtcccacaggtaaaattctcacattttgttaattttattaaccacaagccgatgcgtctttaacttatgcgatcctgttctttatagacaacagaatcttctcctcctcaccagagcaaaagtggtgtggaaattgaatatgcactagggctcctacctaatggtggtggactaacacctccagtcatcggctataatgcccccaagacctccacattgctgcacggcctgtctcgtatgccgattgctcgtgctgctggaaggaaaagagcaaaatcagctgcggcaccatcggctgcaaagaaaaagtctaagaagcaaaagactgctgccgatgatctgccagccattgatccagatgtagcagatttcctggaggatgaagcaatgtccgaagaggtgaatgaagcgactgaacacatcagtgaaacacgggaacagacccccctgccgatccacctggccctcagataacaccatcacctccagtacgtcccacttatcagcccagggtatgcatctctttctcattcattgtccttatactttagaaccgatttctgactttgtgctttgcagaaaaagaagatagcttccaagaaaccacaaggagcagctgcaccggttaatttccctgatcctatcaattctctttttcagttttcaaccgatgctaacttgtactcacgttttcagccccctcgacattcaactcctgtctttgaatcaagtgaaagtactccatcggttataggaagtcatcatgtagaagaagaagaagaagaagtagcaccaactcctgctgtccctgtaagtataaaccttaattttgaaaatcatatcgctaccaatctttctaataatccacaatatcaatgtttctctctttcaggttctagccgatatgttctcttttgacatcaggctattcttggatgatgaagaagaaacaagaagctaagctctagtgcccctagccgatgatatcaaggcaaccttattggatatctcgaaacaacttgaaggctccctggagactttggttacaagctgcggatccatcacggacagactcaatgaaatccatgacaagatcctagatgagcaccagcggcatatcttaagcaacattggcttaaatttgaaaaagcccaaaagagaattgccgatcagcgtgaaaggagagatcttgaagcaaccatccaagccaacagaacgtccatcaatgaagaaaaagctaagctggatgagttggaggctggtccaagtgcaactcaaaccaacattgatcagctaaataaatggaagatagaactcatagctggactagagcaatgcaatgcacaacttgctcttgaacaggaaaagcttgccgatctgccaaaagccatcgaagaccaaaaaatccaagttgaaagcatctgtgaagcatctaactgagctgaccaagtcattgaagccgatttccagtactaatgcagccgatgccaagataatcaatgaagtagatcaagttaggcaaaaggcaatatcggctattcaaaaatatgtatccggatgagccgaaccttgtaattttcaactttaaacttacaaacttttgggctgtaatgaattccatgttaaacctctgccttcaaatttttgcttttgaaatccatattttctatatctctgcaatgttgaagacattgataaaattataatttggactaagggcgacataataaatatcagccatcatatatcggaggaatacaagcgattatgataataaaaacaagtaagggcgatacaatccatatcagccatcatatatcaacaaaacatagctgattatgctaataaaaactgctaagggcaatataacttatatcagccatctcaaggcgatgtcaacacatcggctagcatgcatcggcaatactcaactgatcatgaattgacccgaacacttgggtaatatttcttcagatattttccattaagtgctcatccataaacttcaccatcaagtccttgcaacatataagctcctttggacacaaccttatgtatttgaaatggcccctcccaatttggagaccacttgccgaatttattatcccgagttcctatcggcaagattaacttccaaattcctggtaaaaaaaaaagattaacttccaaacaagctctccctcagaaaaagacttaggcaccacttttttgttataatgccgagcagcccattctttatccttggtaacttttgcaagagctctcagtctggattgaaccaagtcttcttttttcatcggcaatgatattataatattcattggctgtcaactcattctgcaaatccatccttctcgagccgattctaatctcccatggtaaaactgcctcgtgtccatatacaagtttataaggaggaacttgaatcaatccatggcaagccatccgataagaccataatgcttcagccaaccttgtgttccattgccgaggtaaatcaaaaatcttcctcttgatcaatttaagcaaactcttgttagatgcctcggcttgcccattggcttccgcataatacccatactatcagcaaactgaacaaattcatcagatacgaaaatagagccctgatcggttgtgatagtctgaggaattccaaatcaataaataatatgttccttgacaaactgtattgcatccccagaatcaacatttttcaaaggaattgcctccacccacttggtaaagtaatcggttgccaccaatataaacttgtgtcccttgcttgaaggtggattaatcataccgatcatatcaattccccaacctctaaatggccatggcttgatgatagggttcatagccaatgctaatgctctctgaattgctccaaacttctggcaatcttgacatcccttgtaatatctgaagcaatcttttaacatcgtcggccaaaaataccctgcgcgccgaagtaaccacttcatcttgtgagcgattggtgagtaccacaaataccttcaagtacctcctccatcacaaccttagcttgatcagtactcaaacacttaagcaataccccatcaatcgtctgataatagagctcatcgtctaataatgtatacttcaaagctttgtagcacaattttcgtgaagccgattgagatggggtctacaaatattgaaaaagatcgtatctccaatcatcggctgcaattgtggcaacttctatttcaatatctttcaccatcggcttatatcctgatgccccctgagccaaatcattagcttcaacattttgctccctagagacatgcttcaaagttaccagccgaaaactattcatcaattcccggcacttttcattgtagatcatcaacgtatcatttttgcattcatattctcctgccaactgactgattaccaacaatgagtccctcatgatctccacatcatcggcttccacttccttgagcaactgcaaccccttgagaactgcttcgtattcggcctgattattagttgcataaggtttaatagtataagcaaactcaaaacttgccccccgaggggaaattattaccaagccgataccacaaccatgagtatacaccgatccattgaagaataatgtccaaggtgcaatatcaaccgagccaatcgaattatctcgatgttccacaatgaaatcggctatagcctgccccttgatggccttgggcgattcatacctgaggtcaaattctatcaaggcatatatccactttccaactcttcctttaagaaccggagccgataacatatatttgatcacatcggctttgcatactatagtgcattcattggataacaaataatgcctcaacttggtgtaagagaaatataaacacaaacataacttctccaccggaaaatacattgttcctgcgtccaaaagcctgcgtcttaagtagaaaataagtctttccttgccttcgagctcttggattaaaactgagccgattgacttctcgccagccgacaagtataatctgaatggtattcccttctgtggagcaatcaatactggaggagagctaagatattccttaatattattcaaagccttctgttgaaacaagatttcggcaatacgaaaagggggtggctatcaagcaggaaaagtggatgggtttagagacaaggaattttatataggttcaggccttctcaatgagaagtaataccctactcttatccggggattgattcaccgagtgtattattgatcgtatgatctgggagaaaagttatgcccaagaggcgcccggacccctccttatatagtgagaggagtccgtattacaagatacagcgcatattcctgacgaaataggcaagtaaaaataaatacaatcgtaaccgactaggatctcgggtatttccttgatacacaagttaagatataactcgagccctttaacgatatcttatctatatatggtacccctatacccagtcggatatacatgccgtgtgggtatggggtatccataatctccacacattctgctgctctgccccccaagtgaattcttgatcggctttcaaccttagcaagggtgtaaaaggttccaatctcccagataagttagaaataaaccttctataaaatttaccttgccgatcaacttctgcaattacttcttgtcttctggaggtagaatcttcttgatcgcattgacactcctctgaattactttgatccccctctcatgaacaagaaaacccataaactgcccagccgatacattgaaagcacacttcgtgggattcattttcaagccatatttccttgttctttcaaaaacctttttcaaatcggctctgtggtcttccacctcttttgattgaacaaccacatcatcgatgtagacttcaaccaacaagccgatcagatcatggaatatataattcagtgccctctgatatgtagccccagcgctcttcaagccaaaagtcatcacaacccactcaaataagctgattgcaccaggacacctgaaagcaatcttgtgaatgtcttcttctgccataaaaatttgattgtaacctgcattgccatccataaaactgataatcttgtgccttgaagtagcatcaaccaattgattagcaatcggcattgggtattcgtccttaggggtaaccttgtttaaattccaaaaatctatgcacaccctaagcttgccattcttcttgatgaccgagacaatatttgaaactcattcagcgtatcggcatggcctgataaaaccaacatcatataagcgagttacttcagccttgatagcatcatacatatcggctttgcatctccttggaggttgctggtaaggtttgtacccaggtttgataggaagtcgatgttcaataatcgattggctgagtcctggcatctcgtaatattcccaagcaaagcaatctctatactctttgaaaagctctatcaacgtggttctaaactctgtcaataaatttttactaataaatgtcggccttggcctatctcctgggcctatgtcaatctcttccaaatcatcagccgacatgaaaccctgtcctaatttgccatcgagatcatccaccgtgtccttggtgtagaaatttgaaccctccacgatgccctcaaaataataatttggggtctccatcttcaattggttgtatatcacaatcggacacttttagaaaattgttggtatttcttaatgacattactagaaatataatttccagcaatggcgcagaaatacttctggtatattatggttgtagagttcatccacaagcgcatggatataccattgtagcatttcacccgagattattccaagggtattgtatttattttatcccgtgggaagattatgtagagagaactcaactaataatttatatattacttgtgataatcatattctaagcgggggttacgaaaatccaagggtagagtgacacacaagcatttctactcattctcataataaataatctaatgtcatgcccggaatttctatccaaaactccaaacgcttacatgtgtgtaaaccctcgtccaggaatcagtcgaggcacacaataacaaattgataatagagtgcaattattgctctatttaataggcgaatataaagtcattacagaggtagatagttcctatcaaacaatagagatctaagcaacagaaaataaaataaagagcataggcgactccatcccaccagcagcttgaccagggctacgcctaatcctccacaccttcagcctcactgtagaactcctccaatgatgaatggttgcaaggtgagtatatgacatactcaacaagccatgcagcaaatatgcaagtgtaggggataacaaaggatggcataatatagtctcatttgcataaatggcaatcaataaatacttcagaattcagaaaaacagtaaagcatttaattaaacaatattaatccaacgctatacaacatacccgttgcataggcccaaccattctgaacaaccattcccggctgcacagttctatctccaaaccaggaatataccattccaaaccaggagctaaacaagttattaccaattacaacatcatttattatggtgagaggtgtgagactaatcacgaaagacattgttagactcgcccataaccgcgggcacggctattcaaatagttttactctggccagaggtgtaccactgtacccacaagacacaacctcaacatcatgtcaaccatgcgtcgcgatacttaacaagaacctgaatagagattgtgaatagagattgtgacaataccctccgcataacacaattcaaagcagtgcaccattcctagatcataatcactaccttataaaacaaggcatggactccccagcgacccccctgggcttatctccgccacttctcagtctggtgccccataatgaaccacactatataaaaggtaaagccgttgcccacgctggcttgtggttggcacggttaatgtttcacaaccaaaaatcgtgaaccggttcttaattgtcatgagcacgaccatcaaaactgtttacacccaaatttggcacctaggattaaaataggaaagattgccaaaatttggaagtctaccggtttcctccgagtaggccggtctgaccgccgtgtgttcgccggtcagaccgccagttgagggccggtcagaccggcggtgtgtggccggtctgaccggcaggtctgagtccgactgtgttttgtcgggtctcgaggtttccttgctcgggaaggcatgtttcgggtttcctttggtttctgccccgagttggacgtggaggagggcctgtagagggcaagaccaacccctatataagggacatggccggttcattgtaaaaaaccaatctacaatcaattaaccgaatcgttttttcatattgcttttagttttctcttagtttgtccatctttatcggtttgcgccgtaaaccgtccgccaccgctgcgagagtgcgacatctctttgtaggtttgtcctgaaaaccttccgttttgcccacgagatgggtagttatctagaaatcggctccgctagccggtttagttatcaaaacccatttaggtttagctctttgctagatcgaggtggttggcgactctaggatcaccgcaggcttaaggtgctgcgatcgtgcttgtcaacttgtcaaaaaagttgccaacacgatttttgacgactctgctggggacgagatctgttcatcgtcaactcaacttcgacttcgtcatgacgtagccgccatccaagacggaggtggagccatccaatatgatgccagtcaccttggataaattcgaaggagaagaccgtaaagctatggaggagtacatcaacgaactcacacgggaggcattgatgagggcaagcactaggactcgtcaaggtgtgaccatcaagcccgggccacgtcctaagctcgctcctgacttggtaagtaatgatgaggtaacacaatctatccaacaacaagtagcatctacaatagattcatctatgattgcttttaaagataagttagatgcaacttttgaggataaatttgatgagtttttaagggttaaattcggccctcttatggccaattacatgtcaaaaaataaagcctctaccactgctaaccaacctcctatagatcaaacgggtagtaaaaccgatgaagcggcgcatgcggccggtctgaccgggcctgacggccggtcagaccaggacttagccgtcggtccaaccggccaaacggtcggtcagaccggcactcaagccagtgccggtccgaccgcgcctctggatgccggtcagaccgggccttgggccggtcacaccggtgcaattgttccgatacaaggaatacatccaatgactaatgctggttatttgtatcatcttagaacatttgatcctcctgtatctactgctgcaagtagtccccaggttcccccacatgttcctaatgcttataatgatgttgctagggggtatccccccgatactagacaaggccaatataatcatattgcgccacaaacacaatctattaggccactgaatccaccgccaagtcaacatgggcctaataatatagaggatataattagtgagattattaggaatagattcgggattgaaactaggaatcgtgctagggtttacaaaaagccgtatcctgattattatgatgatgtgccgtttccccgtaattttagagttcccgaatttaccaagtttagtggtgaggatagtaagaccacatgggagcatgtagatcaatttttggcacaatgtggtgaggttaatagtgatacttttaaattgcgcttgttttctttatctttgtccggtaatgcttttacatggtttacttctttaccggcaaattctattcatacttgggctcaactagaagaaaaatttcatgattatttctatactggagaaactgagcttaggttatgtgatttaacatcggttaagcaaaaatataatgaatctgtcattgattatattaagagatttagagatgttagaaaccgatgttataccttgaatataactgatagagatttggctagtcttgcttttaatggtttaattgctcctcttagagaaagattagatggccaacaatttcttgatgttagtcaacttatgcatagagctctggctcaagaaagccgggttaaggataataaaaaacttgttagaccatatgacaaaaggcctaatgttaatgtggttgattaccctgaggctagtgatagtgaggaggagggtgatcatgatatatatgttgccgaatggtcatggactaataaaaataagccttttgtttgttctaacctaatgccaactcctcgcaaagatcgacaaagtgaatttaaatatagttttgatgtggccaagtgtgataagatttttgattatcttttgcaagaaaaacaaattagattacctaaaggccatgtcataccatctcaagaagagttgaaacgtcgtgcatattataaatggcatgattctcattctcattctattaatgattgcaatgtgtttcgacgacaggttcaatcggccatagatgaaggacgattgaagttcaccgatggctccaagatgaagcttgatcatgatcctttttcggtgaatacaattaatttcaatgataaaaaggtgttgattcggctggagcaagccgaatctactaagggaaaaggagtggtcattggcgaaccaagacctaagatgatagtgccaaagaagccggaggttggcgtttggaaggaaaataagaatgaagcttcaacttctaaagcccctaggaagaccaaagtgacttttgacatgcttttggaaaagtatgagaaacaaggtggtgagagagctcgaaataaaggaaaaagaccaagatcacctcctagggagcgatttggttattcaccaagacggtcgcattcacctccatatcatcatccacaagacatgtcatggggttcttatccaatgccgccgctgggttatccttatccttattacatgccatggggagcaacgccgccaatgttcaatcatatgcctctaatgcaattcaacctagggtggggaggaccaaggaggccaattcatgagcatttgtcttcaccaaacaacggccggttttatggtaaaaatcgggctaatgaagaaagaagggaaggaaagcgcatcaaggtggagggaaggacttcggaagtaattaccatcaaagaggggtctcatgatgtgccaataccttctggagatggagttggagtgtccccgaacaaaaaatccgaagccgataccagctcatcgcagtcggccggtctgaccgcagccatacggccggtctgaccgccggcccgacagcggtccgaccgacgcctcagggccggtctgaccgtacgccgagtgtcggtctgaccggcacatctggccggtc

SEQ ID NO: 23647 - DNA, 11521 bp, Oryza sativa
aatcctaggtggatgcctaaggatttgacgtctgctcaaaagagaaggttgcaatgtcttcgggctcaagagataagagagaaaaaagccgaagaacaaagagataaaaggtttaatgagttgcgaccaccaccggtatggaggcgtaaatccatagagaacgaaaagtcggttgttgtagaggagaaggaggaacaatcggttgataagggtgaatcatctccaaaagaagacatggatattaacatggtatgtatgttgcctatggatttttgtgctatggatgaagccgaggttgctcaattctcattaggtcctaaagatgcggtttttgagaagcccgatgagtcaaaccgtcacatgaagcctctctatctcaaaggccatgttgatgggaagccggtctctaggatgctagtagatggaggtgccgccgtgaacttgatgccgtactcattattcaagaagttagggcgtgaggatgatgagttgaagaagaccaacatgattctcaatggcttcaatggtgaaccaacagaggcaaagggtatcttttcggcagagctcaccgtgggaaacaagacgctaccaaccgctttcttcatcgtcgatgtgcaaggtaactacaatgttattttgggtcgttgttggattcatgccaattgttgtgtgccttctaccttgcatcaatgtttaattcaatgggacagcgatgatgttgaaattgttcaagcggatacatcggccgaggttgcaatggccgatgctacttttgagtggcgtcatgggaatatccaatgcttatcggggagggatctttctagctatgattttattagtatctctgatggcaaatttgtacctatctctgtaaagccggctagtgtagcacgggtaagccatataaatttgtataatgagtaaagaggctaatttagagtggttacaaaagagggtgcaagaatatcggtctacaaagaacgatattggtgaaaccgttgaagattttgatgaagtagagaagcttggaaaagggtttacatcagccgatcctttggaggaagtagatataggtgatggaactaaaccaaggccgacttttgtaaacaaaaatatgagagccgattataaggtaaaaataatcgagctacttaaagagtatgttgattgctttgcatgagaatatcatgagatgtcgggtcttaaccgtgagctcgttgagcatcggctttcaattaaaccaggttttaggccttataagcaatcacctcgtcattttaatcctttgctatatgactgagtcaaagaggagattgatcggttgttgaaggcggggtttattaggccatgtcgttatgcggagtgggtttctagcatagtcccggtggagaagaaggggagtggtaagattagagtttgcatagattttagagatttaaataaagccactcccaaagatgagtatcctatgcctatacccaccataatgtttaatgatgcgcgggttcataaggtgattagctttctagatggtaatgccgggttccaatcaaatctttatggcggaagagaatatgtacaagacggcttttaggtgcccgggatttgttggtttgtttgagtgggttgtcatgacctttgggttgaagaatgccagcgcgacgtatcaaagggcaatgaatttgatcttccatgatttgctaggtattattttagagatctatattgatgatattgttgtcaaatcggatggtatggaaggacacttagccaatttgagattagcttttgagaggatgcgccggtatggtttgaagatgaacccacttaaatgtgcttttggtgtgtcggcggggaagttctaaggattcatggtgcatgagagaggagttgagattggtcctaagaagatagaaaagattcgtgatttcaaagcgccggcatgcaagaaggaagtacaaaagttgctaggtaaggtgaattatttgagaaggtttatttctaacctagcgggtaaatcgatacttttgttcctatacttcgcttgaaaaaagaagccgattttacttggggggcaaaacaagaagaggcgtttgaagagttgaagaggtatttgtctactccacccgttgtgcgagcgcctaaagccggaaagccttttcggttatatattacctccgaggacaaagtcattggtgccgttttgatgcaagaggaagatggcaaggaatatatcattacatatttgagcagccgtcttttggatgccgaaacgaggtatgtctttatagagagactttgtttatgcttatactatgcttgtaccaaattgaggcattacttgttatctagtacatgcatagttgcttgtcaagccgatgttattaaacacatgttgcaaaggccaattctaagtgggagaattggcaagtgggcatatgctttgatagaatatgatttggcttatgaaccattgaaatctatgaaaggccaaattgtatgtgattttatagtggaccatcatgtagatattgcttatgaggaaaaggtttgcttagttgaagttataccttggaagatttattttgatggttcttcttgcaaggaaggtcaaggcataggggtagttttgttttcacctaatggcatgtgttatgaagtatcggttcgtttggagtattattgtacaaataatcaagccgaatacaatgctttattattcggcttacaagttatggagatggttggagctaaatacgtggaggcttttggtgattcggaattggtggtacaacaagtcgccggagtctacaaatgcttggacggatcactaaatagatacctcgattcatgtttagatattattgccaattttgataattttgctattagacatattgttaggcatgataattctagagcaaatgacttggcacaacaagcatctggctataatgtgaaaaagggattatttctggtattagaagagccggtgcttgattttaaatctttgtgcaaaattggtaaaactggagaccaggggcggtctgaccagctgcttgccgtcggtctgaccggcgatcccgagcagtctgaccagccctgtgtggccggtctgaccggttctgggcagagcactggggggcatgtttcaatcaatttagaggccgaattaattgtgaatttggacgtttgtgcccaggaagcagaacaagattggagaattcctttgattcgatatttgaaagatcctacacttaaggttgatcggaaaattcggcggcaagcattcaaatatacattgcttgatggagatttgtatcaccgaaatatagatggtgtcttgttgaagtgcttagatggagatcaatctaaagtggctacgggagaggtacatgaaggaatttgtggaactcatcaatcggcccacaagatgaattggttgcttaggagagtggggttctattggccgaagatgattgatgattgctccaaattttatagaggatgcgaggcttgtcaacggttcggcaatgttcaattggcgcccgccgccgtgttgaatcccataatcaaaccatggccgttccgaggatgggctttggatttcattggtcaaatttatccttcgtcatcaaaggggcataggttcgtgctagttgctatggattacttcaccaagtgggccgaagccgtgcctttgaagaatatgactcatacggaggaaattgactttattttgaagcatattatccatagattcggtattccacaaacattaactacggaccaaggtacttcttttatgtctaaggaagtgaagagttttaccgaatcttatggtattaaattgttgagttcttctccttactacgctcaggctaatggacaagccgagtcgagtaataaaacattgttgaagttagtgaagaagaagattgaggaatacccaaagaggtggcatgaggtgctttctgaagcattgtgggcgcataggatatcttaacatggtgccactaaagtcattccttttgagttggtttatggtcaggaagccgttttaccggtggagataaatcttggttctcttcgttatatcaagaaagatgatttgtcaagtgaagattacaagacgttgatgggagacaaccttgatgaagtcatcgagaagcgcttgaaggcattggaagagatagagaaagagaagaagagggtggccaaggcgtacaacaatagggtgaaagcaaagttgtttcaagttggagacttggtttggaagacaattttgccttcgggtactcgatccaaggagttcggtaagtggtctcctagttgggagggtccttatcgagtatacggcattgttcgagggaacgcatattttttggagacacttcaaggggagcgctttcagcgagcaatcaacgggaaatacttgaagaaatacttcccgagcgtttggcaagacgcttaggaggtactatggccggtaattagattatcgtcctaagaccaaaatatgttctatgcttttagattcacgttgttcatcaaaaaagcagggggacatgtgtttacacccaaatttgacatctaggattaaaataggaaagattgccaaaatttggaagtctaccggtttcctccgagtgggccggtctgactgccgtgtgttggccggtcagaccgccggttgagggccgatcagaccggtggtgtgtggccggtctgaccggcaggttcaagtccgactgtgtttcgtcgggtctcgaggtttccttgctcaggaaggcatgtttcgggtttcctttggtttctaccccgagttggacgtggaggagggcctgtagagggcaagaccaacccctatataagggacatggccggttcattgtaaaaaaccaatctacaatcaattaatcaaatcgttttttcatattgcttttagttttctcttaatttgtccatctttgtcggtttgcgccgtaaaccgtccgccgcaactgcgagagtgcgacatctctttgtaggttgtcctgaaaaccttccgttttgcccacgagacgggtagttatctagaaatcggctccgttagccggtttagttatcaaaacgcatctaggtttagctctctgctagatcgaggtggttggcgactctaggatcaccgcaaggcttaaggtgttgcgatcgtgcttgtcaacttgtcaaaaaagttgccaacaaaaaccatgtgctcacaacccaccattaccatgttttagttcgcatcttaataaaccatcctatcacgattgaccatcatgagctaccattaatccatcattaagtaatagtgaatcattagttatcccattcatatgagctagcgtctctaagcatggctaagcatcctaattactttagctaaaaccatataatgttctagctaatccaattattaaccgggtgacaaagtacaagtaatcaataacaaaaaggctataacaaaggaaataggtcattcccacccgatgacatagttgaatcgaaacaatagctataaacgggatcaacatgctcaaagggttttttgggatctatgtgacttgccttgctggccttggaattcttcaaagtcttcaagactaaccattctgtcctttccacacttgagtagattcttcagatagttcactcttgggcgtttaggatcaggatcaacagcccttgtcttgtacagcctcaaaggattgctttaagaaccaggctcatcctcattgccaccatcatctgactcagatacagctggagagggagagcggggtgcatcacgaatgacaatgctaccagccctcctggaatggatcggaatctgactcccactgtaaaaatctccaactttttctttgcccaatcttcccctaggaccacgaaccggggggctcgagtcagcaggaacatcttgagaaagcttctatctcttctcatgaggcataatgaccactgcaacaagaatcaacaaggttggagtgcaatggttaaaagaaacagtagcagaatcaaggttactggctgattggacagagaccggaagttccgggccaagaacaccgaaacttccagccagcaaaactgaagaacggaggatttaaccaggccagtgcatgtgacaaaaaaacctatcgatcagcaatctacaaggtagcaggaacaattctatccaaaaggttttctccctaggttcacatatttagagatcggggcagaaacatgatgaaccaaaagagaagatcaaaagtgctaccttgagagggaaaatcgcaaatcgatcacgggatgaacctcctagccaccaatgtggttgattccacggagaggaatcgaatttccacggttggaagagaaaatcgccgagaggagcactgtagcggcggctagggtttgggaatcggggaggagaagaagtgaggagagagataccaggcttgggctccccctgggtatttatacccccgacccccggaagttccggtcagttccggactggggtgaccggaacttccggcctgacagaacagagcgtagttaggcgcaagttcaatggaatagatgagaattcaatgatttggaaatgaaaacctatggacataaagagacttatgatgtatatgaccagccaacaatcaacattacagaacaatggttaatatacatcacaagaagggataaaaaccaaattttcgcaataaaaacacatacaaaatttttcacaaaaggatttttttttggataatagagggaatgtttgagctttattcctggtatcaagaccatcttctacacaagaagtgatctcaagacacaaaagctcaattttttttaatttaaattttaatgacacatgtttggctatgaattagccaaccacccatcacctaatgttacgagagtctaagatattgagctcactcctaagctcgcaaaaccttttctcatctaaaggcttggtgaaaatgtcggctaattggctttcagttctcacatgggtaaggcatatgtccccttagtctcatgatctctcaagaagtggtggcgaatgtctatgtgcttggttcttgagtgttggacgggatttttggctattttgatggcactctcattatcacataggagtgggatcttggtgaagttgtagccaaagtcttttagggtttgtctcatccaaagaagttgggcacaacaagaaccggcggcaacatattcggcttcggtggtggataaggcaatggaattttgcttcttagaggaccaagaaacaagggaccgcccaaggaattgacaagtcctggttgtactttttctatcaaccttacacccggcataatccgaatcggaatagcccaaaagctcaaagccacaacccttaggataccacaagccaagattaggagtgtgaactaaatatcttagaattctcttgacagcaatcaaatggcactctttaggctccgcttgaaaatgggcacacatgcaaacactaagcatgatgtcgggatgagatgcacataagtaaagcaaagatcctatcatggagtgatataccttttggtccacacatttaccattatcgtcgaggtctaggtgtccattagtaggcatgggcgtcttgataggtttggcatcctccatcccaaacttcttgagtatgtctttcacgtacttggtttgagagatgaaggtgccctctagtgcttgctacacttgtagtccgaggaagaaagtcgaactcgcccatcatagacatctcgaaccttttagtcatgattctactaaattcttcacaaaaagaggcattagtagaaccaaatattatgtcatcgacataaatttggcatatgaataaatcactcttaaattttttagtgaagagagtagtatccgcctttccaatttcaaaaccatttttcaaaagaaaatctcggagacattcataccaagctctaggggcttgtttgagcccgtagagcgccttgtggagcttgtacacatggtttggcaactttggatcctcgaaccccggtggttgctccacatagactaactccgagataggtccattgagaaagtcacttttgacatccatttggaataacctaaaatcaaggtgagcggcataggctaaaagaattctaattgactcaaggcgagcgacaggtgcgaaggtttcacaaaattgagaccctcgacttgggtaaacccttgcgcaactaaccgggctttgttccttacgaccaccccatgttcatcttgcttgttgcgaaagatccacttggtgccgatgacattttgcttgggtctctccaccaaagtccatacttgattgcgagtgaagttattcaactcctcttgcatagccatcacccaatccggatcaccaagcgcatcttccaccctggttggttccaaagaagagacaaacgagaagcgttgacaaaaacttgcgatacgagagcgactagttaccccttttcttatgtcaccaagtatgttgtcaacgggatgatctctttggatagtgtgatgtatccttgaggatggtgcactggggggacctgagcctgatcagaatgctctaaagtgccctcagcatcgatcccatccacttgtgccgttggcacgtcttcactgccattgatccggaggttccggactgtagaacccggaacttccgggcctggagatgtccggaggttccgatcaataggacccagaacttctggctcagcagatacagcacttgtagggctattggatgtcgatgacggaggttgatccctatcttcttggtcatcctgcgtctcgactggtcgtatgtctccaatagccttggtacctatagcttgatttggatccacatcccctacaacatgtacaacaacttgctctccttgggagtcattagattcatcaaatgtcacatccctagtgacttcaacaataccagaggttttgttgaagacacgataggcatgtgcatttgatttatagcaaagtaagaatccctcatccaccttaggtgagaacttagatgagcgaggcctcttacttaaaataaaacatttgctcccaaagacacgaaaatatgaaacattaggcttcttaccactcaagagctcatatgaggttttctttaggatcttgtgggggtacaagcggttgatggcatgacatgcggtactcacggcttccgcccaaaagacatccaaagtcttgtactcatcaagtattgcccttgcggcttcaatgagggttcggttcttcctctcaacaatgccgttttggggaggatcatagggggcggagaactcgtgcttgattccttcttcatcaagaaattcctccacttgagtgttcttgattctcctccattgtcgcttcgcaccctcttgatagtgagatcatagaggttttgggcttgctttgcgaagcgcttgaagacatcttgagcttcgcttttgtcatggagaaagtacacccaagtgaagcgcgaaaaatcatcaacaatgacaaaaccatacttgttacctccaatgcttatgtaggccacgggcccaaataaatccatatgaagaagctcgagtggtcttgttgtagtcatgatgttttttataggatgtggactcccaacttgcttcccggcttggcaagcactaaacacacgatctttctcaaaagaaacattagatagaccaagaatgtgttccccttttagaagagatgccaaattcctcattccaacatggactagcctacggtgccatagccaacccatagaggatttagcaatcaagcatgcctccggattcactctatttacgtcgaaatcaacgagacagagatcaccctttaacactcccttgaatgctatgcaagagtcatctcgcctaaaaatggtcacatccacatcggtaaacaagcaattaaatcctaacttacacaattgagacacggataataaattgtagcttaatgaattgacaaggaggacattagatagagattgattcttgaaaatggcaatcttaccgaggcccattacatttcctttaccatcatctccaatgacaatattttcacgacttccacccttctcatcaagacttgtaaacatactcccctctcccgtcatatgattggtgcagccactgtccacaacccaacttgagccaccggaggagtatgcctacaaaagaaattaagcttgggatttaggaacccaaacttgtctaagtttgggtcccttgatgttagtcaccaaagcctttggcacccacacacaagtgcggtactcatcattgtaattcccattaaaataagcaaccactttgccctctgaatttttggaaattacatatgaatcatagtaaagaccctctggccggaacttccggccagccccttcggcctatcagaagcccggaacttcctgacaaaatgtccggaacttcctgtcttacagggcaggaacttccggtcattttgcccggaacttccgagtgtctgaccagtgaggggacaagtcacctcaattgcttgtggagcttttccttctcttacaaacatcaagcattctttcccatttaccatcacacgcttagacacaggacttccaccagaaaacccgagcccgtgtctatccttgttaggatgagcggtgatggtcttgtaaagggcatcttttgaatggtagtcttcatgcatccatatctcaccaatgtgcccaacctttcatttcttttttaagagcttgcatagcatcaacattagtagcatgagagttcaaatcaatattgtaacacctagcacaaccattgctagtagatgggttggaagaattagaaaccacatttggttgagaagtgctattccaaagagtgtcaaattgaacttcaagatctttatgacttttgtctaaactagcaaacttctcttgaagagtttcattgacatccctaaggctagctagagaaccattagccaaattaagctcattagctagttgttcatttttagcacattctttagctaggctctcctctaaggcaaggtttcttttcttctcaagaataagtaattcttcttgcctttcgagagattgttttttactatccaaagctctcattaacttagccaaatgttgcatagcgggtttgctaaagctcttaagcacatcatctaattcattatcactttcctcatcactagaatcaacatcaagagaggtgtgagagggcttttgagtcatcaccttgcagccttgggccatgaaacaagagtagtggtaggagtcctcgtcgtcattactcaagttgttgaagagacgctccttgcttgaagaggatgacttgaaggtgacggtagcaacaccaccttctccttcaaccttgtcttttggcttgggcttgggcttgacctcgagatcttcttcatctgcagagtaccacacctccgccatgtgtgcctctgccacatgagcacg

SEQ ID NO: 23648 - DNA, 720 bp, Oryza sativa
  unsure (1)..(720): unsure at all n locations
gagcacccgagtaagttgtggtcgagtacaccacattatcgagaacgatctcgacaaatgcagagtcgtcgcgcccaacctaccaacgaagaccgacnnnnnnnnnnnnnnnnnnnnnnnnnnctggactactcgagaaaaggttgttaacggataattcctcgcgaacgtcgtcggcttgatcacctgacatgattgtgaacggacatccggatatgctacaagttgggtgcatgagtcatcctggtcacatgagacgcacataataaaccaactctagcacttccattggtgtgcgagagatcattctacacgttcgctggtcctcgaaccagtacatagtaatctctcgcaccgcaagcttccatcggtgttcgagagataattctacacgttcgctggtcctcgaaccagtacgtagcaatctctcgcaccgcaacctccattggtgttgagagatgattctgcgtgttcgctggtcctcgaaccagtacgtagcaatctctcgcaccgcaaccttagatggtcgaggtacgactacagcaatagcgcaacggtcctagcaccatgaattcaaatgatcgagagacacctactcactggttctcaaccagtcaatcgtagcgatctctcgtacatttacttacagtggttgagttacgactactgcttggttcttgaccagctgtgtagcgattctcccactatttgcacttctag

SEQ ID NO: 23649 - DNA, 707 bp, Oryza sativa
ttcctgcagccccagaatgtctagatagttgtacaagtgcgcctttatgtcttgagtatggggcgatttcagaaccagcagctccaactgttggtggggtgatttcagaactagcagctccaactgttggtgtagaacaaccaccaattcattatgttgattgggatagcttggagatagatggaacattagatgatgagggaaggattcacgtcatgaatgatgaccaattgtttgcactcctaggcttgagggataagggcaaaaaaatcagtgcatgctgttggttcaagtagtaatgttcaaacaagtggtcctggagtccttgagggcatcgagggtgcaacaattcctgtcgacaatatagtaccgggtgagcttgttataatctacgacaagaataacccttgtatggatcgatacactaagtacccctcaatgaaggaattcagattggctgtaagatagtttgctatcaagaaggaatttgagctaggcaaagtgaaaagtgacccagagaggtatagggtaaaatgcgcggtggagggatgtacatggagtcttgttgggcgtaggcagagtgataagaaaactgtaatggtactaacctgaaacataattttttttgacattaattctagtgtgcctagtattgtttacctggttttaatggattacctttcctttcataacaaagaccatacttg

SEQ ID NO: 23650 - DNA, 503 bp, Oryza sativa
cttgaacaggtccatgtgagctcctcgaactggccctcgtcagcgtctccgagaagtcgacgccgacgaacagcgcctcgatctcgacgcggacctggtgctgtctgctgagcgcgcgcttggcgcgctcgcactcgcggcggagcttgccgagcgcgcggccgtcgccgccgatgtccctgccgtgctgccgcttgacgaggcggatgaagtggtccatgacgcggcggtcgaagtcctcgccgccgaggtgcgtgtcgccgctggtggcgagcacctcgaacacgccgtggtcgaggctcagcacgctcacgtcgaacgtcccgccgccgaggtcgtacaccagcacgttcgtcatctcccccgcccccttcctgtcgagcccgtacgcgatcgccgccgccgtcggctcgttgatgatccgcggcacgttcagcccggcgatcgtccttggtcgcctgcctctgcgcgtcgttgaagtacgctgcaaatcaagcagagca

SEQ ID NO: 23651 - DNA, 19396 bp, Oryza sativa
ttaggggcttacgaaatttcgatgttaacaacttcataaaattaacattgccaaactgttttggtctcattcgcataaactagacaagttcgtgtactgaaacgaatattttacaattttatatactaaattgcattcaccttacaagattgtgtatcaccgatgcaaatatgcaatttactctttacttaaagtttacagcttttctagaagaacctgtttgctgctcaccacagtaaatgctatccattttcagcacttcttcattctcacgaacgtgccttctgtcttcaccggccatcattgttgagataggtgaggtcctcatatctaccccctccgtcccaaaaagaatccaattctagctacgaacctagacataggttcgtagctaggatttgcttttttctgggacggagtagtactcattccacttgtcccattcttgttgtccgccaccacgctgtgttgtcgccacataaatgaccaggttatctgttgacatggctgccattgcattgtgatgtaagcgccacctacacattcctgtcctctatggcgtcccgtgtggccagtggcgtgcgagatggtatgccatctcgcccggccgatcagtttctatcgatgtagaccatcgattaccgtgtaccacctcgctggacttggtccacactaaacctctctcttctgcagtcagtggtacattgccagtttacaactgttggtgccataaatcttcctaccactaaaaacaaatgctttgtagagacatttttctagtgctgtagaggcacttttcaaatgcctttacaatactatagagacatttttaaaaatgtctaataagtgtcttatggtgaattcaaatgaagagacattttataaaatatctataatatggtagaggcattttctagagacattaaattatatcacaaatatatgaaaccagtccaaaaaggagaataaaatagtttctttgcttttaacaagtcttaaacttgagatcacttggacaaatcatttttatcttcaatgcactaactaactcaactccatgtcattacttgtatgtttgtgcctttagttaattatatatagtcctttagtacacattatcattgtaacaagtgtctgtacatagtttaaagtgtctcaagaaaatgcctttacatatcaggctattttacagtgccgaaagaatgcctctacaagataaaatctaataagtagagcagaaaacgtctctagagtaaaagtttgtaggcaatttttaaaatgcctctataaaatatctctacactataaaacttctgatcttaaaagtaatttgcaaaatgtctctacaaaagtgctcacataaaaccgctgggtgaaaaatttagaaccgacgccatagataaaccgttatatataccggtggtatatatgaatgtactaactatcattgctgcttcacttttgtggcggagacaatgtaattggcaattatgggcaccggcacacatttgtacttttatctaatagtgcatactccctctgtgccataaagagataactcctagcttcccaatgcgaaattaatgaagaggataaaggaccaaaatacaattattaatagcttttttttagataatggaatagagcatcccggcctttactcaaagagctacagccaattattacaatctcacactcaaaatgagtgaagttcaaagaaacttaaaggatgaaaccaaccatcaagaagaaacaagctaaagactgccaacccaagataaagagtacacaattattgaattatgtttgacaaaaagttgcataactgttgtctcaagaatacggcatgcagcctttaaaagctcactatcttcctcatacttttgtagttgtgcccaagaccggagtcaatgtgttgccctgaaaactacctgcatatattaatagctagtattggtagatatgtaggcaaggggtattgaaggaataaatttttttgatttgcgaatcaacagtgaataagaagatagaagttgatttattttaggacaaagtttgaattctataagttgatttattttggaacggagggactatattcctctattatctactgataagctccctcctactcccacggcacgcatctgactgtgatgtgtattgcacgtgcacaataaccagcactacctttaaccttcagtccttttgaagcaaaatgtgaatccacttattgatatattattctattgtttgtttaattattttgggattgtcctcgacatttgtcttttttagcctgatgccctctgtatagaaaaaaatcgttgcatgtacgcttgaatggaagcggtgtgtgtggcacagatttataattttggagatgatttgaaattagtcaaagcatatctcataaaagtttatttggtgcccttcaagctaacgcatgcagaaatatctccatctctcctctgatactcaaatccatatatgtgcctcaataggattaatcccaaattagctaggagcctcacatgcaactatgtaaccgtactttggtatgagtttgctatctcctaattgcattagctgtgcactcagcacaatacataatttccaaggacaagtttaaactccactattgcggggtacgtaggggttttggagaaccattggcggttgatgataccctcgacactggtttaacaaaatacatactccgatccctctgtccttaaaatgccaaattttatctaatcagaagtggtttttgttagacggattgtgtataattaaattaagtgctatatatgtagtattgtgtaaacaccatcccatattgcacggcaataaaaaaaagctattttaagcagagtatattgtgtgtgaacgcgtcccaaaacacatttttggcagcaacagtaagaaatgtgttttcttgtgctggcaacatttttgtttggcatttaacttttttctagttagaagggaagtttacagctaatatgaatatctcctaattaaagtttacagcctttctggagcaacctgtttccagcacagatatgaacatctacctcgtttctcccggatctacccctactccaatcctcttttcatctccaaatcctctcttttgtctctccttctcttcttgcaggtttcctacttctagacccagggcaccatcagaaggggtacccatggaccatctggtcttccatcttctggtgatggcaaaggcaagggtgtggcaataacaggagctaatccatggtattcgggtgatgactctgatggaagcaacagcattagtgacagcgagagaacagttaccgctgatttcagaatatttgtgtgcatcctggtggttatggtgatcaggaggtggattctcgtaaggctaataaccacgaggcagattcagaaaccgatagcgagagaactgaaggctgctagctttgggatgatcgcaaatagttttagtaattctctccatttctctcctatgtggactctgagttgcacccaggaaaaaggtagaaaaatgtagtgtttcaacctgaggttcatgaatttctatcatatcctgattttttttgtctccatgatctttttatggttcatcaaaaatatcagatatcgcaatccattagttttgatgagaatatcacaaacggtgcttcatctcagttaacttttaaatccagctcaatctgattgttttgcgtaggtttatgttcctgattacgataaatagtgctgtaacatatataacaaatttcaacagattttgaagtactggaacacaatcacctggaaaaacaacaactgtaatatattaatttcgacttcactttttctctataactaacacaatatgattgcgctccatgggattttttacttcccttgttatttctgttaaacagtcctgcaatacaacatatattccaacatcttttctgaaattggtattctttattatagatgcaaatttgaataaagatacaattcttatagtttctagaaaaatgtatgcaatccggtgagcagcacagtgatttttgagccatatgtgtgtgtgtgtgtgtgtttgtgtgtttcctatcacatgatcgaattagtttaaatcgttcacgagaccttgtattgtcgtactgttcaagattctcaccatggttatatactttcagaggattctaagcggtgacaatcttgtctagagtggtcaacgacaagatgcagactctgggttgtttctgtggtcctcaggaaaaacacaagtgaaaaagaaaaacacaagtgaaaaacaataaggatattcctgaatcatggaaggttcatccaagaaaagatgaggttgatccaactggatgggacatcgagaatcatcttcgaaatgatcagaagaccaaagataaggttagtgaattaatattatatgttgatcagttatatttgtttcataaattttcatgattaattaaaagagttaaatgtgttctttctcaaatttatgagtgtatcacaaacgaagttttttttttaaatgttttgttttacttcgttagggtagatagttttggggaaagataaccagccctgtcatcaatataacaataatatgtagggatttttaatcttagcaggttcaacgtttctgaaagtaccggtgattgtacacatgaaatagtaatcttggagattggctgaaaatgttaaatgcacaaatgtttttgacataaagatgtgttatatgttaaccctaaaagaatgatgcatgatcgaaaaatgagctatatatctatcatttatttctttgtgtaaacccaaacatgtgttactcttttaaaatttatactttgtataactacagtataaaacctgacacatggaacaattgaaatccaacaaacagatttagtgtttaaacagtactgttggttgggagtactacccacatttagtcattcattaaatctgaatattaagtctcatatcgtctagcaaaaatacttctcatgctacaattaaataatggtaataaaacaatttgcattcttagaatatatctggtgggatatgtcacatctggccaatatgtaacatggaaccattggaatgcatagttctttatctagtaatgacatatggcaggattggagtggtttgtaaagttacattcctttttaaaaacatattcttgtttatataacatgataatttgtgtgcagtcaaagtaatatgtacaaaaccaaactattttatgatagctacctttagtacaaatggcattcagaaaatatatttgacttttatttttcaaatataatcactattagaacacagtatgttgcatataaataatatatcttcttgctaattcattaatctaacttatcagttctaacaatgaattgcgagaacatatcaaaaattaatttggatcaaagcctgtatactgtgaatccttgcacctttgggtggctaactagggtcatacacgtgatgcagtattgggatatattgagtttttccctcccatatccccttccaaccaaagaaaaaagaaagaaaatgcatgttggttatttctaaattatacatatactaaatttattttgttgttcatatgttacatgaaattaatttttttctcacatagcagtattaccgccacaaggattacaatcataaatttcgctcaaagcctgaagttcaatattttctagatactggaaaggttatgattccataaagttccaggcattctacagaaggtgccatgctacaacagtgtttcgaacattgtattctgcataattttcccgttccaaatttgatactgattcccatacgttgtttctgtacagtgatcagttgatgcacgtgttcctagcaggggtaagatttcataaaactgtactgcagcttggaatatttaactccataggaatacattttcattcttacagatcattgaatttcgcggatatgaattgtgttttagatgaattatatatgggaagacctgcacgacgattaaagtatttgattaaactgaatcagtacaactgacagaaacaataaatagaaaaaatatataacaccattcattaatatatatgtatagctatatctaattttttagataatggaatatcattgcggccttttctcatatatatatataatggaatatatatccatacaaggtattttagattattttcatcttgtatatattgtcaaacatttcttaactgctatagaaaaatattatgttactcactgaatcgaactgctgtatatgacatatggacacaggccgcgggtgccacgcccatacaacgtacatgctgctgttctcgtctactacatgacgctcgggtgtacgaggtgttccagaactatatggtcagctacctgctcgacgtacgggcggtgagtacatcatagtcgtacggaaggctacaccacctgcgcaggtggtgcagccgcgacaccaacgccaccaggtacatgctggtgacgtagttctacaccctgtcctcgcactacctgcagcctagtggcgctcgacacgaagatgatggaacgatccctcgtgatccctcgttgagctaccgaggtaagtatctgcgggcgtcaaaggtgtacaacaaagaacggagcttcaaagccatagagatggccggcgtgatcgggctattcgccatagacgacagatgcctcatgctctgtgtctagctctggcacggctcctgaaggtgacgctgtgggagctggccaggcagatccctccctttgccccctgccgctccttcccaccatgagccgccgctgctccctccctccacgagctagtgccaccgcaagagagagagaggcaggatgcaagagatgaatggatagggttaatatgaatggataggattagatgaggatagggttgcttcgagggtattctaatcgttatgaaaagttattatatttctttttttgaaaagtaaggtaaaaaaagtagggtaaattagtagttaggcttcgaaacagagtcaaataaggaattgtctcatatatgtggtatctttccatataaggcgacaagatacaactcaacacaacgcatgcatgcttttcagatcatgtttgaattgcatactttattaacagtgcaaactctactgtgccaccaactctcacgtgggagttgcagagcacggtaaaaaaaaatcacacaagtacttgtaccagtactagtaccagtactagtactacttcactgtgctacccactccactcacttttcttcaccctgaagacgaattttcccccaatcttttccccaagaaacgaagaagccgcagcagcgatgacctcatggtggtcttggcgcagcctcttctcctcattgggcaatggagggggcagcaatgccgatgcttcctccggatccggcacctcctcccccccacccccggtcccttatcctcaacaagcagcagcaggggcgcctcgctggcgaagcaattgcacgatgaagccttgggaggaagggccggccgaagcccaagccaaaccctcgcaatcgcagccacagcccgcgccccgcaagaatcgtccttcaccccgaaaggccatgcccaaggcgtccaaggcgaaggcgcagctgcacctcggcgacgtcgagccaaagaaaagctagccccgaccccgtcttagaagcacaataacaagagaaagcgggtggcgagattcgagcggtcatggtccagggctaacgggatcaggattctagaggacatggccaaccatgccaacacccatcgcggcgctctgccggataccagcgatctctttgccgcctttgccaacagcctcgacaaaagagatgccgaccaggccaagctcactgacaaagtccacaagttcaagagatgatatgacactgcacgcctgcagcaatgcagctcgactgacgacaatgatatgcatcgattgttagatcatggagcagcactaggtgcacctgatcggcacaaaagtggttgcacatgagcctggaggcagcgtcgccaccgggggtggcggtggagcttctgcaacgtgaatcaagttatttctctacaccctgccatggcgatggcagccaccttttcttcctccttcagaacacgaggaaaatgcagtttagctagcaatcttatataatccactgtctcccagcattgcaacaatcgcatgaagaaataatctagttttctttttgaatgtactatatagccattggaagggtgtttttactatacctcccactagtgggtgtactagtgtagtaagaataaatcccaccgttgattttggtattaaggtggaaggataattaagtaattatacttctatgatacgctgatgcttgccagctgcctagcccaaaatagatcaatacttagctcatgaagcagaagcatggccactgtatcgcacctagccagcgtccgccatcgatcgttgcacttcccttcttcgcatgaacacggggatgggcacacggcggctccgcccctcccaactgtgctgccaacaactagcacccatccttgcgcagagcgactgttataaaaccagccctgcaatcaacatcggtagttaaacgcggaagaaacatcataggagatccaaacacgatgacgtcaccaaggcacgatatttgataacggagttcagccgaggcctacatctctggggtactgattacaggtgctcttccaccatccagcatattacagtgtatcagaaagttacaatgagccgtgccgctgccactagccgagagagagggagagagagatagacgggatatgagagatgaatggatagggttaatctgaaaggataggattagatgtggatagggtttcttcgagggtattctgatcatttggaaaagttattatattttatttcttttttaaaagcagggtcaaataagcaaactaaaaaggtagggtcagattagtagttaggttaggcatcgtaacagagtcaaataagaaattctcccatatagatggtatcttttcacaaaggacggcaagatatagaacatgcatgttttcaaatcatgtttgaattgcatactttattgatagtgcaaactctactgtgccaccaactctcatgtgggagctgtagagcacggtgaaaaaaatcacacaagtactactgctacttcactgtgccacccactccactcacttttcttcaccctaaagacgaatttcccccaatcttttccccaagaagctgagatgccgcagcggtgatgagctcatggtggtcttggcacagcatcttctcctccttgggcaacggaggaggcagcaatgctgacgcttcatctggatccggcacctcctcctccctcctgtccctcatgctcaacaagaagcagcaggggcacctcaccgttgaagccgaagcctcaggagggatagccggccgaagccgaatcccaagccaaaccctcgcaatcgtagccatagctcgcaccctgcaataatcgtccttcaccccaaaaggccacgcccaaggcgcccaaggtgaaggagcaattccagcttggcgacggtgagcctaagaagaagccaacctcaaccccatctcagaagcgcaacaacaagagaaagcgggtgacagcattcgagcgcttgtggtctagggccggcgagctcaggattctaagggccatggccagccacaccaacacgcatcgcagcactctgccggatacctgcgatctttttgccacccttgccagcaacttcaatagaagagacgctcttgcggacaaagtccagaagctcaagagaggtatgacaatgcacgcctacaacagcactgccctactaacgacgatggtgtgcgtcgattgttggatcgcggagcagcacctggtggacctgatcaacacgatggtggtatcaccgcatgctacacctgagcctggaggaagcatcacccccgacggtggtggtggggaggcataatgtctccttgtttttgtcactggagctggaatccatgagcttttccaacgtgcatcaagttatttctctacaccctgcgatggtgatggcagccaccttttcttcctccttcagatcacaaggaaaatgcagtttaactagcaatcacatataatacaccgtcacctaggattgcaacaatcgcatgaagaaataatctggttttctttttgaacgtactatatagccaatggaacggtgtttttgttgtacctcccaccggtggatgtactagcgtagtaagaataaatcccaccattgatttcggtattaaggtggaaggacaattaagtaattatatttgtatgataggctgatgcttgccagccgcctagccaaatagcgttcaacccttagctgacgaagcagaaggatggtcgtcgtatcgctcctggccatcgtctgccatcgaccgtcgcacttctcttcttcacatgagcacggggactggcacatggcgactccgcccctcccaatagcgctcccaacaaccgacgccgatccttgtgcgaagcgactgttataaaaccaaccccgaaatcaacgtcgatagctgagcgcagaagaaacgtcataggagatccaaacatgaagatatcactgaggcacgatatttgataccggagttcagtcgaggcctacatctccagggcactgattacaggcgttccaccccgatccagcattttacagcgtatcagagttacaacgtgctggcgccgccgccgccacttgccgagagagagagagacgggatacgagagatgaatggatatggttaatctgaatggatagaattagatgcggatagggttgctttgaggcattctgatcattatgaaaagtttttatatttcatttctttttgaaaagcagggttaaataagcaaacaaaaaaaagggtcagattagtagttaatttaggcttcgaaacatagtgaaattaggaattctcccatatatatggtatctttccataaagggaagcaagatacaactcaaaacaaaacatacatgtttttcacatcatgtttgaattgcatactttattaatagtgcaaactctactatgccaccaactctcaagtgggagctgcagagcacggtaaaaataaatcacacgagtacttgtactactactagtactactttaatgtgccacccactccactcacttttcttcaccatgaagacgaatttcccccaatcttttcaccaagaagcggagaagccgcagctgcaatgagctcatggtggtcatggcgccgcctcttctccttgttggataatggagggggcagcaaagccgacgcttcctcctgatctggcacctcctcctgccctcccatcccccaagctcaacaagcagcagcaagggcgcgtcactgccgaatcgctcacactcgtggtgtactagtatagcaagaataaacccaccgttgattttggtggccatttgagtcatttatttaattaaggtggaaggataattaagtagttatggttctatgataggttgatgcttgccagccgcctagcccaatatcgttcaatccttagctcacaaaccagaaggatggtcgccgtatcgctcttgcctaccgtccgccatcgactatcgctcttcccttcttccatgaacacggggacgggtacacggtgactccgtccctcccaactccgctgcaaacaatcggcgcccatccttgcgcaaagcggctgttataaaagcagccccaaaatcgacatcggtagctaaacacgaaagaaacgtcgtaggtgatgccaacatgatgatgataccgggtactatatttgctaacggagttcagccgaggcctacatctctggtgcactgactacagacgctcctccatgatccagcatattacagcatatcaaagttacaatgactcatgactggacgccgccggcaaccgctccttctcgctatgctaaatcgccatgtggtcatagcaggtccacccctctatttaagagagatactaggatagagacagactcttactctattcctaacatctaatacaactccaagtcctatactgcaaccgacaacatacacatattcgacacaaactccaacaaactccaccttggcacaaactttgtgtatataaactttagacatataaattttgttgatatatatttgaaacaaattggaaaaagattagagaaataacataacatatatgtgggatgagagacccatacgataaacgggccaagccaatgaaagattggactcatttttgccaaaaaaaaaacgaaaacaacactcttcataggaaaaaggaataaattcactctaggtccattaatttgtcgctgaatctgaaatctatacctaaatcgacataccatgtataccctatgttccaacttgcaataccatgtcaactttcagtctagaagtattgtggccggtttgaactgacgtagcaagtgggccccacatgtccgttccaattcttctgtctcctttctctctcctctcgtatccttcacatggcaatggtgtcgaaacatgaattcggcaataataaaacggggtagcgcacgagacctaaaagtggatggatgtggagacaaaggatttagacaggttcaggccctctcgatgagaggtaataccctactcctgtttggggatttgaatccgccgggtgtagtatagatctgacgatcaggttgtctcatgcccctagaggggctccctgccctccttatataggttggggggcaaggttataagatagaaaccttaaccaatacggtatcggtttcctaaatctactttacaatcttatcaaaccaggactttaggccgttccataatatacagggaaacgtaatacccaagtcatgatctgttacatatttcatatatataagttatcccctataactagtcggataaccatgccgtgtgggtatggggtacccataatctccacagtagcccctgagaccttcacagtcggaaagataatcttctctcgaactagattactccaaagccgagtgcttcaatcatcttcgccatgatctcccgagtactttttccaaatcagaagactgtggagggctgaaaaaataaagtcagatgcatcgactagatgcacctaataggtgtaacccccgactatgtggttaattgaacaaaccaaacatataatcaaggaataaataatctaaccaaccgagtggtttcgataattgtagtcaaccaagcgacttaatattaatatgtagcatatgcggtgtgaatccctgaataatatgatccaagtgatacaccgactgctttgtaaaatatgatgagtgtaacctaaagttggctacattattgaaaattcacatagcaaaacagctataaagaagcttgtatgttgtgaataaataaatttccaaagtattggacatacgccatgcgcacactgctttaacagacgtgctttaatccctaaaagacacatggtttcaccacacctggaaacatatggcatatgtggtgtaaaatccgagtaaataaactcataaaggatttaccaaccgcctagaaaatgaccacaatatataatcagcctaagccataatattggtcaataaaaatgcacacttacgtggcgaaaagcaatgatattgtatccaatcaattgcttgataaacccaaacagcaccttgactatataaaaaagtcagcggggcagctatataaagctttactgtttgacaccttttaagatgcattgtaccaactcctaaaaagtcgagtaactgcggtataaaaggattttaaggtattgggcacttgatcacgcgcactttggcctaagcgaaaagtgcctaagtccctaaaagaacgtgacaggccacacctgaaaatatgggctgcagacatattaggcctaggccaaaaaacatgccttcgacaccctttaaaggatgacgcatgtaacatgctcccgagtaataaatcttccgggtaatatagaccaagtgtagctcatatgaatagcttctgatctgaatgattatcccttatgggatactccaaaataaatataataattgaatcccgactggcgcaagtattcggttgatagcccttacggggaataataattggtccagtctttgagcatagaaaatagactcatgactatgaatccatgtggaatgtatccggaacaagtccaaattggagatataatcctcacgcttgagttgatgagcccctgagcatatagcttgtccttctgtcatagtcaaaattgtctattggcaatagctgacgcagtcggcatggagatgaaatgaccaacatgaagacgaaattgctcatcagaagtaacggaagatgtcagtgatagtaaaaacagtgacaccaatcaaaggtaatgaagttgcataaccatggaggcgaagaaaccagtcggcaacagtcaggtcagctagcagtgaaggtgtaggcgcccaacaacaacgaaagaacagtcggtggtgacaaaagcaaaccgacgatgaagacgtagacgcgcatcaacggtgacagcgaaatccaccaatcatgaagatgaagaaaataatcggcggcgacaaacgcatccgacggtaatgatgattagcggcaatagagatagccgactatgatgacgaagtttcccatcaacggcagcagagtaggctatgttgaagaggcttgacaagatgttgatgaagatgacgatgtcggtgatccagtcaatagcgatgtagcagccgatgataacgatgagatcctctatcggcagttgcgtagtaggccaaccgtgaagacaaataattggaggagagttgatgttgttgcccaactcgtctaaaccgaaatattcgaagttgttgaagtagaatgtctgttccgaagcgaagatgaagataatgactcctggagttgactcattggctgattaattgatttcttcagcttgacataaaatttatcaaattttgagccttgtatttgtgtagcccccgactctttgattagttgggaaacaactgaacatagagtcgagaattatagcttcttgtcgtcgagtagtcattgcttgattgaagatatgtgttgaagatgtccaagtagaaatcctgaatattggagagcctcttgttgtagtaaaataacatggcatcgcatgccgagatgtcgaggctcacaaagacgtcgtggttggtgaagtagtaaaacttgcgaagtagcagcaatagagtttgccagtgccgaagataataaagatgaagttgctccaccatgatgacaaagttgcatcgccgtgatgaagtgaacacgagtcggcggcaacagaagcaaactggtagcgaagacgcgcagttgtgaagataaaagcactagtcggcggcggcataaccagtcggcaacggaagacgatgatgtccatcagtagtggtaactgtataaaccagacgtagaggtgagagcactagtcagcagcagacgagacgaccggcggtgaagaagataaggccaatcaacactggcagaatcatgcagccatggaagtgaagaaaccagtcggcagccatggcaaacgtaggcagcttgtgttgaagatactgatgcctattagtagtgacagcgatgtagccagccgtgaagaaggtagcatcagttggcgttataacaggccagccgtgcaggcggtgacaccagtcagctgcggatgcggcggccggtcggtgaagacgtagacgcccaacaacggcagcataataagtctgccgtgcaggcggaagcaccaatcggtagcggcgaaggcaagccggtcggtgaagacgcgccccagccgtgcaggcggaaacaccagtcggcggcggcgaaggcgagccggtcggtgaagacgtaggcgcccaacagcggcggcataataggccagctgtgcaggcggaagcaccaatcggcagcggcgaaggcaagccggtcggtgaagacgtagacgcccaacaacggcggcataaaggccagccgtgcaggcgaggacaccagtcggcggcggcaaaggcgagccggtcggtgaagacgtaggcgcccaacagcggcggcataataggccagccgtgcaggcgtggacaccagtcggcggcgacgaaggcgagccggtcggtgaagacgtaggcgcccaacagcggcggcataataggccagccgtgcaggcgtggacaccagtcggcggcgaagtaggcgagccggtcggtgaagacgtaggcgcccaacaacggcggcataataggccagccgtgcaggcgaggacaccagtcggcggcggcaaaggcgagccggtcggtgaagacgtaggcgcccaacagcggcggcataataggccaaccgtgcaggcgagaacaccagtcggcggcggacgaggcggccggtggtgatgttctgactgatccattcctagagcgtaagagataagcttaaagccatgaatcccttttatgcatatctggatctggatcctgcagaacaaacatataggatgagtagtatctgatataaatataatactcgagaaaaaatcaagtattttaaaatatttataaatatgtatttctcctcttgtcaattttgatttccccgagcagatgactcattacgtttaaacgctctgcccaactagtcatagccaccaagcactgggagtcggcctaagcacttcccaaacatgcatatgagtgacatgagttcgtcattaatggaacaaagtttcacggatcggagtttactactcgggtacttttgcaattattaagagcagaaaataaatttatctcatctctatgcttttgatttattccgaataatacttagcaccttgcgttactcggtccatccaacgagcccccgggtgctaggaatcggcccaaaggcaaccatccattggcaaaccaaacggaaagcataggaagatagaactccataactcgataggtacttttgtactcagattatgtcgcaagcaatcaagatgaatattataaaaaatatgatataacatctgtagcccccgactcactactcaatggaagaccaattggtgtagtgaggcagaggaaaaggaaaaatatcatataaagaataaaataaatgacgacttagctttgtaatattccccttggtgatggcagaagtagccaatgtgggaacgaagcagtccatcaatggtgacaaaaacaccagtcggcgccagtggaaccaagccagtggtgtagatgatgaagcccattaacagcggcgaagtccgtcaaccgtataggcaaaaacaccagtcggcagcggcgaaggccagccggtcggcgaagacgtggacgcccaacaacggcggcatgataggccagccgtgcaggcgaggacaccagtcggcggcgacgaaggcaagccggcggtgaagtcgtagacgcccaacagcggcggcataataggccagccgtgtaggcggaggcaccactcggcggcgacggaggcaggccggcggtgaagtcgtagacgcccaacagcggcggcataataggccagccgtgtaggcggaaacaccagtcgacggcagcgaaggtgagccaacggtgaggatgtagacgcccaacagcggcggcataataggccagccgtgtaggcggaggcaccactcgacggcgacggaggcaggccggcggtgaagtcgtagacgcccaacagcggcggcataataggccagccgtgtaggcggaaacaccagtcggcggcgacggaggcaggccggcggtgaagtcgtagacgcccaacggcggcggcatataggccagccgtgcaggcggaaacaccagtcggcggcggcgaaggccagccggtcggtgaagacatggacgcccatgaacggtggtgtgaccgaccaaccgtataggcgatgacaccggtcggcggcgacggaagcaggccggcggtgaagtcgttgttgctatcagcaatggcggtggcgaggacaagccggcggagtggactcgcggccgatcgaccggaaagctgagacgcctcgagtccatgaccagcatcaatcgcctcaatagtgccgcgtagttatatgcgaacaacaacaaaaaatagcaagaaattaatctgagattaaaaatcaatatgataaataatgataaaaatcagattgagtttccccctgactgatttggatcaagtcagagaagaggagcttgaagaagtggtcgacggaaaggaagtgaaaactcccaaagcgaaagcgaagtcggcgactcatgaaattgattccatcgcgcttgttgataggaaactcgacgcaacccctacctggcgcgccaactgtcgaaacatgaattcggcaataataaaacggggtagcgcacgagacctaaaagtggatggatgtggagacaaaggatttagacaggttcaggccctctcgatgagaggtaataccctactcctgtttggggatttgaatccgccgggtgtagtatagatctgacgatcaggttgtctcatgcccctagaggggctccctgccctccttatataggttggggggcaaggttataagatagaaaccttaaccaatacggtatcggtttcctaaatctactttacaatcttatcaaaccaggactttaggccgttccataatatacagggaaacgtaatacccaagtcatgatctgttacatatttcatatatataagttatcccctataactagtcggataaccatgccgtgtgggtatggggtacccataatctccacaaatggccgccggcggagaggggtggttgccggcctccttcccttctcctctctctcccttgatgcaaccggtggctggcagaagaggaaaaaaaccatcttcttcatcgccgaccttccctcctccttcctcgagctcctccgccttcctcttcctccacggcgtagcttgttgaagctctccacagcagctccctatctagggctggagatgctgacggcgttcgtcagctcaggcgtctcgagctcctcgccatcatccacgtcatgcgcgagcgtgttgagtacctgtgctctctcatcctctccaacaaagtcgaggacctcgccatacggtgtgtcgacaagcataacatgtgcagaagattggataggattgcaatctgtaagtaaatcataaatcatgctctttcttcactggacattttaatttttttagactaaatccttcaatatcaatattgagcaaa

SEQ ID NO: 23652 - DNA, 4797 bp, Oryza sativa
cccacaaaacatcagtcccaaaaggaaagaaaaaagacccgacaccctgaaccgaactaaaagctgaaaattaaaatccgaccacgtgcagtgcgaccaatcgcttaataaatagtacctctctccctctaatataagggatattcattattttcttataatgtttgactacttatcttatccagaaaatttgtgcaaatataaaaacgaaaaattgtgcttaaagtactttagataataaagcaagttacaaataaaataaataataattctaaattgtttttaataagaccaatggtcaaacggtataagtaaaatgtcaaaattccttatattaagagaaacagagggagtactgtttcgaagctctccgcgctcccaaattcggtgcatacgcaggataaatcgttcatcctcggaacgtgcagcgcgccgacgccgtctcggccttcatccgttcatcgtcccctctcctcactcccgttagcgccgccgtcttcttcaggagcaagcgagatagaaaggtagagaaagagagctcagaggtgctcctcgctagcgactcccctcacctttcgactccaggtgacgtcgccgccttgggttcgcgtccaacgccagcctggctccctctgccgtccatctccagtatcctgtttttccatggaaaccctagaaaatctatttcctccgtttcataatgtaagtcattctagaattttccacattcacattaatgttaatgaatctagatatatatatatatatatatatatatatatatatatatatatatatatatgtctagattcattaacatcgatataaatgtggaaaatgctagaatgacttacattgtggaatgaaaggagtatgttcgatatgtattctgaatgcagagaaatattgttttgttcatgatttgtactgtgaagtataaaatggtatgaattatctgtaaacccttacataatacactactgtcaagatgttgtattttttttttctaaatcttccaggttatcaagcactactgcatcgtagcagcgccataggtaggaggtcgtatggctggggatcgtctcgaccttccgtttctccacatgtgcaacaagacgtcgatgaactatagcggcaaaaaagaaaatcagaggcagcagcgatcggcgaggcgtcgaggtactgtagcggcaacgtatccacggcaagaaaaaaagatcgatcaactgaactaggcccacatgcctacgtggccaacaatcatataatattaggatttttattttttatatatcactgaaattatatatcactgaaaatcggtctgttatcttatatgccacttaaaattggctcttcctctatatgcgattggcttaaatttgtgcaccctctcactctcgactgttgactgcgtgttgactgactagggtcaagtcacatgtctttttttttcttgcataaatgaccaaaataacctttggttcaaaatcatgtgactgcaaacattcatatattcaatagtatgataaatagtgaagatctagtggcataaagggaagagccaattttgagtggcatacaagggaaccaactaattttcagtggtatataagaaattctcaactttttattagcataataatttttgggacggttttagtccaagatttttgggaactaatttttaatcttctcttggagatgctggcactatgccactgtctaccaaaacccccgaaaaaatgaggattgagattggttttgggcaggaataagttcacttcgactccattaggtagtacttgaatctgattcatatccttaaaccacgatactagatatcttgacccccccaactattaaaaccgatacaatttgactgcttcggtggttttggaggggcggtttcgctgacgtgacgcttacgtggcagggttgacctagtttttgtttcacatggcattgacgtggcacttatgtggcatttaattaaaaaaatatgtgtgggacctactagtcattcacacaaaaaaaattttgcgacacactgacatatgggggcccacatatcatcctctctctttctttcctctcctcttcttattcctctacggcctggcaggcaagcgagggcggcgaccgtagcggcgatggcgaagaaagcatcagagacgcggttgacgaggcggagacggcggcgagcggtagagacacgtgcgtggcatctccgaaatgagaacggcggcggatgaggcggcggcgacaacctcgtgaaaactcggcggccaagaactcgccgcgggtgatcctcctcacggagccactcacctcaccgatctccgactgatccgccgcataggcgtcgcccgcgcacgcctctccaccaccaccgcctcttccttctcaaacctcccgccgcgcgcctcctcgtattttaggatcgtcgtctggtcttgctgtgcgagcggtggcacctcggcgcgtctttcgtcggcagcgagaagagctaaaagagagaggagatgggcaagtgtcggcctccatgagggagtccggaaggcgaaggggcgagccaacctcaccgtcgacgccaaggacaagctcctcctccagctgcagaggcgagacgccgagagggcgaagacctcctcagccgcaccacccacaggacgtgtcgtcgttgctccagaagtccggccaaggtgaagagaaaatgggagagagaaagagagaagcgagagcgggaggaggaagaaggatggagatagagaggataatagtgggctccacacttttttattgtgtgaatgactaatgggtcccacaaaatttttaattataatgccatgtaagcgtcatgtcagcgaaaccgctctccaaaaccgttgaaagagtcaaattattccggtttcaatagttaggggtcgtgatatatggtattatggtttagggataggaatcagatttggacactaattattaagggagtcaaagtgaacttattccttttgggcatccgttggtggcgctcgtacagattctctaataaaccaaggaggaggaggctagtggaagtcaaccctccgctggacagaagagggcatgccgaaaacgaggtgccgtgaagaagatagagagtcggcacatcataactgaagtgccacgtcagatgtagccaggaattacgtacgacacagctgttgggttgtaagggataacgtgcctattagcaaagtgtactagcgcagaacaagggcacgcagggattatgacgctttgtcgtggattcagagaaagagatgctgtggaccacaatgctcgagacattcacgctccctgcgggtacggagaacatagtgaaacagtggactcttagcaaaatggcagaacagttctagagcttcaagggagatctctaccataaatacatcctaaaggggcagacaccgaacttcaacatattctcgaagctaagggatcattgggatgagtttgttgcttacaagacagggaaacaagggcaagcgctgatggaccgaaacaaagaaaatgccgctaagaagaagtaccatcaccacctgggtcaggcggctatagcgtcgcaatgccgaagtgggaggagatggaagccggcttgattgagaggggtatcgaactggccacttctaaatggcccgatcgatcaaagttatggttctatgctcacggtggaaagctcaaacctgttgatggctccctggtgttcagcaatcagatacgtgaggctgccagtcgactaacggacgcagtggaagcctcttctcagggcacattccgacccgacagagagaaggatgagctgacactcgccctacagactctcgagcatccaggacgaacacgagggaaaggcgtggttccttggaagattggattcatggaggacatccatacgtacaggagtcggatgaggagcaagagaaatactgaggcaaaaattgcagatcttgagtacaaggtatcgaactacgagcttagcatgcaagaggaggtggcaagaaaggtggatgaacgcatggccgcatatcggagccaggatccccagccatacattcctcctatcatggtcagcccctcaggcaatcgtagtagctgtgcctcaacggggcaggtaggatcacagagcatggacgccatgcaaactcaggacgaaaccacctgccccattgatgaaatcacgtagcggacaccatgtgagctgtatattcccttcaagaacttatcaatcaaggtatgctcatagttttatgatttttgacatgtacattccgcaagttgctacttaggttgattactaatagaagataacctctcatcacgtgaaggtggcgtcgggaatggccatcccaacggacccttcagggacttaacactgcaggccgattccaccaagatactcgagggtcgaagttgagctggtggaagccgcgtacgaggacctcaagttggactaccttgaaggagacggtgatatgcatctacgagacacaagccaaaccattatactatggcgcaagtgctacatcatccttcttgggaaacaagcgacgtctcctgcaccatctccttcggctctgccatctcctccgcctcctccgcctcgtgcaccgtctcctcctcaggctcctgcaccgtctcctttggctcgtgcaccgtgtcctctggcaccttccaagtcaaggtctcgccaagctccaccgcctgcctgcacaacggcaacgcagaaggcgaaagttgatgccgccgaaaacaagg

SEQ ID NO: 23653 - DNA, 4277 bp, Oryza sativa
cgaactcggtaaaccgcttgtcaagcctgagcagctaaagtccctactgacacatatgtaccgattccatgaacagtaaatggaaatgattgccaacggtagagaggtgatcggaacgaggatcagaacgtccaacttcctgcaaggagaagatgttctctggatcccgttcgacatctctcttctaagcgcatggattttgtaagtattgttgagttagatttattacactccttaattagctctttgtatatatgtacaccataataattcattttctcattgtagaattgagattcaaagggcccgatggcggggggatttcgatactggattcatcgaccctcggaaagttaacatcgaaatgatcatgtatccgaaaaacacagaggacactcttgtccatctcctgaaggagcagcatttcaagacattcatactactgccgtacaacacagagttagtttttactatcttccgaacaaatttcgttcccgtacatacatgtatagtttcatatatcatctcacgcaaattgcatattccaccgggtccttttacttttcgacttggaggctagcagagtcaatgtctatgactcaatgaataaagatgagtctacttttgaccaagtttttgaacttatagacaggtgatatcatctgttccactgttattacgaattttgctattgctactatggggatctcgaatagtaattaatcatagcttgaaactccatgtagggcttaggatcagttccgtcaattggtctgcggttcttggaaagaaaaacttagccggaggttcaattttccagtgagtacatgctccaaaattatatcgaatctctaattcaaatataagtgtttattaaatctctcgtcgtttgctatgtatattgtgcaaagcagagccagggaactaacttgtgcggctactacgtatgcgagtatgcccactgcctttcaacccaaatctacaccacaagagagcccgatgtacgtataaaccattcaaaatttcattgcgtactatcgatttcttgtttattaattaatttcatacattcataggttattcacatgagagacaacctaacacacaaggaatttatcgcggctgttcaagaacaactgatgggattcatcaatgaacaagtccttgatcccgagggtgaattctactacgacagatcagcaattcataagatcattccttcttcttctgagataacaccgatgtcgaagccgtagctagagcacgtaatgaattgtaatacatgtctatatttatatatgtacacatttactttagcgtaaatatatattttggtcatatatgcacattgtcgacgtttgatgtcgcgattccggtatttgcatagtatggggatcgttggtactaggatatatgcgagattgtagtaaaagagatggagacgcggatttttatacaagttcaggcccctgaattgtcaagtaataaccctacatcctgttggccaaagccggtcgttgctcctattcatcataatcacaccagtataatatttggggtagcctatctaactgtagtcgatatggcggtctgaaggtctgactcgtagtcgacaacagggtagccttcctcctcgaatccgcatccggcgagattagagacagcgctatatctctcctgacggtatccgtaggcaccgtaggggactagccgtgcctatctctgaagtcgatatccggcgtcttgtcttggcgtatgttggcttgtatgttgtggcttctgttgttccgtgtctcctctcctcctagggggtcttgtatttatactcataggtgtccccttgtccaagtagaactagggaaaccaatatggatacaatccgagtagtccttgtcgtttccatgtagaactctggttgtcttcccttatccggaactcctcctatatccgcaggttgtttccgtataggacatggtatgtggtgggtcctaccgagatttagtcaacaactattaggtatgtggtatccaaaaccctgatagtagcccccgacttcaatgcaaatgaacaaattcatattctcaaccgcagaccttggagtaactgttatcgagctcacgtgaccattctcggtgagttcagagataacgttagacttcccttatcagcctcatgtgggcacctatagggtttgtttgagtcaatctccgatgtcaaccaagaaagtacagagcatacaactaagtctcccgtcttgctgtaatcgagaatttggattgaagtcaagaaattttatctcggcgggtacaccatctcttcattccgtattccttgtcgagacccaccaaccgttctcgagtgatcgagaaagcgcagaatctgcgacggagccttgtcaacatttgtcgtactcgccttagccgatcttggtatagaaccatagagacatggagtcttcgataatgccaaatagaattttcctgaaatcaatactcagaaaagaatattagatagaaatagcccccgagtgaacgctcaaagggtgacatgttataatatgtatggaaaactgaaaataaattaaatttacaaaccaatgttttgtatatgagcgtcttctcttttaccgacttcgatcagtcagtttgttgagtcatacactctccctagcccccggccttgtcgtcggagaatcgttctcggaggataaggctcttggacccttgacctgccttggttgaaaaaagcactgaccctagcccccagccgtgaaggtggaaaactcaatttccgattacatggcttggttaatacacacggcgagaactattacatgaccaggtcttacatggtcgtttgtctctacctggcgcgccactgtcgatgggagatacccgtagaccggatatagagggtattagggtacgctggtacgaggatctacgtagtacgacatcaagcaaataggaaacaaggattatactggttcaggccccttgataggtaatagccctaatccagttgatattagattatatagtgaaaaccacagattataaagggaatagcagaactctatgataccgacgagaccgcagtcgagttggttcgattagatcaccccgatgactaggctcctgaaggctccgactttgtaggctgtggtggttgtgttggcggtgagattcgatgccttagatcctcccggggggtccctcttataccgcaggtcagttggtctccaagtagaactcggagacatcggaccctacacgatacagtgacgacccagttctatccgagtaggactccttccatctgtggactccatgatgaatttccttaacatgtacagagaacgtccgtatacgcgcaggtataccataccagtacatgacgtatatccaaggatagagggtataccttatccgtaaccctgacacacataaaatgttaagtgctttaaattatacgtgtctaatacatatatgtgtattttgtacatatacatatgcatttgcatatatattttttttgaaacataagacggtaggagatctaccggatatattagaagagaattgaccctgtttataaggaaaatagggcccgaaaaccgtacagctgcacagtttgctaaagggaaactggcaaaaccttacacaaaagacacaaaaaacctgtgacaaaacgactagacccacagaagtgatccagagaagagcaaggccttcaaggcgtagcctccaaggaggtgaacaatgacagaagccgctgccaacgcccgcccaaaactggactgggttttcacccgaagtggagagagtccacaaggcaacacctccaatgaggaaacgacacccataggcatcgatgtcaccgatcctagaagaccaggcagggctgtcgcccaagactccctcaagaagtacaggacctctaagaagctagagcaagagtgttgagtgttatcgttgcctagctcatcggctgaacccgatgacagctccaactccactttaacacaaaaactctaacaccgtagggggtaagcacatcgctccacactcggcacaactacaggtttacatagccacagggcacgtgaagcatcggcgaggcccaagcgcccttactaccaacagactagaccaccaacacggacgaaaaaaactcaaccaccaaaagactccacggccggtctgggagcaggcgaccaagagaagggaggagcatcaaggaggggaggaggcctggccggtctgaaggtgaaactg

SEQ ID NO: 23654 - DNA, 7593 bp, Oryza sativa
agcatgttctttgttgtttggtaaactatgggtatatgataataatggtttgcataattttgttgctaatacatacacatttagacataatggtcgaaaaatgaaattggaaccataagcttttctgaaattttcaaagatgatcttgaaaggttgaagaatagaatcaatgagactttcagagataccaggaaagatactattgtgatgccttcaactaagtctgagttattacaaaacgaacgtattattgtgcatattgctttggatactaatattttgcaggcatctgagaacaacaaaggtaatgaggaagagaagaaagacgaagaggaaaaaaacctatacatagctccacgcatgcttgaggaatgtttaattgaccaagtgcctacaatttctgaagatgagaaaaaaggtaaagataatggtgctacaagtgctcaaggtatgcatagttataatgtgccaactatgtccactacttgtgctaagttagagcaacccatagtggaaacaattgttgaaatacctttgtcacaaaacaaattgcttgatgtctcttgtgataaagaagagttgtgtgatgctacacttatatccatggcacaactagtgaatgaacatgttagttctatagtagagccacccagtgttgagtttaaacatgttattcacattgctagcgagaatgaatagcttaaattgctatattctttaaatacttggggttctattcaatttgatgatttttgtccactcaactatttagagaagaaattatttgctagatttgaattgccatgcccttctgatgtgatttttcatattattggcaattatgatagtaaaggagaatataatgtgcatcaattatatatttgttcgaatttaactatacttccttttcatgatgaaatgtcttgtctagaggaccgcatgcatataagtaattaactatctagttcctctagttatttaaatgagttacaggttggtttgcaagaaggggagtgttgtagtttttcgactacaaagattttaggatccaatcatatggacatcaagaaatgttcagcacatgatattgtgatagacaaagataagtgcaatactctccatgacaaggtgaaactgaggacggtttctaatcaagaaggggaggatgataaggacacaactagctcggatataactatgaataccttatgtattaatcaaccaaaggtgcatatgttctacattatatttacatgttatatatttgaacaaacgttgctacacaatgagtttcctgtgtttttgtttgcagaggttcttgcttgggcgaagaaaaagagaccgagcgtaacgaattcattgatgatcaaagaagttgattggggaccatatcaaggccttcttcaagtccacttccatctcatcatgtcacttttggtccatagaagacaagagataaagttctacacgttttggattcggattcgggcctcctgacagcatcaatttcaaacagacctagccgctgatctagaaggaatttcggggcccatgagtacttgttggaaagcttatggggtctactttcagattgttttggttccacgtcaaaattcttaccaagctgccgggaatctgcaaaacaagccacgtacctcatctagtccgaatctgatttgggttttgggccttgatattgtgtcgtgggcttagcccaagggggtgtgcgccctagggcaaccctaggacatccctaatcatattaattcagtagccttcatcgtttagagttgggttttgcttagattattctgtcaagaatagtttcgccgctagatcggtttttggaaccccaaattcaagtgcttaatcattcatatgcaatttggttcaatctatcatgttattgcttgtgttcttcgattcgcatgcaagtattagccttctcggtgaggtcaaccgggtttcggcacggttcataaccagaggagacgtggtgctgcgattgcggggcaaagtagcatgtttgttcagaagccggattgagttgtgtcgcgacaccacccaaatcaactgtttatcaatacctatcagaagatcaggacctaactccctcatcagttgcatatgtatatgttttgaaacatatatatatgcataatatattgcaaataaaaaaactggatcaggctgagccatctttagtccctgttggtgttaccaaccggaatcaaagatcgatctttagtcccagatttttcacccgggataaaagatagtgatctttagtcccggttgaaaaaccgggactacaggtgtcgggtcccaaaactaatgacatggatccgacaatgattaatgtatcatgccgtagatcagtaaatatttgatacatataatacagctggttcttcattgcatatgtaaagtttacaatacttgggatttacaaagattgttacttaactaattatacatagggttactattgtacggcggaagtctattgtagtttgactaggaaggaacaaactctaagggttctctaaattatcagggtcgtcgtagtagtacgtagtcataagggtcctcctccggacccagatgtcaaaaagggttaaattgagcaagggtgagtattcacaatactcagcaagatattgtggaaatatgttatgcatggatatagagtggggttcttttcataaagcaaatataggcaatctggtagattaagcaagaatttaacaagacacaattatcaaatttctaacaaaatattgtatgagtccaaatgctcaaaaccgtgagcatggctattcaaatagattcatatatactttactgtagtaaatgtacgctttacccacagcccacgacgtgccgataattatcagcttaagtcatggcccagcattaggttactaacaatagtggcacatgttccatgaactctagtccccatacgctctgaacgtacgttatcagcagtgtgaggagttctggcgttcctggggtatttagagagaactgattgtatgataccatgccatcgcaatcagggtttaaataaatcacgtgatataataattcatcttaaatatttacctgcgcctcggtaaatattaccattgccctgctcggcaaaagtttgcctactgcgcgaggacttaaacaagaactactatatacagaggtaccacattgttaaataacataataactaggtctgttcgcatcctagaaccgtggtcgtactcatttgttcttcacaagtatttcggtagtcttatgtcggttgaaacagtactagccacccggaaatcaaccaattctagcgtactgttccaatctaagtatagagcattataactagattgtaagcaaaataagcataactatattatctgggtttctatggttgaattatgcatataaaagagatatttgaaagaaagtgtataaatataatttattgaaatataggcttaaatgatcaagaggtgaacaataacttgccttgctcgatgtcctgagattgattggtaatattcaaaatctcataagagtcctcaagacctaggggtagccattcaaaaatcaagtttaaaaagaattcaaataaaatccaaaaatgggaacaataaaataaaatgataaaatagcaaaaatagactcagaaggtagagaatgaatttagaggaattttagtccaagtttcactggatttggatctatattttaaaagttatgggcttctaaagtttgagattgaaattaaattgagaaaaagttaaaaactattgtgcatggtcccaccggtcagtctctctctcttcttcttcttcttcctccggccgttctctatttgtggccggcggcactagggttggggattgcggcggcgattggagggggaagtgcttgcgggcggagaggggaggttgctagggttctccggcgacggtgagcggcggcggaggggttaatttactgtgtaagtggcatgacggctagggtggcggcagtatagaagagtcgtaagggcgattgggattgtggaggttaggcatggctcagggagtgtattggaagcatctctagtgtacttagaagggtttagaaagcttaacaactattgacaaggtgtggaaggcatacggccgcgagcgtctccattggcggccgtcgagctcacgtcggatgccgagtaggggttaaattagtgctaaaggaatgcaaaaacggaatctaggggatacgtagatgcttgaaacaaaagagctcactcagttagcttgaaacggtgagatgcggccggaaaaacttcatggcggcaaaaacaaggcacggcggcggtggcggagctcgatcgaatgcgacgaggtgaaagtcattgcagagcttcggcttggtttcggaatgatgaaacacgactagcagaaggtgttcggatggttggttaggactaggtgtggaggagaccgtacactaggtgttcgatcggcggacggcggttgtgggtatggtgtaagggtggaacagggattaggtgtagcatggttgtggtcgatggtgattgatgatgaatgagagagggtctggggtcctatttatagggccttgccgatcggatgagctcaggcgtggtgatcgccgttgatgagctcaaaagccaagcttggcagagatggcaggggttgtgagagggaagggaatgtcaatttgggtggcgggagaggatgtttgaatgtttgacagtggctgcgtggctttaccgggggtgaaaatggttggcggcgtgctagtgccgttccgggctcgacgcacggcggcggcgaggaaggaaacggttggttcaacagcggttggttcgattcatgagagggaaaagttactgccacactttaactcaaacgcgcggcgaaatttggcagtttcatccgtggtagaggcaaaatcgacctcagcgttggaattaggtgggcgcacatgacggcaggcggtggcaaggctgcggcggcggccgtcccagattccatggtgttgacattggtgtggtggcggtgaattagggtgcactggacggttattggcgcgccaaggcgatcggacgcgcgcggttggccttgagaccgacgcgcggcggcccaacacgcgcaacatgggacgctaaagtcgagcggcagagggcagaaaggtgatgcaaagtcacggtttttagagggttgtggtcccctaggatctaatctagacattgcaaaagttgaggtggagattgggctacccgggctgggctagacatttcatcgagcactttgtgtgcgataaaccgtacttttcaggaatttgaatatatttggctaaaaagagaagaatttacctagggtctttgaacaagtttttctaggtttttgaactagggcatggttaggtttcaaaatttgaaagaattttactagagacactagggttttaagttaggacaattattctagggttttagaaataaaataaattggagggcttctaggagtaattcttgaaccaaaattaagaataaaaaggagagctttaaggaagatttgaatgtttaaatcaagattaatataagtcaaaagccagcatgatgtagtcaaattttagtttaaaatttcagtatgttacaacagggggttacaaaccgggactaaaagaaggtttctcaaccagtgaacctacacctaacttacaaaaccaatacaaacgaggcccctcaacagtattatccccgcttttggctgaaatggcacctacgtgattccttttactaggtcttcatcccacgtgacattgacatggtgcttacaagacagtctgataaaaaaaataaaagagcaaaattgaaaactaaaaatttaaaacaaaatatacagcacccacatgtcagtcaaacaaaaaagtaaaaaatagtgggacatgcatgaccctctccacctctatctcctcgccgactggatgggcttcctgaaccgtctccaggctgtcattgcaacggaacatctcaggcggtgcgaggctgccacgggatagaggagcggtgcacggcggctagcgggagaggaccccggggttgtcgctggcagagagcagtgttggcactgcccgagtttgcctcttgaactgtatcttcctcgcgcgtcattggtaggggtggacaaaaagctcgaaactcgtggctcagatcggctcgtagcaagctcggctcggatcgattcgaactcgtagtcttaacgagtcgagtcgagctagccttttagctcgtgagcttaacgagctagctcgtgagctactcgtttagctcgttagtataaaatatcgccacatcttcatgaacttagtgtttgttgactagtgcttagtcttttaattacatcaaaactattcatatttagtgagtactatattagttagtgtttattattatgttaatacataataaaatgttaaatttgaaactattaatatgatattaatgagatatagctcgttaacgagcctaatgagcttaacgagccagctcgcgagccgtgccgagctacccttttagctcgttaacattaacgagccgagccgagctagctcattaagacaacaagctcaaacgagccgagccttaacgagccgagctggctcgttatccagccctagtcattggtgtattcatcgcccatgtcgtcgctgcgagctgtctcctttccctcccagactggctctaccaagctcgccggaatgtgggggagaggagaggcgcagggtggccgcgcaagagaggagtggcgtggtgacgggagagaggagtggcgcagcggcgagggagtggaaagaggagtggccacactcctttccctcctagatcgcctccccctcggcttgcctccccctcggctttggctccacaaagttcgctggacggtgggggagaggagcagcgtgcagtggctggtgggagaggagcggagcgcggtgcggcagcgagacaagagtggcacgccatgtgggagtggtgtggagctatggacagctaatggaaatggatcttcgctggcggccgagttaagagggccaccagcgaagatgtacaccttttcgttggctgcccacttaaacgtccgccagcgaaaatagcgaaaattcgatttttgcaggcggctactatagagcatcgccagcgaaaaatcttgccacactaaaataaggcaacattaaaaagacaacccatggccatcgccacccatcggcaacgggtccagcggcggtgactcttgcaggcggtgactcagtgacggacgagggggctcacgaaggtcgcggcagctgctcgggaaggcgacggcgaggagaacaactccaccgcaggccacaggttggacgccgatgggccgcggggagaacagatccaccgtcgtccgctcgtgggggcacggatccgccgcttctaggcttctccaaccccctcccctcacccaggtttggcaagcggcgggtcaggtcgtggactttggcgagcgacatcatgggccgtggatctggccgctggaggtgcgcgggaga

SEQ ID NO: 23655 - DNA, 16299 bp, Oryza sativa
aaagatacaattgatgaaatttcaagaaaatcatatgcactcaggtgtagagcagcacagtgatgtttgagccaatatttcctatgacattaattaatttaaaacattcacgaaaccttgtattgaaggacggttgatgactctcacaatcgttatatactttcagaggattctaagtggtggcagcgagatgcagactccaggagcgaatagttatggagcgaatagtggtcaccagcgagatgcagactccgggatgtttttgtcgttctcagagaaaacacaagtgcaaacaaataaggatattcctgaatcatggaaggttcatccgagaaaagatgaggttgatccagatggatgggtcgtcgagatccatctccgaaatgatcaaaagaccaaggacaaggtttgtgaattcatgttatatgttgatcgattatatttgttccacgaattttcatgattgattaaaagagttacatgtattctttcccaattttatgagcatatcatgaaagaagttttttttaatatgtgcttcgttagggtggatatcattgttttggggaaagataaccagccctatcataaatataacaagtagtacatatgattctatatcttcgcagcatcaacatttctgaaagtcttggtgattgtacacatgaaatagaaatcttagagatcggctgaaaaagataaaatgtacaagagttcttgacatgaagatctcctttgggtgttatatgtattatttatttctttgtattaaaccaaacatgtgtacacttttaaaacatttgtactttgtatatctacagtataaaacatgaaacatggaatagttcaaatccaaacaggtttagtagttcattaaatctgaaggttaagttctatcttgtctagcaaaaacacttgttatgctacagttcaatcatggtaattaactacttgcattgatagcatatatctggtgggatatgatcatatctggccaatatattacattgaaccatgggaatgcatagttctttacctagtaatgacttgtggcaggattgagtggtttgtaaaatttcattcctttttaatacatattcttgtttatatgacatgataatttgtgtggagtgaaaaaagagttctatcacttatggagtgttcacaatctgtgttataatactcaatgaaaacataggtgtcattttataaaaagtaatatgtacaaattaaaccaaacaattttatgagatagctacctttagtataattggcatacagaaattatatttgacttttatttttcatataatcactatcaaaacaaagtatgttgcacatcaataatatatcttcttgctaattcattaatctcacttatcagttctaacaatatgaaaagccagaacatcacaaatttaatttggatcaaaacctctatactgtgaatcattaattgcacctagctttgggtgcctagctagggtcatacatgtgatgcaatggcaatataagtttttccctcccatccccttccaatcaaagagaaaagaaaacaaaaaatgcagtttggattttgctgaaatatacttgcttatactaaatttattttgttgttcgtatgttaaatgaaattgacttttttcttacttcgctgtattaccgccacaaggattacaatcataaattttgctcaaagcctgaagttgaattttttctagatactggaaaggttataatccgtaaagttccatgtattctacagaaggtgccctactacaacagagttgatttcaaatactgtattctacttctacataatctctgtttccaaacttgatactgattctcatacattgtgtctgtacagagatctgctgatgcaagtgttcctagcaggggtaagatatcatcaaactgtgcaccttggaattaggaataccattgcatttttactaatcattgtttggcgaatatgagttgtgttttagatgaattatatacgggtagaactgcagtatgattaaaatatatatttgattgaactggatcagtactactgacagaaacaataaatagaaaaaaatacatattacaatatttatttatatatatctacatatgtacaatcatgatattttagattatgttcatcttgctagcttgtatatatttttaaaaatttaagcaattttacagtttttgaggagataccatgaggtaccactttttctattgtaaatttagtacctcttagtacttatgtactatgaggtatcaaattttacactaaatttttttttaacatggtacctcctcaaaaaccgtaaaattgctcaaaaaattttgtcactgctaaggagaaacgttgctcacttaatcggactactatgacatgtgaacacaggtcgcggtcgtggcagacctcgtacaacaaggacgatgaccctaaattcaggtaatgtgcttttgataacagaattttgcattgttgttttttcttaaaatatatttactactcattgttagctctggatagtgaatcagaatgatatattttcattttattccatgaaacttgcgtaacataaaatgtggcccaaagtgaaatttcactcttaaacaaaaacaagatgaaacttttttttaaccagctgcaagtggtcgaacgattacgtgggtccgccggcggatctcacatcactaggatggtttgtatttcctgtgttgagcaatgtctaaaatcgtttaagcctgtgtttggtccacctctgagttgttgcactggcaactaattctgaaaagaccagtgttctacctttgtggcatgtgtgcttctttaattattgatgttttgcgataaagaatcttcttttggccagcaacgatttattatatctatatatattgttatataattgattgctgcactgtttcaattcaaaatattgcaggcctatatagtttgtttcagaaaagatttatattcttgttcaccaattaaatatgtctgtttcttttttacacaggttctggtatgtctgcctctggagggaaaggtccagaatcccccttacaacttccgcatagttttgtgtagtcaatgcgtgtggagattgtggatatcccatatctacacggcagttatagtttagttgggtacagggtaccaaatatagatagaatacctttatgaggattcggttagtttctaaactcgtatatcaaggaaatacccaggatcctagtcggttacgattgtattttatctgtaatcacatattccgttagggatatgtgttgtattttgtaatacggactccttcccctatataaggaggggtccgggtccctctagggacacgatttttctcgcagatcatacaatcaataatacactcggcggaatcatcctcggacaggagtagggtattacttcttgaataagaaggcctgaacctgtataaaattccttgtcttcaaacccatccacttttttagcttgatagccacccccttttagtattgccgaaatcttgtttcgacagttggcgcgccaggtaggggtagcgtcaagtttcttgccgatcagtacgatgggttccgtctccggcatcgacgacttcgtcttccctcccgggcaggcgtttcggttcggcagcctcgacttcatcaccaacgactttggcaagatctctcctcttgactcggatccaaaccagtcgggaaagaaccaggtctcagccccgtttggtattccgaacaaggccgagatctactccaagcttatctcgaccgagtcagcttcaaaccacacgaacgagatcccatctactccgacaccactagatcaagattgacggagcgtggggctcctcaccgggagaccgcgcaggcccccctttgccggttcggccgggggccctgggtgagactctaagctccttgtctgagtgtggaaggttcgcgagagcgaaaatacacgagacacgggcgatgtatacaggttcgggccgctgagtagcgtaataccctactcctgtgtttttggtggatcagtgtatgaagaagctacaaaatgccagcccccgatcgttctaggatcgtttttctccctctttcatccccctctctaagtgggcaaggtcctccttttatatctcaaggggataccacatgcaccatctctccctctctttcttttgcctggggactcatcctctcttccctccaatttgacttctcttcattaacggacggagatttgcatcgctgtcgtccgaatgaccttctgacgggacggcccatacctacctccacttccgccggaggcaggcgcgacgtgggaaaatggctgtctgctgatgacatgaccattgtcagaccggtcacaaatcggtcattcttgtccaccacgtgtcagtttaacaatctgcatgttcgcccttcttcatacaatatcttgcctgtaatggttaggatgaagcctggcatatatctgaccggaaccaacgtgccatctccaggagctaacacgccggctccggctagggacgagtgcttggaggctctcgtcctgacgggatggggcgaggcgtgcgtcagaccgcctgtcgccacctaacccatgatctgaccggtctgtgactggtcacagaccggataaacgagcgcgctgcactgcgttacatgcggcgtgaggcgctcgtcaaaactgcaataaatgcggttaggtgagccccgccatgctcacctaccccatatacgcggcgcaaaacccacaaggggtcggggcgcctcggccctcggggccgagacgggagcggtccgacccctcggggagacaaagagaagggcggctgtatcaccctcgggcccgacccccccgagggagttaggccacgtgggtgatcgtgtctgcctcaagtctctaagtcatgatactcccggtaaagaggagggcgaacacatcaccctcgggcccgacgccccctgacggtgccaggccacgtgggcgattgtgtctgcctcaagcctctagtcatgatactcccggtcccatgtcaccgacagtatcccccggcgttatgccagggcgatcgccctcctcgagggaagcggtcgggcgtgacgccacttcctaaggcctggtgacaggtggggaccggtctccacagttgggcagaaacccaacggccacaaatcacgcacatcggcaatggttactcggctgtcaataatgagcggtctcttcaagactgccacattactcgagtaacacgcgaatcgggacgagccgattcgttttgcctggagatatggtgatggcgcttcggtcggcgcgcgcacaagatgttccatctcgactgccacagccgcatatccacctcatacaccgcaaactggcgaatgggattagtggaagcgtgggcgcgggaaacgagggggcaagatagtgggcgcgagaaacgaggagccgggcatagcgttggcaagggtataaagtcgccgaggaagagatttgcttccttcctctcgccattattccccttgtcttcgccgcttgcgccctaactccttgtttcctgtgccctaccttcgccacacgcgctcgctctcaaacatctcttcttccggcgtcatggcacggggctccgctccgcttgacggtagcgtgttgccgccttcccgcatcgtgagcgagagacaggccgggctgccgcgccgcttcatgccggaatatgccaccggccgagagatagtctcgctgggcgagggatgcctggcgccacgctacccggggcggtccgtcttcttcctcccttttgctatggcagggctggttccgccattttcttctttcttcatggatgttctggagttttacgatctccagatggcgcacctcacccccaacgcggtcatgacattggccatcttcgcacacctgtgcgagatgttcatcggggtgcgcccatcccttcggctgttccggtggttcttcaccgtacagccggtgtcgccgccgtcggtggtcggtggctgctacttccagccacgggggccggtgctgaaccgctacattccctgcgccctccgcaagaagtgggatgactggaagagcgactgtttctacactcccctcgccgacgaagcgcgcctccgacttccgagccagcccccggcgcaggcctccaactggcgggcgccggtagatctgggagatggctatgacgccgtcctcgaccgcctggcgggcctgcgatcccaggggctcacaggggccatggtgttcggcgactatcttcgtcgccggatcgcgccactccagcggcgcgcccggggcgcctgggagtacaccgggtccgaggactgtatgaggacccaccagggagtcagatgggactgggctcctgaggacttcaagatattggtccaacgggtgctgaatctcagctccgtggaggcatccatcattcctcaaggagtcctccccctctgcagcgctccagaccgtgcctccatcctgaccatcatgcaggcggtcggggcgtcggaggagcgggctcctcgaggccacgatggcgcgggcgggagccgcaggggggaacaatctaccccgggagggggtcgtgcttctgggccccgcgacgggggcccggggagcagccgccctgccgacgcccgggggaagaggaagcagggaggaacccctcccccatctcctccccgagggggcggggtggcgcgggccagcagcaggcgcccggagggggccacgccaacgtcgcagcccgaggggaagcggaagaagaaacggccccgcaagatggggggacagaaccatcccggggaaacctcatttcccctccaaggtggtcgtgtaatcgaccccctcgcaggttcgtcccacgcccatcgtggccgtattcattccctcaatgcgagttttcactcatccatcttgtttgtcttctggtctttcttctatttcagcgagatcccgtcgcgtccctcccgccattccaagtccggccagtctgaggccgaggacccggcgaccacagaggcccggaggcgggaatctgaccggcgagaagccgcagatcgccttcgggaagccgaggaggccgctcaggaggccgctcgggctcgccagaccgaggaaaccattcgggaggaggccggactccgccaggccgagacgacgacatcctccgaggcgacccgtgaaactgaccggcaagaggccacggatcgccttcgagaagccgaggaagctgcccaggtggccgtccgagctcgccaagctgaagaagccgctcgggaagaggccagacttcgccaggccaaggcggcaacgacttccgaggcagtttgcgacgagggcgcgggcgcatcgcttgggcccaatccctcgggcgacgctcaggacaagccaggtccgggggacatccctgagtccggcacgtccctcggcgggccgagccgcgcggcatcctcaccgaggcggctcttccccacgccttctgttgctccactgagtgcagaacccttctgcaggccttggccgtcgcaaacaccacggtgttggacgggttaagtgcccaggtggaggccctacaagcagagcaggcagagatcgacgccgcatgggcgcgtgtcgaagaggggcgacgctcggtggaggccatggtggaagtgggccgcaaggcacaccgccggcacgtctcagagctcgaagcccgtcggaaggtgctggaggagattgccaaggaggtggaggaggagcagggggctgccctcatctccaccactgtgatgaacgaggcgtaggacaccctccgccttcaatacgggagctgggaggcggagctagagaaaaagctcgacgccgcccagggggtccttgacgctgccgctgcccgagaacagcgggcggcggagaccgaggtggcatcccggcggcgcgaagaagcccttgaggcccgtgccatggcgctggaagagcgtgcctgcgccgtggagagggacctggcggatcgcgaggccgccgttgctattcgggaggtcacattggcggtgctcgaagccgcctgtgccgaagaagagtccgcgctccgcctccgccaggacgcgctcaccgagcgggagcgagctctcgaggaggccgaggccgcggcgcaacggctggcggacagcctgtccctccgcgaggctttgcaagaggaacaggcgcgccgtaatctggaagatgcccgcgccgagagggccgcgctgaatcagcgggccgctgagcttgaggcgcgggagaaggagctggacgcgagggcgcgcagcggcggggcggccgcgggcgaaagcgacttaaccgcccgcctcgcagctgccgaacacaccatcgccgatttgcagggcgcactagactcgtccgccggggaggtcgaggccctccgcttggcaggcgaggtagggcccggcatgcttcgggacgccgtctcccgtctagaccgcgccggccggcaagtgggcctctggggcgggcggactgcgaagtacgccgccaaccagggggcctcgcccagcgcctctcggagatagccgggactctccaacggctccccgaggagctcgagaggacgattaattcatcctcgagggacctcgcccgcagagcggtggagctcgtactggcgagttaccaagccagggatcccgacttctcaccatggacggcgttggacgagttccctcccgggaccgaggatggcgcgtgcgcgcaggtccgggacgccgccgaccatatcgtccacagcttcgagggttcggcccctcggctcgcgttcgccctcaactccaacgaggaggatgatgacggcggagtgggcgacagtggcgacgaggctggcggcccgggtgcatcggagtgagcccccaggcccccgccaatctttaaatagtttcttcttttcttcttccgaggccttcgggcccccttcttgtatagactaatttaatctgcaatcaaataaagaagaaatttttcgtgtcaattctatttgttgtgtgtatgagacaaggatgtttgtgccgcggttcttttgtgtcttggcttgaacaagggctcgtgcccaggtcctagtcctcaaatggctcgggtcggggctagtgcctggggagatccacatgccgagactggccaggccgggagcgtggtgaccgagggttatgggtgacccgattgcgggtttttgccgattcccccccggagttcaccacgccccggggcacggctcggttctgggccccgtttggcgattttagccgacccgagcccccgagggcaggattgaacacgagtgacctatttcaagtcaagatctttcaaaaggaaacaacagcacagatacagcctttaggaaatcgaaaaatgcttttattgaaatacatatataagaatatgcacatgtggtagcccccggccaaccctgcacgcccgaggggggcgcggggttggccccagcctgaaacctgacacccgaccccccttaggggtagaagcgacgaaggtgttcgatgttccacgggttaggcagctctgtgccgtcgctcgtggccagccgaacggagcccggccgggggacaccaatcactcgatacggaccctcccacattggtgagagcttgctcaatccagcacgagtttggacgcggcgtaggacgaggtcgtcgacgcagagtgaccgggcccggacgtggcgctgatggtagcgccgcaggctctgctggtagcgcgcggctcggagggccgcgcgccgccttcgctcttccaagtagtcgaggtcatctctacgaagctgatcttgatcagcctcgcagtacatggtggcccgaggggacctcagggtgagctcggatgggagaaccgcttccgcgccgtagacgaggaagaaaggcgtttccccggttgctcggcttggcgtggttcgattcgcccagagcaccgctggcaactcctcgatccacgaatcgccatgcttcttgaggatgttgaaggtcttggttttaaggcctctgaggatttccgcattggcgcgctccacttgaccattgcttctggggtgggcaggtgaggcgaagcagagcttgatgcccatgtcttcgcagtaatcgccgaaaagttcactagtgaattgggtgccgttatccgtaatgatacagttaggcactccaaaccgggctgtgatgcccttaatgaatttaagtgcggagtgcttatcgattttgacgaccggataagcctcgggccacttagtgaacttgtcgatcgcgacatacagatactcgaacccgcccggggcccgcctaaacggtcccaggatatcgagcccccagacagcaaatggccatgaaagtggtatgatctgcagggcctgggccggctgatggatttgcttggcgtggaattgacacgctctgcatcgccggaccaggtcgaccgcatcattgagagctgtcggccaatagaaaccttgccgaaaggctttgccaaccaaggtgcgcgaggcggagtgggctccgtattcgccttcatggatatcggcaagaagctcgacgccttgttcccgaggaatgcacttcaggaggattccgttagccgcgcgcctatagagggtcccttctaccagcacgtagcgtttggaaatgcgttggacgcgttcactcccttcgcggtcctcgggtagagtcttatctgtgaggtatgcttggatctcagcgatccaagcaatcaatctaagagagctgggagcgctcccctcgggtcccgaggcctggactccgacgggcctcgggggcctgtcaggcgcgtccgtctcccctaaggggtcgggtcgcgctgacggctgggcaagcctttcttcaaaggcgcccggtggggtctgggctcgcgaggaagcgagccgcgagagttcgtcggcaaccgtgttatcccgtctgggcacgtgccgaagctctatcccgtcaaaatggcgctccatacgccgtacttggcgcacgtaagcgtccatctgcgggtcagagcaccggtactccttacagacctggttaacgaccagctgggagtcgcctaacaccaggaggcgacggatccccagtccagctgccaccctgagtcccgcaaggagtccctcgtactctgccatattattggtcgcccgaaagtcaaggcgaaccaaatatctgaggacgtctccgctcggcgaggtcaacgtgacccccgcaccggcgccctgaagagatagggagccgtcgaactgcatcacccagtgggcggtgtgaggcggctgcgaggggcccgagctggcctcggggactgagacaggctcgggagccggggtccactctgccacaaaatcggcgagggcctggctcttgatagcgtggcgtggttcaaagtgcaaatcgaactcagaaagttcaattgcccatttcaccacccgtcctgtaccctctcgattatgcaagatttggccgagggggtaagacgtaaccaccgtgacccgatgcgcctggaaataatggcgtagcttccttgaagccatcagaatagcgtaaagcattttctgggcctgagggtatcgggtcttcgcatcccggagggcctcactaacaaaatagacgggccgctgcacctttcggtggggccgatcctcttcgctaggggccatatccctggggcgctctttgtccaagcggcctcgcggggtgcactcgtcttctgtgccgacgacctcagggtcgaaggacgacaggggcggccttcccacagtggcctcggggccgtcctgggggtcgggggctcctggcgtcgtcggacaagcgggcaaagggccaactccggtcgtcaggggccttaggccaccgttcggctcgggggcctcttctccctgctctctcccgggtcgagttggcacagggttagcctcggggtcagagggcgataggtgcggccttcccgcagtggccctcgggccatcctgggggtcgggggcacctggcaccgtctgacaagcgggcagagggcctgctccggtcgtcgggggccttgggccaccgttcggctcgggggcctctcctccctgctctctcccgggccaagccagcacagggtgggggtgcgcggaatgaggattgtcctcatcgcgctccacaaccaacgccgcactaaccacttgcggggtcgccgctaagtagagtagtaagggttcatttggctccggggcgactagaaccgggggagagctgagatacgccttcaacagagtgagggcacgttcagcttcctccgtccaagtaaacggcccggagcgtttgaggagcttaaataagggtagcgccttctctcccagcctcgatatgaaccgacttagggcggccatgcaaccggtgacgcattgcacatccctaagcttgctggggggggcgcatccgctctatagctcgtatcttctcggggttggcctcgatgcctcgggcagagaccaaaaacccgagaagcttgctcgcaggtacaccgaacacacacttatcggggttcagttttatgcgggcggagcggagattctcaaaagtttccgctagatccgagagtaaggtctcttggttgcgcgtctttacaaccaagtcatcgacataagcctcaacattacgtcctatttggctacccaaagaaattcgagtagtatgttgaaaagtaggaccggcattctttaacccgaagggcattgtcgtataacaataagttcctatgggggtaatgaatgcagttttttcctcatcctccctagccatgcgaatctgatggtaaccagagtatgcatctagaaaacacaaaaggtcgcaccccgctgtggagtcgacaatctgatctatgcgaggcagggggtaagggtccttaggacatgccttgttaaggtcggtgtagtcgatgcacatccgaagcttgccgttcgccttgggaatgaccaccgggttcgccagccactccggatggatgacctcgcggatgaatccggcctccagaagtcgcgccacctcctcgcggatgaaggcttgacgttccggggcctggcgccgcactttctgtcggaccggccttgcgcccggccgcacggcgagacggtgctcaatcacctccctggggaccccgggcatatccgccggtctccatgcgaagacgtcagcgtttgcccgcaggaaagagacgagcgcgtcttcctatttgccatccagaagaccaccgatccgtgtggtcttggacgggccgtcgcccagggcaacctccttgaccgggacctcgtcgcatgtgactatccgctgcctcggggcggcgggggcggatgtgccaagcctctcgtcgccaccctcgggcttggacgcggcagcgaggtggtccgcgcgctgctccatacaagcaagcgcgactttgaggtcgccatggacagagatggggccaccggggcctggcatcttcatctggaggtaggcgtagtggaccgccgccatgaacttcaccaacgcgggcctccccaagaccgcgttgtagggcagactgaggtccgccacataaaagttcacccgctccgtgcggaagttggcggatccaccgaaggtgaccgggaggtcgatatgacctagcggccaagtgtgccccggcgtcacaccgataatcggctgggacggtcggagcaccatccctggggccttgatggcgtcaaaggctgcgggggaaaggatgttgagggctgctcctccatcaatgaggacacgccccagcttcacgttgcaaacggtgggggaaaccaccattgcgatctgtcctccccgggcaacgcacggagggtggtcggtctggtcgaaggtgagggcaacctccgaccaccgcgcccggcgcgtcgcctcaagagtaggggccgcggccagaagctctcgcttcatggccttgaggctccggcgagaaacgtgagcacacgctcccccatcgacagtggcaatggtggccccaggctcttggaaacctaggtcatcatcgccgtcatcgatgtcctcggcgggggccttctgcttggcctcacttcgccgattgccggaaggaaccgccggggacttgccctctcggcgctcctgcctcctctcctcctcccacttcctcgtccgctcagccaaacttttgactgcacggcagtccgcgaggtcgtgaagggaagtgttgtggacggtgcaccacttgccggttgggcgctccctactgggagcgccggcctcgttctttttgtcgcccgcaggcctcccctttcgggtggcccgcgaagcgccctcgacggcgaggacatgaccctcgtcgtcggtatgggctgacctcttcttcctcctcctgtcacgccgccctgtctgagcagcggatccgggggcggtcgaagctgccacaccggaaccgaagaggttccaggtccatgcctcctccttacgagccactcggtccgcgagctgaaaaagctccgcggtagtctggggctctttggaggcgatcttttcgagcatgcggttgtgccgcacaccccccctgaacgcgtagatcaccgcgtgtgcagggatgcatggtatggtgttgcggacttgacagaaccgctgaatgtatgagcgaagtgactcatcatcccttcgctggactgcatgtaagtccgcttcttcacctgggcgcggatatgtgccttgaaagttcatggtgaactgttggcacaaatcctcccaggagtggaccgacgcgggtggcaagttcattagccaaccccgtgcctgtcccttcagggccatgggaaagaaattcgccatgaccctgtcgtcacccccggcggcctcgatcccggtcgtgtagacctggagaaactcggcggggttgacgctcccgtcatatttttcggcgatggtgggccggaaccttgggggccaacggacgttccgaaggctcgccacaaaggctctacagccgacaccaccaaccgggggcatggagggctgatccctgcgtccgtgttgaggtgacactccggacgaggaggcgccctccgttgcgtggggagctcgccgaccattacgccggcgctcgatatcgatgcgggcatctggccccccacgctgatcttcctgggtcggaggcgctgatgaaggagtggcggccgaatggcgagcaacagccgccgctcgccgcgccctccgccttgacgacacggagccggtggtagcagcgccagaggtcttggtggtggaggaccgcccaccagcacctaggcgctgccgtgccatcatgaccaagttggccacgtcgtccagccaacgttgggctggagactccgcgtcagggacaatgggagggtgacgtaggagcgcgcccgcagcttggagcgcgccctggggcgtgctgccgtcaccgtagacgaggaggcgacgctccccatctcgccgcccttccccatcacccgtggatgtcgaagtcgcggatccttcgaccctctcgagcgcctcctcccgcctaggactttggcgtggagggggcggtggagtgcgagctcgacggcgtgggtttggctccccgtcatcaccgctaatgctcggagagaggttgtgcgcctttgcttgttcggccattgggctgaacaggaaaagcttggcgcacacgaaagagtgcgagagctcagaagatcactcgcagagccccctacctggcgcgccagatgacggagcgtggggctcctcaccgggagaccgcgcaggcccccctttgccggttcggccgggggccctgggtgagactctaagctccttgtctgagtgtggaaggttcgcgggagcggaaatacacgagacacgggcgatgtatacaggttcgggccgctgagtagcgtaataccctactcctgtgtttttggtggatcagtgtatgaagaagctacaaaatgccagcccccgatcgttctaggatcgtttttctccctctttcatccccctctctaagtgggcaaggtcctccttttatatctcaaggggataccacatgcaccatctctccctctctttcttttgcctggggactcatcctctcttccctccaatttgacttctcttcattaacggacggagatttgcatcgccgtcgtccgaatgaccttctgacgggacggcccatacctacctccacttccgccggaggcaggcgcgacgtgggaaaatggctgtctgctg

SEQ ID NO: 23656 - DNA, 22775 bp, Oryza sativa
atttggctgccgtcttcactacaagggcgtcttctccccgtaggcctaggcggaagtcggcttcaacaccgatcctgcctagctccagggaagtcagtgtcatactccagccactcggcacggcttcgacggatcaattggaaggctacttcagctctcccggcgtcgactcgcgaccaacaaagatcgtggagtacgacgaattcggctaccgctacgacaaccgcgacctcgacaacttcgacgaaagcttggaagacaattacacccctctctacttcggcgtcttcatggccgacaacgagacggaggaacaacgccaagcccaagaagcagaagcaagacgcatacagcgggaggccgagcgacgccgactggaggaggagcgccaagcgcaagagcaagaatggctgcggcgagagcaacaagaacgcgagcgggcagcaaaggaggccgaggaccgacgacaacgagccttggacgcagggcgacgagcgcgagatctcatcgggcagcaagacgttgaggggacagcggtcttccgcaccccttaacagaacgctgtcgctgcgatcacccttctcgacaccctcctcaaggaagacgcactcaatcaagccgatcacgtcgtcaacatcttgaaccagactaagaccatgatcgcctcttcggtcccggttaactccgaaagcgtccgcacgccgactggcagccgggctccccatctccgatctcatgattatctgtcgggtcccaaaactaatgattcggaaaccgacatgtttaactatatcaagccctggatcagtaggttgatacagcttcaacaatctggatcgtctttgcatacgtttagacatagctttgaaggagatattattacataaagtaatatggtatttacgagattgtggctaactattacagcagaagctttaaaatgacctaactctgctgttttactatagacttaaaccatttaaattacctagacttgaagattaagttaaaagggaactaacttatgcgattgaactcctgacttcggcaagaacatcaaatggactctgagaaaggaggttgaagcaagggtgagtacaatgtactcagcaagctattatatcaaataatgaatgcatgaagtagtatttaagtagatctaggtttactggcagaaagctgagaataaagaggaagaaagcctgggatgtctttatgcaacaatatttagtaaaatcttgagttaagtttcgaaccaaataccatatgagtcccgatacttaattccgtgagcacggctattcgaatagtttcatgaatactctactgcagtagatatacgctttacccgtagtccacgacttgccaatattcattagcttagtcatgcccagtattaggttactaacaatagtggcacctgttccatgaactctagtccccatgcgctctgaacataacgttatcagcagcgagaggagttctggcgttcccggggtttttagagagaactggatgagagaccccatgtcatctcaaccaggttttcacaatatacacacacagcgatcgcaatataatcaacatatttacctgcgcctcagtaaatatcacatttgcccttcgcggcataagtttgcctccttcgcgaggacttatataagaaccactgtacagaggtaccacattgttaattaacctaataattaggtctgtccccattctaaaagctgcggtcgtactcgttcgtttgacataagtatttggtggcaattttatcgatcgagacagtactagccacccggaaatcaaccaaatcttacgtattgtcccaatctaagttcattaaattttatgcatattctaactaagcatggctaagcaaaatctagcatatatctggtttgctatatgttcaggttatgcattcaaaatcatgaattactaatgcatagaataaagctatagagtataggataattatgctcaaaggagaggaataataacttgccttgctccaacgcaaataaatccgagataggcaacctgattatccgatgctcgaaataccacaggttgccatccagaataaaatagactctatttaagaagaggaagaaccaaattcaataaaagccataaaatagcaagaaaacgatgaaaagcgagaaaggctgggtttggggtataactatctccttaatgggttattgagatagtattttatgcgtaggctctaatgggttggagattaggttggagaggggatcaagattaggctttggtggaatagtggctagggtttagttgttctcgagtcgatgctgaaatagcatagcatatcggctcgcatttcatgtttaaactatgggtagttggagggtaaatggctgatatggagtttggatggcaggctggcttgggtttcatttgattaagccaatatcgaggtaggatgactatcggctgggatttgcgtgtttgctagtcgtcattagaattgggtagtatgacgactaggtttggtgtctagccgatgtcaacagacaatataacggctagaaggataggaagtttgtgtaggtttagcggggtggaagtgttactcggacaaccgtgagtggcggcggagcggctaggatcacacagagcttaaaagctaactgtgcggcgtgctatggaggtcgagggaaatagtgaagctctgctcgttatacgcattgaggcgtaaggtgtcagaagcaacacttcgaccttaggtttgggttttgtcggactttacaaccaatggttcgacgtcggggtcagaaaaccgtgcgaacgtccccatggaaggtgtaaagttccaaccaatggttgtttagtggctaaacggtattttgaaaataaaagtaaatatttgaaaggtgaatataagtttcaattataagtttaaatcaaatatttattcaaatgatatttgaataaattaaagaaattcaaataaaatcttaaaatagcaaatttggtatcaaaaggtagggtttgaatttagataaatttaggtccaagtttcactggaatcggacctacggtttaggagatatgggtttctaaagtttgggttttgagttaaataaagaaaatgcgaaatagtactgtgcaggggcccacctgtcagtatcttttctttttctttttctccttcttcttcctcccgtatcctctctccttctgcttcttcttccagccgaacacagaggagagggagacgaggggcgccggtgctctagatggcgggggacggagacgttggcggggaaacatgttcccgagcgatgctcacccaaggaggcagtcggctggcaaagggagtgagggaagaggccggaacggcggcggcaagtgcttacctccggccgacatggatggtggtggtgatggcttgattcaaagggggagagaagggggaaaggggcaaaatggattcaccacatcgaggccgagctaatggcgcaaggttttgggatgtagggctgtggaagaggagatcggccggtggcaatggtggtggccggtcatggaggagagagaagaaagagagagatagctcggatggatggaaaaggaggagggtttctctggctatttataggcgaggagaggcggtggagagaggcggttctggagacggtcgacggcttgaccacggcgatgctggcgtgaaggaagaaaagacggcgccgattacttcgtgacgacggagggcgttggcggcggcgtgcgcgtgcacggcatgcgcgcttgcgggaggaggaggggcggctcagctatgggccgacttgggccgcgcgagagagaagaagaattcggctcaaagttaaaaaggaagaagtctaattttcctagagattcaaataatagatttacaggaatttggatggctagattttgaaaaaggatttgaataatttgaatttgaaggaaaattgactgagagagagtttagaaggaaattatatttgaatataatttccaaaagaaatatttctctagttggtttgagtgcaatattttggagagggagtttatttaatgcactcaaatagaaattcaaaatattcaacaccataaataatttggctctagatttgaatatttttgagtatgtggagggaatatggagggagtagagtaaataaatttttagcccaaaatatgtggtatgaaatttagagaattagatatgggctaaataaggttttggatttgggacggagggataaagtctattcacttagcacaagatcaattattcacaatatttgtaacaatattattcttgtgccaaagaggaaatcaagccacagagattaaattggtggctagatcaaaaggagtcctatttggatatttggattgagaatcaaaggatgggtttaagatcaaaggatgggctaacaattaattccaataaaatcggaattgctttggtttaggttctagcacaatataggatggtttcttggaccataattcataatagtaaaaagggtttttcaaactaaatttaaataaaggaaattttaggcgaaagaaggttttagattaaaaccaaattaaggaatatttcgagataaattttaaatgaaaatcacaaaggcttttgaatatcaaagagggattttatgcaggttagctttaggaggtctcggtaattatattttcctaagtttaaagaggtaattaagaacataaaacccggcatgatgcaagattagaaaatagctaattttcagtatgttacattatcaccagccaagcctcagcatcgccggcgcaggatccaatcgcaggagcaggggccacgacgagcgatctgttcactcgcctcccgagcgacacaaggagcgccgagttgaacgtcctcgctccccacttcgccggcgtcctgtcgatcttcgcgatacgatcaaccagcgccgtgcagcacgaggtcaatgccattcaccagatcgctacgacgacgacatggatggagtatctttactaacgacctgcgtcgagtggattggccagccggcctcaagccaactggaatcgagacgtatgacggcaccaccaatccggagtcctggcttaccgtctacggtctcgcaatccgcgcagcaggaggagacagcaaggccatggcaaactacttacctgtggccttagcggattctgcccggtcctggcgccatggattaccccgtggcacgattggatcatggacggaacttcgtgaccacttcatcgccaacttccaaggcacctttgaacgccccggcacacagtttgatctctacaacgtcattcagaagtctggagaatcccttcgagattacatccgacgcttctccgaacaacgcaacaagatctccaacattaccgacgacgtcatcatcgccgctttcaccaaaggaattcatcacgaagaactagtcggcaagttcgggcgcaaacctcccaagacagtcaaacagatgtttgaaaaagccaatgagtatgccaaagacgaaaacgccattgccgcatccaagcagttgggtcctacttggaagccaaagaaagatgcgccgactacgggagagggtggaagtaacaatcacaaggaccgcaagcgtaagcccgaggaacttgttgcgactactacacactcctcccgacaacgttcgcgcgtcaacacttttgacaagatcatgaactcccaatgtccgcatcatcccaactccaaccacacagctaaggattgcttcgtctacaagtagtttgcagagcaatatgccaagaatgcacagaagacctctgacggaggacaaagcacgtcgaaaaagaaggatgatgatgatgatgatgccccgacaggtttttaggatcaccgcaaggagctcaaccacatctttggcggccctctagcttacgagtctaaaagaaagcaaaagctgacagaacgggagatcaacgctgtccagcccgatacgccctagtatcttcggtggtcggagaaaacaatcaagttcgaccgctcggatcatcctgaccgagtggtccacccggggcggtaccccccggtactagacccagtggttcgcaacgtcaagcttcgcagatccctcatcgatggtggcagtgcactgaatatcctcttcgccaagacactggatgacatgcagatccctcgcaccgagttaaagccgagtaacgcgcccttccacggagtcatcccagggttatccgctatgccactcggccagatcactcttccagtcacctttggtactcgggagaatttccgcacagagaacgtctgcttcgatgttgctgatttcgagacagcgtatcacgccatactcgtacacccggcgttagccaagtttatggccatcccgcactacacctacatgatgatgaagatacctggtcctcgaggagtcatatccgtacggagcgacatcaaacaagccgtcacatgtgataaggaaagttgcgagatggccaaaacccgcgagatcgcgatagctcgagaagacatccgactggctacaaccacgtcaagggaaggagaggtgcctactaccaaggtctcaaagagtggaggaagcgaagccaagaccaagaaaatccccctagatccttctgatcctactaaaactgctgtagtaggcgccgagttagattgtaaataggaaagcgcgctcgtcacctttcttcaaaataataaaaatatcttcgcgtggaaaccatccgatatgcctggtattcctagagaggtgattgagcactctttgcatgttaaggaagacgctaaacctatcaaacaacgactccgccgctttgcacaaaacaggaaggacgcgatcaaggaggaattgaccaagctgttagcagcaggcttcatcaaagaagtccttcatcccgactggctggctaacccagtcctagttcgaaagaagaccgggcaatggcgcatgtgtgtcgattacaacgacctcaacaagtcttgccccaaagatcctttcgggttgcctcgcattgaccaggtagtcgactcgaccgccggctgcgagctgctcagtttcttggattgctactcggggtatcatcaaatccgattgaaggaatccgactgcttgaagacttcgttcattacgcccttcggggcctactgctacattaccatgcctttcggactaaagaacgatggagcaacttatcaatgcatgatccagagatgtttctcaactcaaattggtcgcaatgttgaagcctatgtggatgatgtagtcatcaagaccaagcagaaggatgatttgattacggatctggaaaaaaccattgcgagcatccgcgctttcaggatgaaactaaaccctgaaaaatgcaccttcggagtaccgtcagggaagttgcttggatttatggtgtctcacagaggcatacaggtcaacccggagaaagtcaacgccatcctcaacatgaagccgccgagttcccagaaagacgttcaaaagctgactggatgcatggcggcgctcagccggtttgtctcacgactcggcgagcgggggatgcccttcttcaaactgttaaagaaaacagacaatttccagtggggacctgaagcacagaaagcctttgaagatttcaagaaacttcttactactccactagttttggcctcaccacacccacaagaaccgctattactatacgtatcagccacctctcaggttgtgagcacggtcctggttgtcgagcgtgaagaagaaggccatgttcagaaggtccagcgaccgatctacttcgttagcgaggttttggccgactccaagacgagatatcctcaagttcagaagctgttgtacggtgttctaatcaccgtcaggaaattatcccactacttccaaggccactcggtcacggtggttacatcgtttccactcggcgatatcctccataatcgcgaagcaaacgggcgaatcgcaaaatgggccttaggactgatgtccttggatataccgttcaagccgcgaacttcggtcaaatcccaagctttagccgactttgtcgccgagtggaccgagtgccaagaggacacgcccgaggaaaagatggagtattggactatgcactttgacgggtcaaagagactttcaagcactgggccggagttgttttaatttccccaactggagaaagactaagctatgtgctatggatacatttttccgcatctcaaaacgtggcagaatacgaggtgctccttcacggactacggatcgcaatctctttgggaatcaggcgtctgatagttcgcggagattcacagttagttgttaacaaagttatgaaagagtggtcctgcctcgacgacaatatgatcgcttatcgacaagaggtacgaaagttggaggataagttcgatggactcgaactcactcacgttctccggcacaataatgaagcagctgacagactagcgaattttggatccaaacgcgaggcagccccttctgatgtgctcgtcgtacatctttatgagccaaccgtacccaaaagagaaacagatgaagccgcggaaccgactggagagagcctcttatacgatttctgacctcccaagaactccctcaagataaagacgaagccgatttccaggcgcagtaggctttatattattcatgagaccgagctgtacaggaaaagtccatcaggaattctgcaacgctgtgtatccttagaagaagggagacaattgctgaaggacatacattctagtatctgtggcaaccatgttgctgcacgcaccattgtcggcaaggcttaccggcaatgtttgttctggcccactgctgcgtccgatgccaacaagatcgtgcggacatgtgaaggttgtcaatttttcgccagacaaactcatctgccagcccaagggttgcaaaccatcctgctgtcctagccgtttgcggcttggggccttgacatggtcgggccgttcagaaaggcagtcggcggttacacacatctctttgtggctatcgataaattctctaagtggattgaagctaaaccggtcatcacaatcacggcagataaagctagagattttttcatcaacattgtgcatcggtttggggtacctaatcggatcatcactgataatggtactcaattcactggtggagtatttaaagatttttgtgaagacttcggcattaagatttgttatgcctccgtagcgcatcctatgagcaatgggcaagtcgagcgagccaatggcatggtactccaaggaataaaggcacgagtttttgaccgactgaatccttatgccggcaaatgggtggaacaactgccatctgtactttggtccttgcgcaccacccctagtcgggctacgggccagtcgccattcttcctagtttatggagcagaagcaatgttgcctagtgaagtagaatttgaatcattgcgttttcgcaattttcgcgaagagcgctacagggaagaccgagtggatgacctacaccgactggaagaggcccgcgaagcagccttaattcagttggcccgatacttgcaagggttgcgtcgttatcacaatcgtaatgtccgatcgcgagctttcttagtcggcgacctggttttgaggaaaattcaaactacacgagatcggcacaagttatcccctttatgggaagggccatttataatctctgaagtcactcggccaggttcttatcgactcaagcgtgaggacggtacacctatcgacaactcttggaatatcgaacatcttcgtcgtttttatgcttaagtttgcttctgtatctccctgtcttgactgacaacatcaagcttccccttgaagttatcagtcgggggctattataataataatggagtgtgatttttatcaattcaatttgcttacttatttatcattgccttgcttgatttttcgacttagtccatgaggactgaaagttttttaatagcttttgcgggttttaggctcaataaggcttgacaaaggcttttaagaaatcagaagctaagtatgaaacaccaagcacagcataaatttatcaatattgtacaaattgtgcctccatcatcaaacatcaatcagtatcagtcctttcatcatcagagccatcaggactagtcggtcgaagatcggtgtcctggaatctctctactacatcaactgctattttgtcagcggctttctacgcatcgttgataagatcgagagcagcttcttcgctcgtcccgtccgcaaagccatcaacggcatcaatgtcgattttcgggtaaagggatttggtcatcgccaacgctagacttgctcccatacttccggcttctttgatgttcttgaaatatgtatccagagcaactcttagcttatcaaagatctcggaagcgtcgaatgtactcgggccgttgttattaaagaacattgcttgagtgagtggagtagcggcgttagcaacttcatcccgggccccttcaagccttttaattttgccgaccaggacgtcgaattgggcttgcaacttgatcttgcggtctgcatcaaagattcatattaacgagtcaggatacagaaggcaatggcttttggagtatcaattgatggtaccttcaacgtcctttaaagctgagtccctctgactcgccagctctgctttatcgctttccagagtttgaatccgtttctccaattgagatatcttggtggtttgcactacattgaccgattaattgaggttataaagatgatggcacaagttagtcagacagattttgtgtataccatttgacgagccactcagttcgaagttagactcctggagctagccaattcgatctcttagatcgtgctcggttttgttggcaagctcttttgcctcgtgcaattgatctctgacagcttcaagggttccaagatgaggaactagtttctctagggttacggtcttcgcctcattcctaaggtgaatcctctgcaaaacagttttatcagcgctcaagctagatggcaaacaagatggctgaggtcaggcgtcaaggaacttacgtttacaatacgagtcccttggccgagtgcctttttcagtaggcatacctcttcgtcttctttttgccggtttattacaattccttgaggttgcaagtcatcatcccaccacttgaccagaatgggagggcgcgagtcttcagctgcacgtatccggagaacttcctcttcatcaccaatcattggtcctaatgtatccatggataaaggacagaagatcaattaaagttggttggattaacacggtttcaggcaaggtgtttacccgtgatgattcccgggcgaggacgagtcggctcttgtgtcttagcaggagatccaggcctcgggtcgttgctggcatcatgtccgtgagggctatcagcctgagcttcaacttctggaatctcttggcttggccctaggtccgactggtttccagtcgggggctcctgattgactctggcttcagcttcggcaaactggtttccggtcgggggttgattgctggattctacattatcggttgccagctgattgtcactcggatgatcctcagcagtcggcccggtttctttggaagaacttgtttccatattagccggatcagagtcctttccagaaggatctatatcagatggtttcctacaagtttttgttatcagtattatttccatgctggctgcgtatcaatacaaggaagattgttatatgatttgtacttggaagacttcctgatctttggcgtaggatgactagatgttttcttctttggaatagcctgcttcggcagctttctggttgtttctctatctccaggctattagcgttgtcgccttcgtcgtcactcagcactaacttcctcttacgggaatctgactggctggctggattagaggtgttaggctgggcttcggaccggatctttggtcccccgctcccctgaccagtttgacggcgaggtgatcggcgctgagcgattgtgggatctgacttcattagagcaaattcctagacataatatcttccactgtcaattgatttaacaaaaagacaagatcatattttgaggaaggttgaagtgtttgagtacataccggtgggggaggattgaatgcattgtatggcacaactggaagcagatgtgaataactgacgacaatagcatttgagaagatcttgtacattctttccttcatgaccttaaagtcaagagagtctggatcttcatgatttggatcatgtttgccgtcaaactcaaaagccgtgcgggatctctctttgattggagctaatcgacttttgatgaagtgccgagtgatttgttctccatgcaaaccttgttccttcacctttagcatgcgttccatcaattccaccgcctgagcagcttcatctcccataggcaatgaattccatgtgtcctggtaaaccggaggaagacaggagtactcggggagtgcgggttcaggattttgaacgtaaaaccagtttgcgtgccaaccattgtttgaggtcttcaagggcatggagaaatacttttggcttagtgttcctctgagttggaagccagcgcccccaaccacgcatggtttgctcttgttcggttggggcttgaggaagaagattcggcggaataaggcgaaatgaggcctaatgaccaaaaaagcttcgcaggcatgaatgaaattggcaatgtgcactatggagtttggattcaggtgatgcaggctaattccatagaagctcagaattcctcggaaaaatcttgaagttggaagagaaaatccaccataaaagaactgagaaaaaaccacgacctcgtgtgtatcgagggttgggaatgcttcgccgaaggctggtcgccacccgatgatctccttcgccggaagaacgccgtgcgccaccatttccttcagattctcctccgtcacgtcggagggtgcccactgattctcgaaactttctctcttccgccatggatgcgagtcgaatgatctgattcggtctgagaaatagctgaaggggaatggggaatcggtgcggtggacgcgtggagaagattcgtggatttttgagaatggattggggcggattgatgaaccctagcttcgtcggcgtggctttgcactgtagcaaggagtggggaaatggcgagagttttggcgaggaagacaaagcgttgcttggactttggtgttttgttagggtatcgggagtgctaatgggcttggacctgtacagtacttcagcccaatattattagcagcgtggcccgttgtgatccctagggacttaggcgctttttgctttggcaatttgtactcacaatgatgtgacccgatgctgttaaaatcctttttaacgcagttagataattctttggaattaccacgatgcaaataaaaaggtgcccgacagaaaggtgttatactatttttgtaagctttattagcctgcaaaagctgtttgggttgattcgagatgactagtttattaagagtcattctcttagcatgttatatgcttattttgattatggtaagggttgtagcctaggctattaaatttcttaattaccatgatttttatcatatttggtggatcattttaagagtttcttactcagattcttgccaaatatgtctttttgtggaccttttgagtgtttatcactcgggccttttcatatttttattcttgatatattaaagctgaggagcagtcggctgggtattttactaaataccatgcgtgctttgctatatgatgtttggttgtaaaaccactcggttcttgactacatgtttagttttttaactaaccacatagtcgggggctacacctaattaggtgcatctacccgctgcaccatattttattttcgcccttcacagtctttgattttagtgctcggcaggacagagcaggaggaattgaagcactcggattattgctacttcgtcgactgcaaaggtctcaggggctactgtggagattgtggatatcccatatctacacggcagctatagtttagttgggtacagggtaccaaatatagatagaatacctttatgaggattcgggttagtttctaaacttgtatatcaaggaaatacccgggatcctagtcggttacgattgtattttatttgtaatcacatattccgttagggatatgtgttgtattttgtaatacggactccttcccctatataaggtgcggtccgggtccctctagggacacgatttttctcccatatcatacaatcaataatacactcggcggaatcatccctggagaggagtagggtattacttcttgaataagaaggcctgaacctatataaaattccttgtcttcaaacccatccacttttctaacttgatagccacccccttttagtattgccgaaatcttatttcgacaatgcgactactcgaagatgcatctttagaaaagatattgatgtgctccctagatcatgtgtttgggctctatttttttctttaaaaactaattcataatcacaaagtattcatggtattattaagaagttaagatttccttggacattcagtcatttgcttctgtgaacaagtttggtatttcgaggaagaaatacattttttttaatttctcttgtgaaatttatggagttcagtattttgacataattaatatcgtcaaagcagtgttgattctatgggattgatgcatgtgcaaactagtgacaacatatgctttaaggtaggataattaattagcatctaaatgcagggttttgtagcccactacttatacaaaagttaggttttcgttttcatggtccaatttgtcaaaactaacaaattgttcagaaagaattgcttgctataaacactaaattaaactggtcactatggcatgattagggttttgatcgtgttttatttgtcccaaatttgttagtaatggataaaaaatgtaaaactcatttttttacaaataacgattatgtccgaaatattgcttaagtcatccaattaaaggcagcacaaaatgtgcacatattaggggggggggaggaatccaaagccaatatttatggaatatatggcacattcctcccccttttttttaatcaatttatagatgtatagaatatttgccaaccagatcagcacataagaaaaagtatagctcgtatgttctagtacatatgctagaagggccatattatgttttctacagcagtaagcaaatgactaatcctagttatgttgagtggattgatggattcaaaacaaatttgggtagtcaacatgcactgtgtttcatgatctaaatatataaatggaagctacgatactaatatataaacaaaagcaacagttaaaccttgttttcctttcgctgttgaacatgaggaatggacggtgggtatattaatttgtagcatatcttattttttggtgaataggcttagcagtttgaaatttgaattcttcagtatgccttgttgtcagtttcagacaatttctcgctgcaacttgcaactccatacatgcacgcgttatctataactgataagttttttaggaaagcaaaaaactattctgataatcattaattaactcattttaaaaagagctattatactgaagtattctctaggaaaaaaggtaccacatcccatatccaaatttaacacagaatttcacttaaagaaccttggtacatgaactgaaatccatgtgaatcaatttagtttacccagtaggtttggtacatgaactgaaatccgtgtgaatcaatttagtttacccggtaggttttttctttactgaatctaacataacatggtgtcaatctagacatatatgaatatgtgataaacctgtagattacatttcatcaagaaaaacattaaacagtgattaccagtagtgctgaacttccatcccaccaatgtgcatgggaaaataaaactaaataaatctcaccaataatggtataccgagtatagatattattggtggaagaaactctttttcttttgcaactatgctacttgctaaacaaaacaaacctcgtaagcatgaagacatgataattgaacatctaatgtataaagataagagccaattcagatcaatgctaggccattttattggaaattaaatgaaaatgaatgattagttaatcaccaatgctcgacacaatacgatggagcgattgctagtggagctacccaggtatctatggccatcagctgaagtgtacaacaaagaacggagcttaacagtcatggagcacgcgattccggcggtattgggctgttcaccctagacgacagacgcctcatcctccgtttctggctccagcacgccgaggagtggacgcagcacaggaaagtgaagctgagggagctggatatagttggatgtgtctcctcgccttaggccttgtttgttttgtaggggatcggagagcattggaggggattaagagaaaataattcgaaatatgggacttaataggattaatcccgaaaagtgctaggagacgcatgcaactatgtaatcgttaatatgagtttgctctctcctaattgcatttttgtgtgcactcagcacaatatataatttccatggacaagtttaaactgtactgtactggatagtggttttgcagaaactgttggcggttgatgatgtgcttgccggtttaacaaaatatgtactccctccattcttaaaaaaaacctaaatttatctatgtatctgtacatatatgggacatattgcatttttggtagcggcaataaagaaagttgttttaggctgtatgcatgtattgtgtgaacacgtactatacataatatatttttggcagtagcaataaaaaaactgttttcttctactggataccacaccaagtataaagaggttccaactttatacatttgagatttggctctttcctaatagcacggaagtttacagcaaatatcactactgaagaactgatctttgtccgcatgataaaactcgcattagtctcgatttgaataggaactggaactaaagaatatctttaatcctaattgaaaagcccagcaatatttttttatgtttagtcccggctgataacaccaattgagactaaaagatcatttttaatcccggttaataacaccaattgggactaaagatcatatttttaatcccgattggtatcacgaaccgggactaaatatctttttcccacgtcattcgctctctcttccttatctcggcattggtagccgctcgcacgccctatccactcctcctcatcccctcttcatgccaattcttctcctcctccccctcccctctctcctctgatcccctcctccccttcccctctccctctctcatctccatggcgggcggcggtgccctcccctccgctggatccagcggaaggggatgcggcaggtggcggcaagcacacaaggcggcaggtgacgccaggctggtgcccggcggaagtggtggtggccgggtggtggcaggccagaagcagcggcggccgtgcgggccctcctgatttgtttttagattttttttatagatttttttatatttgtggatgatttgtagattgcagatgattttgtggatgggcatgtaatttgtgaatgatttgtggattgtggatgattttgtgtatggacctgtgaattgtggatgattttgttgtgtgtatgatttgtaaggattcggggtgatggcgttggtgatgcaagtagcaaaaaaacaacggaaaaaaagaaagaaaactaaagatggatatccttagttccggattctaggtcccggtttgtaacccaggattaaagataacttctccacagtgtatgcatatgttctaattaaagtttagagtaaattgcatcactggtaacgaacatgacaggtgggtgtaatctagtgcacgaatttatataatgctcgttgtgatgcatgaacttgttttgtgcgtgccgagaaaggcaaaaaggacactatatggctaatcttattgaatcaggggctgattaggatactatgtaaacatatatctaagaaggttgctattagacatacacctcatcaataaaaaatagtatgggatatagtgatcgtagaaaaatatttaaaaaaaatgagcactgatatcagggttaaaaatatatgaaatttatcatttccatgacgaaggataaactagagaccaaatttataaatattgcatgtattatgcatattcactacacatatgcacgtcacatcctaactaatcaacatcaacttcgtaaaattaacattgccaaactattttggtctcattcgcacaaactagacaagttcgtgtactgaaacgaatattttacaagtttatatactaaattacactcacctaacaagattatgtatcaccaatgcaatttactctttactttctaaagtttattgcagaagaacctgttcgctgctcaccgcagtaaaagttactccctccatcacaaaatttaagcattttagcatagtgacaagtcaagcatttttaaatttgaccattaataacaaaaaaaattaaaaaaatcaatcatgtaaaattgatggtactagatttatcattaaacaaactatcataacatataactctttttatttaaacatcttacttttataaatattgttggtcaaagtaacatctcggagaccgtgtcagagtaaaaaaatgcttatattttaggaaggagggagtagccattttcagccattcttcattctcatgaacgcaccttctgtcttcaccggccatggttgttgagataggtgaggtcctcatatctagctcattccacttgtcccattcttgttgtccgccaccacgctgtgttgtcgccacatagatgaccaggttatctgctgacatggccgccattgcattgtgatgtaagcgccacctacacattcatgtcctctatggcatcccatgtgtcctgtgcgatgggatgccatctcggccggccggtcggtttctatcaatgtagaccatcgtttaccatgtgccacctggttggacttggtccacactaaacctctctcttctgcagtcattggtgcatggctagtttacaactgttggcgccataaatcttcttgccactaaaaaatgcttgcagagacatttttctagtactgtagaggtatttttcaaatgcctttacaatattatagaggcattttagaaaatgtctaataagtatcgtatggtgaattgtctctacaaacgaagagacattttataaaatgtctataagatggtagaggcattttctagagacattaaattataccacaaatatatgaaactagtcaaaaaggagaataaaatagtttccttggttttaacaagtcttaaactcaagatctcttggacaaatcatttttatcttcagtgcactaaccaactcaactccatgtcattacttatatgtttgtgcctttagttacttatatttagtcctttagtacacattgtcattctaaaacgtgtctctacatagtttaaaatgtatcaagatgatttattttgggacaaagggagtatattcctctattatctactcccactactggggaaaggctcttcactcccggtttgtaaccctttctactctcgggtttcaaaccgggatacccaatccggaactaaagatgctcatctttagtctcggttaaaataactaggagtaaaaatggatctttagtcccggctgttattaccaaccgggtgtagccaggcgccaggttccttttttcctttttttattgtttttaacatcgaataatgatttcactccatctacaaatcaaccctaaatcaatcaacacatatcacagcacaaaaagatatctccaaatcctcaaatcaatcatcaccaaatacatcacaaattctaaaaaaattacatcataagttctacaaaaaaaatcatcgcaaataaatcacatattcacatcacacaaatacatctcagatccaatcagaaattcttaaaaaaagaaaaaaaaatcaaatatgtctcgatccgcgtcggccgccgccacctgccacgtggcctcgccgccagccgccgcccctccgcgcgaccggccaccgccagtcgccctccgcgcggcctcgccgctgaccgcaggccctctacccgaccgctcctcggtctgaaggggaagttgggagaagaagttgaagagaaggggaggatggataacatagagaagaaaatgaggagaaggagaggataagtataagagatagaagaagatgaggagttgggaggataagtcgtaaggattctatactgcatatggatttttagtcccggttggtaatacaatccgacaatccgggactaaagatataaataatcttttactcccgattgatattaccaaccggtactaaagtggtaatctttagtcccggttggtggcgccgcaaccgggactaaaaattctcggtcccctgacaagccactaacatagaatgaacagggactaaacatcatctttagttccggttggtaacaccaaccgggactaaagatcaagattttttttaaccgggactaaaaatggtttttatcccggtttttattacaactgggactattgtagtttttgatcgaccctgcaaatatcagttttctagtagttttctagtagtgtcctaagctccctcctactcccacggacgcatctgactgtgatgtgtattgcacgtgcacaataaccagcagtacctttaaccttcagtctttttgaagcaaaatgtgaatccacttattgatatattattctattatttgtttaattattttgggattgtcctctaaatttatcttttttagcctgacgccctctgtatagaaaaaaaatcgttgcatgtacacttgaatggaagcggtgtgtatggcacatatttataattttggagatgatttgaaattagtcaaagcatatcacataaaagtttatttggtgcccttcaagctaatgcatgcagaaatatctccatctcttctctcatactcaaattaatccatatgcctcaataggattaatctcccaaattaattagctaggagcctcacatgcaactatgtaaccgtactttgatatgagtttgctatctcctaattgcatttgctgtgcagtcagcacaatacataatttccaaggaaagtttaaattccattgttacggggtaggggttttggagaaaccattggaggttgatgatatcctcgccactggttttaacaaaatacatactccctgtgtccttaaaatgccaaattttatctaatcatcagaagtggtttttgttagatggagggtgtataattaaattaagtgctatatatgtagtattgtgtaaacaccatcccatattgcacggcaataaaaaaagctattttaagcagagtatattgtgtgtgaacgcgtcccaaaatacatttttggcagcaacagtaagaaatgtgttttcttgtgctggcaacattattattgtttggcatttagctcttttctagttagaacggtagtttacagctaatgtgcatatctcctaattaaagcttacagcctttctggagctacctgttttcagcacagatatgtatgaacatctacctcgtttctcctggatctacccctactccaatcctcttttcttctccaaatcctctcttctgtctctccttctcttcttgcaggtttcctacttctagacccagggcaccaccagaaggggtatgtagccatggtccatctggtcttccatcttctggtggtggcaaaggcaatggtgtagcaatagcaggagctaatccgtggtattcgggggatggctctgatggaagcaataccactagtaacagcgagagaacagtcacagctgaattcggaataatcgtgcatcctggtggttatggtgatcaggaggtggattctcgtacggctaatcaccatgaggcagattcagaaactgatagcgagagaactgaaggtgctagctttgggaagatcgtaaatagttttagtaattctcgccatttctcctatgtggactctgagttgctcccaggaaaaaggcagaagaatttagtgtttcaacctgacgttcatgaatttctatcatatcctgattgttcttgactccatgatctttttatggttcatcaaaaaatatacgagtgcaatcccttagttttgatgagaatatcacaaacggtgctttatctcagttatttttgaaatccagttcaatctgattgtcttgcgtgtaggtttcttgttcctgattacaataaataatgttgtaacataacaaattataacagatttttaagtactggaacacaatcacctggaaaaatagcaactgtaatctattaatttcaacctcaccttttctctgtaactaacacaacatgattgagctccatggggtttttttacttcctttcttatttttgttaaacagtccaacaatacaacatatatttcaacatcttttctgaaatgggtattctttattatagatgtaaatttgaataaagatacaataattcttgtagtttctagaaaattgtatgcaatc

SEQ ID NO: 23657 - DNA, 9963 bp, Oryza sativa
tgtgtgtgctgagtgtgtgtatttcctatcacatgaattagtttaaatcgttcacgagaccttgtattgttgtactgtttaagattctcaccatggttatatactttcagaggattctaagcggtgacaacagttatggagcgaatcttgtctagagtggtcaacgacaagatgcagactctggggtgtttctgtggtcctaagggaaaacacaaatgaaaaacattaaggatattcctgaatcatggaatgttcatccaagaaaagatcagtttgatccaactggatgagacatcgagatccatcttcgaaatgatcagaagaccaaggataaggtttgtgaattaatgttatatgttgatcaattatatttgttccataaattttcatgattgattgaaagagttacatgtgttctttctcaaatttatgagtgtatcacaaacaaagttttttttaaaaatgtttttgtcgagattatggataccccatatctacacgacagttatagtttggttgggtatatggtaccaaatatagatagaatatctttatgaggactcgggttagtttcgaacttgtatgacaatgaaatacccaagatcctagtcggttacgattgtattttatctataatcacatattccgttagggatatagactttattttgtaatacggaccccttcccctatataaggaggggtccgggttcctctcgggaggacttttttctcccagattatacaatcaataatatactcggcggaatcatccccggacaggagtagggtattacttcttgaataagaaggcctgaacctgtataaaattccttgtcttcaaacccatccacttttctagcttgatagccacccccttttattattgccgtaatcttgtttcgacagttgacgcgccaggtaggggtagcgtcagttcttcgccgattagtgcgatcagttccgtctccggcatcgatgacttcgtcttccctcccgggcaggcgtttcggttcggcggcctcgacttcatcaccaacgacttcggcaagatctctctcctcgactcggatccaaaccagtcgggaaagaaccaggtctcagccccattcggtattccgaactcggccaagatctactccaagcttatctcgatcaagtcggcttcaaaccactcagacgagatcccatctactccaacatcaccagatcaagatgatggggcctaccctccaatcctgatgaaactccccgacgatttggccgccgtcttcactacaagggcgtcttctccccgtaggcctaggcggaagtcggcttcaacaccgatcatgcctagctccagggaagtcggcgtcatactccagccactcggcacgatttcgacggatcaactggaaggctacctcagctcccccggcgtcgactcacgaccaaccgagatcgtggagtacgacgaattcggctaccgctatgacaaccgcgacctcgacgacttcgacgaaagctttgaagacaattacacccctctattcttcggcgtcttcatggccgacaacgagatggaagaacaacgccaagcccgagaagcagatgcacgacgcttacagcaggaagctgagcgatgccgactggaagaggagcgccaagcacaagagcaagaacggctgcggcgagaacaacaagatcgcgaacgggctgcaaaggaggccgaggaccgacaacaacgagccttggacgcaggacgacgagcgtgagatctcatcggacagcaagacgtcgaggggacagcagttttccgcacccctcaacagaacgctgtcgctgcgatcacccttctcgacaccctcctgaaggaagacgcacttaatcaagccgaccacgtcgtcaacatcttgaaccagaccaagaccatgatcgccgcttcggtcccggttaactccgacagtgttcgcacaccgactggcagccgggctccccatctccgatctcatgattatcaccagccaagcctcagcatcgtcggcacaggatccaatcgtaggagcagaggccaagacgagtgatctgttcactcgcctcctgaacgatacagggagcgccgagttgaacggcctcgttccctaccttgtcaacgtcccatcgatcttcgcgatacgatcaaccagtgccgtgcaacacgaggtcaccgccgtacgccagaccgctatgacgacgacgtggatggagtagctgcctttactaacgacatgcgtcgagtggattggccggccggcttcaagccgactggaatcgagaagtatgacggcaccaccaatccagagtcctggcttaccgtctacggtcttgcaatccgcgtagcaggaggagacagtaaggccatggcaaactacttacctgtggtcctagcggattctgcttggtcctggctccacggattaccccgtggcacgattggatcatgggcggaactgcacgacaactttatcgccaacttccagggcacctttgaacgccccggcacacagtttgatccctacaacgtcattcagaagtctagagaatcccttcgagattatatccgacacttctctgaacagcgcaacaagatttccgacattaccgacgacgttatcatcaccgctttcaccaaaggaatttgccacgaagaactagtcggcaagttcgggcgcaaacttcccaggacagtcaaacagatgtttgaaaaagccaatgagtatgccagagccgaagacgccattgccgcatccaagcagtcgggtcctacttggaagccaaagaaagatgtgccgactacgggagggggtggaagtaacaatcacaaggaccgcaaacgtaagcccaaggaacttgttgcgactactacacacttctcccgacaacgttcgcgtgtcaacacttttgacaagatcatgaactcccaatgtccgcatcatcccaactccaacacgcagctaaggattgcttcgtctacaagcagtttgcagagcaatatgctaagaatgcacagaagacctctgacggaggacaaagcacgtcaaaaaagatagatgatgatgatgatgccccgacaggttttcaagaccaccgcaaggagctcaaccacatctttggcggccctctagcttacgagtctaaaagaaagcaaaagttgactgaatgggagatcaatgttgtccagactgatacgccgcagtatctttggtggtcggagataacgatcaagttcgaccgttcggatcatcccgaccgagtggtccacccggggcggtaccccctggtactagacccagtaattcgaaacgtcaagcttcgcagatccctcatcgacggtggcagtgcactcaatatcctcttcgccaagaccctggacgacatgcagatccctcgcaccgagttaaagccgagtaacgcgcccttccatggagtcattccagggttatccgctacgccacttggctagatcactcttccggtcacttttggtactcgggagaacttccgcacagaaaacatttgcttcgaagtcgctgatttcgagacagcgtatcacgccatactcggacgcccggtgttagccaagttcatggccgtccctcactacacctacatgatgatgaagatgcctggtcctcgaggagtcatatccctacggagcgacatcaagcaagccgtcacatgtgacaaggagagttgcgagatggctcaaacccgcgagatcgcgattgctcgagaagacatccgactggctgcaaccacggcaagcgaaggagaagtgcctatggccaagatctcaaagagtggagaaagcgaagccaagaccaagaaaattcccctagatccttctgaccttactaaaactgctgtaataggcgccgagtaagattgtaaataggaaagcgcgctcatcacctttcttcgaaacaataaagatatctttgcgtggaaaccatccgatatgcctggtattcctagataggtgattgagcactctttgcatgttaaggaagatgcaaaacctatcaaacaacgactccgccgctttgcacaagacaggaaggacgcgatcaaggaggaattgaccaagctgttggcagcaggcttcatcaaagaagtccttcatcccgactggctggctaacccagtcctagttcggaagaagactgggcaatggcgcatgtgtgtcgattacaccgacctcaacaagtcttgccccaaagatcctttcgggctgcctcacattgaccaggtagtcgactcgaccgccggctgcgagctgctcaattttttggattgctactcgggatatcaccagatccgattgaaagaatccgactgcttgaagacttcgttcatcacgccctttggggcctactgctacatcaccatgactttcggattgaagaacgcgggagcaacttatcaacgcatgattcagagatgtttcacaactcaaattggtcgcaatgttgaagcctatgtggatgatgtagtcgtcaagaccaagcagaaggatgatttgattacggatttggaagaaacctttgcgagcatccgcgctttcaggatgaaattaaaccctgaaaaatgcaccttcggagtaccgtcagggaaactgcttggatttatggtgtctcacagaggcatacaggccaacccggagaaagtcaatgccatcctcaacatgaaaccgccgagctctcagaaagatgttcaaaagctgactggatgcatggcggcgctcagccggtttgtctcacgactcggcgagcgggggatgaccttcttcaaactgttaaagaaaacagacaatttccagtgcggacccgaagcacagaaagcctttgaagatttcaagaaacttctcacactccaccagttttggcctcgccacacccacaagagccactattactatacatatcggccacctctcaggttgtgagtgcggtcctggttgtcgagcgtgaagaagaaggccatgttcagaaggtccagcgaccgatctacttcgttagcgaggttttggccgactccaagacgagatatccttaggttcagaagctgttgtatggtgttctaatcaccgtcaagaaattatcccactatttccaaggccactcggtcacggtggttacatcgtttcctctcggtgatatactccgtagtcgcgaagcaaacgggcgaatcgcaaagtgggccttagaattgatgtctttggatatatctttcaagacgcgaacttcgattaaatcccaagcttttagccgactttgtcgccgagtggaccgagtgccaagaagacacgcccgaggaaaagatggagtattggactatgcactttgacgggtcaaagagactttcaggcactggggctagagttgttttaatttccccaactggagaaagactgagctatgtgctatggatacatttttccgcatctcacaacgtggcagaatacgaggcactccttcacggactacggatcgcgatctctttgggaatcaggcgtctgatagttcgtggagattcacagttagttgtaaatttgaaagagtggtcttgcctcgacggcaatatgatcgcttatcgacaagaggtatgaaagttggaggataagttcgatggactcgaactcactcacgttcttcggcacaataatgaagcagccgacagactagcgaatcttggatccaaacgcgaagcggccccttctgatgtgttcgtcgaacatctttatgagccaacagtgcccaagagagaaacgggtgaagacgcggacattgaagacatacctatggtcgaagccgactagagagagcctctcatacgatttctgacctgccaagaactccgtcaagataaagacgaagccgagcagatttccaggcgtagcaggctttatattattcatgagaccgagctgtacaggaaaagtccatcaggaattctgcaacgctgtgtatccttagaagaagggagacaattgctgaaggacatacattctggtatttgtggcaaccatgctgctgcacgcaccatagtcagcaaggcgtaccggcaaggttttttctggcccaccgctgtgtccgatgccgacaagattgtgcggacatatgagggttgtcaatttttcgccacacaaactcatctgctagcccaagagttgcaaaccatcctgctgtcctggccatttgcggtttgggggcttgacatggtcggcccgttcaaaaaggcagtcggcggttacacacatctctttgtggctatcaacaaattctccaagtagattgaagctaaaccggtcatcacgatcacggtagacaaagctagagattttttcatcaacattgtacatcggttcggggtacctcatcggattattactgataatggcactcaattcactggcggagtatttaaagatttttgtgaagacttcggcatcaaaatttgctatgcctccgtagcgcatcctatgagcaatgggcaagttgaacgagccaatggcatgcgactccaaggaataaaagcacgagtttttgatcgcctgaatccttatgccggcaaatgggtggaacagctgccatctgtactttggtccttgcgcaccacccccagtcgggctacgggtcagtcaccattcttcctggtttatggagcagaagcaatgttgcctagtgaagtagaatttgaatcattgcgttttcgcaacttttgcgaagagcgctacggagacgaccgagtggatgacctacaccgactggaagaggcccgtgaagcagccttaattcagtcggcccgatacctgcaaggtttgcatcattatcataatcgtaacgtccgatcgcgagctttcttagtcggcgacctggttttgaggaaaattcaaactacacgggatcggcataagctatcccctttatgggaagggccatttatcatctctgaagtcactcggccaggttcctatcgactcaagcgtgaagacggtacacctatcgacaactcttggaatatcgaacatcttcgtcgtttttatgcttaagtttgcttctgtgtttccctgtcttgactgacaacatcaagcttccccttgaagttatcagtcgggggctattataataataatggagtgctgggatttggtcatcgccaacgccagactttgatgttcttgaaatatgtatccggagcaactctcagcttgtcgaagatttcggaagcatcaagtgtactcgggccattgttattgaagaacatcgcttggacgtcctttaacgctgagtccctctgacttgccagctctactttatcgttctccagagtctgaattcgtttctccaattgagatatcttggctgcttgcactgcatttgactccaattaattgaagttacaaagatgacaacataagttagtcagacagattttgtgtataccttttgacgagccacttagttcgaagttagactcctggagctaggcaattcgatctcttagatcgtgctcggttttcttagctagttctttggcctcgtgcagttgatctctgacagcttccagggttccaagatgaggaactagtttctctagggttgcggtctttgcctcgttcctaaggtgaatcctctgcaaaatggttttatcggcgctcaagctagatggcaaacaagagggctgaggtcaggcgtcaaggaacttatgtttacaatacgagttgcttggctgagtgcctttttcagtaggcaaacctcttcgtcttctttttgcaggtttattacaattccttgaggttgcaagtcatcatcccaccacttgaccagaataggagggcgcgagtcttcagccgcgcgtatccggggaacttcctcttcctcaccaatcattggtcgtgatgtatccatggataaaggtcaaacgatcaattaaagttggctggattaatacggtttcaggcaaggtgtttacccgtgatgatttctagacgaggacgagtgggctcagatgcctttgaaggagatccagacctccggtcattgctagcatcatgaccgcgagggctatctgcttgggcttcaacttctggaatctcttggcttggccctgggtccgattggtttccagtcgagggctctcgactcactccggcttcagctttggccgactggcttctagtcggggtttgatcgccggattctacattgtcggttgccgactgattgtcactcggatgatcctcagcagtcggcccggcttctttggaagagcttgttttcatattagccggatcagagtcctttccggaaggatctatatcagatggtttcctgcatgtttttgttatcagtattacttccatgctgggtgcgcattaatacaaggaatatcgttatatgagttgtacctggaagacttcctgatcttcggcgcaggacaactagatgttttcttctttggaatagcttgttttggcaattttctggttgtttctctatctccaggcttttcaacgtcgtcgacttcgtcgtcactcagcactaatttcctcagcccggaatctgactggccggctggattagaggtgttgggctgggtttcaggccgtatctttggtcccccgctcccctgaccagtgtgacggcgaggtgatcggcgctgagcgattgggggatctgacttcatcagagcaaattcctagatataatatctcccactgtcaattgatttaacaaaaagacaagattatatttcgaggaagattgaagtgtttgagcacataccggtggaggggggttgaatgcattgaatggcacaactggcagcagatgtgaatagctgacgacaatcgcatttgagaagatcttgtacattctttccttcatgaccttgaagtcaaagggagtctggatcttcacgatttggatcatgtttgccgtcaaactcaaaagtcgtgcgggatctctctttgattggagctaatcgacttttgatgaagtgccgagtgatttgttctccctgcaagccttgttccttcagctttagcatacgttccatcaactccaccgcctgagcagcttcatctcccataggcaatgaattccatgtgtcctggtaaactggaggaagacaggagtactcggggagtgcaggttcaggattttaaacgtaaaaccagtttgcgtgactgcctttgtttgaagtcttgaaggcaaggagaaatacttttggcttagtgttcctctgagttagaagccagcgcccccaaccacgcatggtttgctcttgttcggttggggcttgaggaagaagattcggcggaataaggcgaaatgaggcctaatgcccagaaaagcttcgcaggcatgaatgaaattggcaatgtgcactatggagttttgattcagatgatgcagactaattccatagaagctcagaattcctcagaagaatcttgaagttgggagagaaaatccaccataaaagaagtgagaaaataccacgacctcgtgtgtatccggggttgggaatgcttcgccgaatgccggtcgccacccgatgatctctttcgccggaagaacgccgtgcgccaccatttccttcagattctcctccgtcacatcggagggcgcccactgactctcgaaactttctctctcttccgcgatggatgcaagtcgaatggtatgattcggtctgagaaatagctagagaggaatgggaaattggtgcggtgggcgcgtggagaagtttcgtggatttttgagattagattggggcggattgatgaacccttgcttcgtcggcgcggttttgaactgtagcaagaagtggggaaatggcgagagtttcaacggggaagacgaagcgtcgcttggacttcggtgttttgttagggtatcgggagtgctaatgggcttgggcctatacagtacttca

SEQ ID NO: 23658 - DNA, 5764 bp, Oryza sativa
tcttgtttcgacagttttgttttacttcgttagggtagatagttttggggaaagataacccgccctgtcaccaatataacaaataatatgtaggattttaaatcttagcaggttgaacgtttctgaaagtaccggtgattgtacacatgaaatagtaatcttagagattggctgaaaatgttaaatgcacaagtgttttttacataaagatgtgttatatgtttaccctaaaagaatggtgcatgatcgaaaaatcagctatatatatattatttatttctttgtgtaaacccaaacatgtgttactcttttaaaatttatactttgtataactacagtataaaaacctgacacatggaacaattgaaatccaacaaacatatttagtgtttaaacaatactgttggttgggagtattacccacatttagtcattcattaaatctgaatattaaatctcatatcgtctagcaaaaatacttctcatcctacaattaaataacggtaatcaaacaatttgcattcatagaatatatctggtggatatgatcatatctggccaatatgtaacacggaagcattaattggaatggatagttctttacctagtaatgacatctggcaggattggagtggtttgcaaagttacattcctttttaaaaaaacatattcttgtttatataacatgataatttgtgtgcagtcaaagtaatatgtacaaaaccaaattattttatgatagctacctttagtacaaatggcattcagaaaacatatttgacttttatttttcaaatataatcactatcagaacacagtatgttgcatatcaataatatatctcttgctaattcattaatctcacttataagttctaacattggaatgcgagaacataaaaaattaatttggatcaaaacctgtatactgtgaatccttgcacctttgggtggctagctagggtcatacatgtgatgcagtattgggatctattgagtttttccctcccatatccctttccaaccaaagaaaaaagaaaaaaaatgcatgttggttatttgtaaaatatacatatatatactaaatttattttgttgttcatatgttaaatgaaattatttttttgctcacattgcagtactaccgccacaaggattacaatcataaatttcgctcaaagcctgaagttcaatattttctagatactggaaaggttataattccgtaaagttccaggcattctacagaaggtgccatgctacaacagtgtttcgaacattgtattctgcataattttccccttccaaatttgatactgattcccacacgttctttttgtacagtgatcagttgatgcacgtgttcctagcaggggcaagatttcatcaaactgtactgcagcttggaatatttaactccagaggaatacggaataccttttcattatatatgggaatcatatgcacgtgttcgcggatacgaattatgtttttagatgaattatatatgggaagacctgcacaatgattaaaatatttgattaaactgaatcagtacaactgacagaaacaataaatagaaaaaatatataacaccattcatcattaatatatatgtatagatatatctaattttatagacaatggaatatcattgcggcattttctcatatatataatggaatatatatccatacaagacattttagattattttcatcttgctagcttgtatatattgtcaaacatttcttaactgctatagagacattatattactcactgaatcgaactgctatgacatgtgcacacaggtcacgggtgccacgcccatacaacgtactccctccatcccctaaaaaacaaatttagaactagatgtaacatattctagtacgatgaatctggacatatatatgtccagattcacagtactaggatatgtcacatccaatactaggttgattttttatgggacggagggagtaaatgctcttctcgtctactacatgacgctcgggtgtacgaggtgtacctgcttgacgtacggaaggccaagctggatcagcggccggtcagattcgaccactgccactactactactagtacgccaccaccaaggagtggcaggtggtgcagccgcgacaccaacgccaccaggtacatgctggtgacgtagtctacaccctgtcctcgcactacccgcagcctggtggcgctcgacacgaatatgatggaacgatccctcgtgatccctagttgagctaccgaggttggtatctgcgggtgtcagaggtgtacaacaaagaacggagcttcaaagccatggagatggccggcgtgatcgggctgttcgccatagacgacagacgcctcatcctccgtgtctagctccggcacagctctggaaggtgacgctatgggagctggcaaggcaaatccctccctttgcctcccgccactgcccccgccgctccttccctccatgagctgccactgctccctccctccacgagttagcgaagccacaagagagagagaggcgggatacaagagatgaatggatagagttaatatgaacggataggattagatgaggatagggttgcttcgaggctattctggtcattatgaaaagttattatatttcttttctttttgaaaagtaaggtcaaaaaaagcaaactaaaaaagtaggataaattagtagttaggcttcgaaacagagtcaattaaggaattgtcccatatatctggtatctttccataaaaggcggcaagatacaactcaaaacaacacatgcatgcttttcatatcatgtttgaattgcatactttattaacagtgcaaaccctcctgtaccaccaactgttagtaaaaaaaaaatatcacacaagtacttgtaccagtactagtactacttcactatgccacccactccactcacttttcttcaccctggagtcgaattttcccccaatcttttccccaagaaacagagaagccgcagcagcgatgagctcatggtggtcttggctcatcctcttctcctccttgggcaacagagggggcagcaatgccgacgctttctccggatccagcacctcgtcctccccctccccccccatcccttttccccaacaagcagtagcaggggcgcctcgctggcgaagcactcgcacgatgaagcctcgggacgacgggccgaccgatgcctaagccaaaccctctcaatcgcagccgcagcctgtgccccacaagaatcgtccttcaccccgaaaggccacgcccaaggcatccaaggcaaaggcgcagctgcacctcggcgacggtgagccaaagaaaagctagccccgaccccgtcttagaagcacaacaacaagaggaagcgggtggcgagatttgagcgctcgtggtccagggccgatgagctcaggattctggaggacatgtccaaccacgccaaaacccatcgcggcgctctgccggataccagcgatctctttgccgcccttgccaacagcctcgacagaggagatgccgaccaggccaagctcgctaacaaagtccacatgttcaagagatgatatggcactgcacgcctgcagcaatgctgctcgactgaccatgatgatatgcgtcgattgttagatcatggaacagcaccagctgcatctgatcggcacgaaggtggttgcgcagcgtgctgcacttgagcctggaggcagcgtcgccgccgggggtggcagtggagcttctccaacgtgcatcaagttatttctctacaccatgccatggcgatgggagccaccttttcttcctccttcggaacacgagggaaatgcagtttaactagcaatcttatataatccaccatctcccagcattgcaacaatcgcatgaagaaataatctagttttctttttgaatgtactatatagccattggaagggtgtttttactatacctcccactaacgggtgtactagtgtagtaagaataaataccaccgttgattttggtattaaggtggaagaataattaagtaattatacttctatgataggctgatgcttgccagctgcctagcctaaaagcgttcagcccttagctcacgaagcagaaggatggtcactgtaacgctcctggccagcgtccgccatcgatcgttgcacttcccttcttcgcgtaaacacggggatgggcacacggcggctcccccctcccaactgcgctgccaacaactggcacccgtccttgcgtagagtgactattataaaaccagccccgcaatcaacatcggtagttaaacatggaagaaacattataggagatccaaacacgatgacatcaccgaggcacgatatttgataacggagttcagccgaggcctacatctccggggtactgattacaggcgctcctccaccatccagcatattacagtgtatcagagttacaatgagacgccgccgccgtcactagtcgagagagagagagacgagatacgagagatgaatggatagggttaatctgaatggataggattagatgtggatagggtttcttggaggatattctgatcattaggaaaagttattatattttatttcattttttaaagcagggtcaaataagcaaactaaaaaagtagggtcagattagtagttagattaggcttcgaaccagatcaaataagaaattctcccatatatatggtatctttccacaaagggcggcaagatacagaacatgcatgtttttcaaatcatgtttgaatttcatacttttattaatagtgcaaactttactgtgccaccaactctcacgtgggagctcgagagcacggtaaaaaaaatcagacaagtactactactatttcactgtcccacccactccactcacttttcttcaccctaaagacgaatttcccccaacattttccacaagaagctgagaagccccagcggtaatgagctcatggtggtcttggcacagcgtcttctcctccttgggcaacggaggaggcagcaatgccgacgcttcctccggatccggcacctcctcctcccctcccgtccctcaagctcaacaagcagtagcaggggcacctcgccgttgaagcgctcaccgaagaagccttgggagggctagccggccgaagccaaatcccaagccaaaccattgcaattgcagccacagcccacgccccgcaagaatcatccttcaccccaaaaggccacgcccaaggcgtccaacgcgaacgagaagctgtagcttggtgacggtgagcctaagaagaagccagcctcaaccccatctcagaagcgcaataacaagagaaagtgggtggcggcattcgagcgttcgtggtgttatgaaaatagatgcacaacggagacacgaatttttacgtggaaaacccttgcgggaaaaaaccacgggcgccgaccggcaatgatcactatagaggagatgattacaaacgtaggggaatcacaatgggaacgtcaacccttcccgtacggcttacaagagtatatataggggataatagaaagacacctaataggactcctactaggaaactaatccgaatatattgtgggcccaaaattcggatcacatatttaacaatctctaccttgagacgaatttcctcttgtagcataaaaacatcaatcaccaaaaatacctcatgtaggtaaaatcaccgcgcgccaaatagtctctaggactatactgtaacacccaccaagcttg

SEQ ID NO: 23659 - DNA, 1815 bp, Oryza sativa
tctgaaaatccattgaacagctttccaatgctctttgccaggattagccatgtatctactgacaacacttaatgcattcgataagtcaggacgagaacataccatggcatacataaatgaaccaactgcacttgaataaggaactctagacatgtactcaatatcataatctgactgtggacataaatctgaagataatctgaaatgtgcagctaaaggagtactcactggttttgcatcatgcatattgaaacgacgaagaactttttcaatataacctttctaactaagatataacttgccagaacgtctttctctagtaatttccataccgagaattttcttcgctgcacccaaatccttcatctcaaattcactactcaattgtgccttcaactttgctatctctaatttgtcttttgcagcaatcaacatatcatcgacataaagaagcaaatatatagctgaaccatcaacaactttaagataaacacagctatcataattggatcttctaaacttctgagaaagcatgaaagagtcaaatctcttataccactgtctaggtgactgcttcaacccataaagagatttcttcaacctacagactaggttctcttttctaggaacaacaaaaccttcaagttgctccatataaatgtcctcttctaactccccatgtaaaaatgcagtcttaacatccatttgctctagttcataatcatgcattgcaacaatactgagtaaagtgcaaattgaactatgcttcacaacaggggaaaagacatcattgaaatcaatacctggaatctggctataacatttagcaactaaccttgctttgtatcttgcctcatcacttggagacataccttccttttttctcctttggcaacttcaccaattcccaagtatgattcttttcaagcgactccatctcatcatgcatagcagttatccatctattgcaatcatcagaaacaatagccttagaatttcttctgccacactcaaagcataagcaactatgttcgcttcttcaatatatcttcgaggaggtttcatatttcttttgggcttatcttttgcaatagaacgttttgaagactgatgaacaatagaagaatctgaatcttcaataacaggtgcatcttggttaatagcaacaacttcgttttctggtgcatgtcctgaactgatcaaatgctccacctgcacacttgctttctcctgactctcaacaggaacattagtagaaggtttgtcatgtaacataactgattcatggaagacaacatttatactaatcacaacctttttagtttcaggacaccataacttatagcctttcacaccagacggataaccaagaaaaatgcacttaatagctctaggctccaatttaccattatcaatatgagcataagcagtacaaccaaatactcttaagtctgaataatttgctggggaaccagaccatacctcaattggagtcttcttatcaatggcataactgcgtgatcgattgataagataacaagcagtgaaaacggcttccgcccaaaactgtttaggcaaacctgcattagacaacatacaacgggcctttgatataattgtcctgttcatacgctcagctatgccgttttgttgaggtgtgtgaggaatggtgtagtgacgcacaatgccttcaaacttgcaatatgatttaaatatcttagaacagaactccatcccattgtcagtacgaaggattttcaccttcctttcagtttgtctttccaccatagttttccactctttaaacacattaaa

SEQ ID NO: 23660 - DNA, 521 bp, Oryza sativa
ccggcggtgaagtcgtagacgcccaacagcggcggcataataggccagccgtgtaggcggaaacaccagtcgacggcagcgaaggtgagccaacggtgaggatgtagacgcccaacagcggcggcataataggccagccgtgtaggcggaggcaccactcggcggcgacggaggcaggccggcggtgaagtcgtagacacccaacagcggcggcataataggccagccgtgtaggcggaggcaccactcggcggcgacggaggcgggccggcggtgaagtcatagacgcccaacagcggcggcataataggccagccgtgtaggcggaggcaccactcggcggcgacggaggcaggccggcggtgaagtcgtacccgcccaacagcggcggcataataggccagccgtgtaggcggaaacaccagtcggcggcgacggaggcaggccggcggtgaagtcgtagacgcccaacagcggcggcataataggccagccgtgtaggcggaaacaccagtcgacgg

SEQ ID NO: 23661 - DNA, 910 bp, Oryza sativa
tggtgtatcatcacccatcaaaacagtaccaccttgaacagcttcgtaggtggcaaaccaatccctattcgggcacatgtgataggtgcatgcagtatcaaaaatccactggtcactagtttgtgcacaaccagcataagcaacaagcaattctgcatcagacttctcatcagtaaaaactgcggctttaccttcctcttctttcttaccttttggtacatttttccggttctcttgtctttgtcctgtagcttccaacactcagatatatcatgtccatctctcttgcagtatttgcatgacttatacctgcccctggactttgatctcccacggtagctacttgaacttttatctcttaatttgttgttggtgttcttctcctgttgcctgccccgaacaaccaagccttctgcttgtgaatttgaaccttcagaggtaccatcttcttcatcttttctttggcatgcaaagcatcataaacttctttcaaagttagagtatcacgactataaagaatagtatccctgaagtttgcatatgagctaggcaatgaacacaatagaataaggcctaaatcctcttcatcatactttacctccatagactcaaggtcagcaacaatttccttaaaagcggagagatggtccattacagacccatcatcttgcaacttgtgcaaaaataatttttgcttcaggtgcatcttactggtcagatccttagtcatgcatatctgttccagcttcaaccacagcctagcagctatctcctccttaagcacctcctgcagaatattgttagatagatgaagatgaatatatgacatagccttacgatcccttttcttctcatcggtggaccaatcttgagtcctcttggcaaatccagaaagcgcatcatcgaggtc

SEQ ID NO: 23662 - DNA, 5551 bp, Oryza sativa
cgtgtgcacgtagcgaagtatgtaaatctcctgggtacacaagcttggtgcgtatagaaaattcgcctctaggaaaaatcagcctgtactggacagacctctcggctgatactcctatacttttcctcggtgcgcgtgcgctgcagtagtactcctctgcttccgcttttctcctgcttcgttggccggctgctgctgcttcgattgcttgcgcggcttttctcctctgcgcgaggacaggaaacactgagtcggactgggaatcgacgagacgacgggagccgccgccgcagccgataagatcgatttcttcgatcgggaaacaatcgccggtggtcgggaatagtagatcgatctccaatgctctgataccacttgttatgaaaatagatgcacaacggagacacgaatttttacgtggaaaacccttgcgggaaaaaaccacgggcgccgaccggcaatgatcactatagaggagatgattacaaacataggggaatcacaacgagaacgtcaccccttcccgtacggcttacaagagtatatataggggataatagaaagacacctaataggactcctactaggaaactaatccgaatatattgtgggcccaaaattcggatcacatatttaacacgtggtccagggccaacgagctcaagattttgagggccatggccagccaccctaacacccatcacagcactctgccggataactacgatctttttgccgcccttgccagcaacctcgacagaagagacgccgacctgcctaatctcgcagacaaagtccacaagctcaagagaggtatgacaatgcacgcctacaacaacgctgccctactgacgacgatacgcgtcgattgttggatcatggagcagcacctggtggacctgatcgacacgaccgtggtatcacggcgtgctgcacctgagcctggaggcagcatcgcccttgacggtggcggtggggaggcacaatgtctccttgtttttgtcgctagagctggaatccatgagcttttccaacgtgcatcaagttatttctctaaacccggcgatggcgatgatagccacattttcttcctccttcagatcacgaggaaaatgtagtttaactagcaatctcatataatacaccgtctcccagtgttgcaacaatcgcatgaagaaataatctggttttctttttgaatacactatatagccaatggaagggtgttttggttgtacctcccaccgatggatgtactagcatagtaagaataaatcccaccattgattttggtaataaggtggaaggacaattaagtaattatatttgtatgataggccgatgcttgccagccacctagcccaatagcgttcagtcctaagctcacgaagcagaaggatggtcgtcgtatcgctcctgggcattgtccgccatcgacggtcacatttcccttcttcacgtgaacatggggacgggcacatggtgactccgcccttctcaacagcgctgccaacaatcgacgccaatcattgtccgaagcggctactataaaaccagccccgaaatcaacatcgatagttgagcgcggaagaaacgtcataggagatccaaacacgatgacatcactgacgcacgatatttgataccggagttcagtcgagggctacatctccagggcactaattacaggcgctcctccccgatctagcattttcagcgaattagagttacaacgagctggcgccgccgccgccacttgccgagagagagagacgggatatgagagatgaatggatagggttaatctgaatatatagaattagatgtggatagggttgcttcgtgggtattctcatcattataaaaagttattatatttcatttctttttgaaaagcagagtcaaataagcaaacaaaaaaaggtcagattagtagttaggttaggcttcgaaacatagtcatataaagaattatcccatatatatagtatgtttccataaacggaggcaagatacaactcaaaacaaaacatgcatgtttttcagatcatgtttgaattgcatactttattaatagtgcaaactctactgtgctaccaactctcatgtgggagctgcagtgcacggtaaaaaaaaatcacacaagtacttgtactactactacttcactgtgccacccactccactcatttttcttcaccatgaagatgaattttcccccaatcatttcaccaagaagcggagaaaccgcagcagcaatgagctcatggtggtcatggcgccgcctcttctcctcgttggataatggatggggcagcaaagccgacgcttcctccggatccggcacctcctcctcccctcccgtccctcaagctcaacaagcagcagcaggggcgcgccaccaggaaagcgctcgcacgaagaagcctcgggagggcgggccggccaaagcccaagcccaagccgaaccctcgcaatcgcagctatagcccgcgcccagcaagaatcgtccttcaccgcgaaaggccatgccaaaggtatccaaggcgaaggtgcaactgcagctcggcgacggcgagccaaagaaaaagccagccccgacctcgtctcagaagcgcaacaacaagaaaaagcgggtggcggcattcgagcgttgtggtccaaggccgacgagcttaggattttggaggccatggctaaccacgtgaacacccatcgtagcactctgtgggatacatgccgtctgtttcccgcccttgccagcagcctcgacaaaagagacgctgacctgcccgatctcgccgacaaagtccacaagcggaagagatggtatggcaatgcatgcttgcagcaacgcagccggactgacgacgacaatacgcgttgattgttggatcatggagcagcaccaggtggacctgatcggcacgaacgtggtagcgcggtgtgcttcacctaagcctagagactgcgtcgcccccaggggtggcgctggggaggcagaatgtctccttgtttttgtccctggagctagaatccatgagcttctccaatgtgcttcaagttattcctctacaccctgccatggcgatggcagccaccttttcttcctccttcagatcacgaggaaaatgcagtttaactagcaatctcaaataatccaccgtctcccagcattgtaacaatcgcatgaagaaataatctggttttctttttgaatgtactatatagccattggaagggtgtttttactgtacctcccacaggtgggtgtactagtgtagtaagaataaatcccactgttgattttggtggccattttagtcatttgtttaattaatcccgtctcctcattcgtcgccgccctcgcattttagcatcgtcgtctggctcttgctgtgcgagcgacggcacctcggtgcctctttcgtcggcggcgagaagagctgaaagagagaggaggagacgggcaagcgtcggcctccgtgagggcgtcctgaaggtgaaggggcgagccaacctcaccgtcgacgccaaggacaagctcctcctccagctggagaggcgagacgccgagagggcaaagacctcctcggccgcaccacccacaagacatgtcatcgctgctccggcagtccggccaaggtgaagagaaatggggagagaggaagagagaaacgagagcgggaggaggaagaaggatggagatagagaggataatatgtgggctccacactttttttttgtgtgaatgactaatgggttgcacacattttttttaattataatgccacgtaagcgtcacgtcagcgaaaccactctccaaaaccgttgaaagagtcaaattatactggtttcaataatcaggggtcgtgatatatggtattatggttcagggatacgaatcagatttaggcactaattaaaggagtgaaagtgaacttattgttggtagcgctcgtagagattctctaataaaccaaacacaaagagcccactgtccataatctccagcccagtaacagcccaatggaacaaattgcatatatccacggaagactcaacaacagccacaggcggacacagtcctcactcctcagcggctcagcgcagaggtctcgttcgtgcggtgtcccctgctgccgcccatgccgctgcggcgcggcggagccctccctctcagcgccccgcgggcggcagccggtggcctccgcggaggcggcggccgtggtgccgcgcttctccacccgacctgcttgtcgccgccgggaacaactggccgagccttgggcctcaggttagctctgctcattgttgtcttctatccgttacttgaattttgttataaaaaaaaaaaaagaaacaccaattggcaattgggttccaattagactaagttcagtactaggggcatcagaaattgggatacttggggttaagactaattcagaactaaattgtcggagctattgggaggctgggcgtcaatttttactgtcacttttgaatatgtaccttgtaccagtttctttcgagcccgtatggattgggggaattttgggggagcagcagttttaccttctccaattcatttgcgcacatatttctagttgggggtgtgtgctgcgacagttccgtggcacttttagtatatctggttgtttatgtttatgatgagttcgtgctacctgaaccatgtccatagtcgggatgttcatggatttagcacattttttgctgactgttagtccgattatattgtctgttcagattatattgaagttaagaagcatataggttaatgtaaagctaggcactgggctgatgtaagttgggggtttgactgtttaaaatgaatataatatgggctcacccaaacaaaaaggatggaataaagggaattgcgttgcactgcatgttgttaggaaatgcacgcctgcaggttgtgctcttgaaggtgacatggatgcagactttcgacaaagtattgcatttaccttcttcaaacagtattgtgattatgccactaggttccatacaaaatataagaattcggcacgtaatcgttatataatatcaatttgtggtatacattagatcttattactgatagtacccatttttagtttatatggtatctaccgcgttgtatgcttataccattttgaataaacaaaataaaacaatagaactaatccatctgtcaacaaatatatgacactttggacatgataagatcgctagtgtgtaaatttgaccgtcaaaataactgtaatacattgtgttaccaaaacattttttagtcacttaattgtattattttgacatgagaaatgtaagatagttctctatgttgtagtggtcaaagttcagaatgtttccccacaaaataaaagttcggaatgtttaactagtcaaattcgaagtttcatattctctgggggatgggagtagacgaattgctagcttcaaaactgaagccttgtacaaattgggaaaaaaaacatgattggcgctgcgcaatcaacttcttaaaatctctaccctgtag

SEQ ID NO: 23663 - DNA, 1216 bp, Oryza sativa
atttgccgggggttgctcgacggcggctgattgcggcggcggcaaccggcggcgggagaaggggaaaacagcgacgaggtcatggggggctaattcctggcggcgagagcatctatgcggctacgggaatccgatgctagcgtcggattgggcggagctacgccgtgcgaggccggcgacgagcgggtgctacggagcacgggcggcgacggcggcgagcacacggcgagcgacggcaacggtcggggcggcaccggctaactacggggaggctactcgagctactaccgaaagctaagggggggagatggagcgaggaggaagaacggagggaggcactaccgtgcgggacggggcgcagtgacgagaggccgacggcgcgggagtaatctctccggcctcgggccggggaagaggaaggagagggcgcgcccggagtccccttccgcgtcctcgaacgcaccggctctccgacacgcgcaacgacgaacggcgacggcgaacagagctcgggggcggcggcaatggcgcggaggcgatgggaggagaagagagggagggcgcccggggcttttaagggcggcaacgtcggtttgggaaccgactttgggcggtcaaggcgcgagctggcgctcggcgctcgcgtccaaatcggcggcagggcggagggaggaggatgacgccggcggtgacggaaaaaggggaaaagagggagagaaaagggggcttgcctccttgccgcttttggaaaaggaggaggggagcgggggcgtcgcggcagagggaggagggaggctctgcctccgtcccttggaggctagcgcgggagtggcggggccgaagcggtgacgacggcgatgacggcggggcggtgtggagcggagcggcgacacgggcgacaggcgcgggcaggcgcggcagagggtgacggcggcggcgaccaggcagtcggccaccacggcacgcgcacgcgggttgcaacgggaggcgcggcggtttgagtggcgcggctcgggcacgcgcgctggctgcggggccgagcggctgcgcgcctgcaggcgcggcagggcaacggggccgggcggcgcaaacggcgcaggcgcgacacgggcgacgaccacgcgggcgcgcgcgcgaacaacgacgcgcggggccgattccgcgggcggggagctcgccagggatggaggcggggagaaggagatcgaggggaagg

SEQ ID NO: 23664 - DNA, 7521 bp, Oryza sativa
ggcggccgaactcccaactagtggatccccacaaatttcgcaattagggtttttaggagataattttcccgctaggcgccacgacggaacgggcgctacagaccaacccccctaacaagaatctcgaccccgagattcagcacctaagggagcagctccgggaactcggcgcggagaagatcttctcgctcccaggttgcctcatcttcagaatgattgctctattggactttgtagaacttgatggtcttctttcgagtctgacgttctgcctcttcaagaaccttggtcggtctttccttgtaagtcagattcttttccagctcgatattacccagagggacttgctcttctggaactcgaagacatttcttcaactgagacacgtgaaacacgttgtgcacatctgcgagaccttcaggtaactcaagctgataagccacttcgccacgtctggcggttatgaggtaggggccgatgtagcggggtgctaacttgccggacatcccaaacctcctcataccacggaggggtgatacccgcaggtatacatgatctcctttttcgaactcaaggtcacgcctccgattgtcagcgtaattcttctgacggttttgcgctgtctttaaacgttctcggattagcttaacttgttcttctgctgccttgagtatgtcaagaccgaataccagcgcttcgcccacctcattccagcacaagggagtacggcactttcttccgaaccattgcctcgttcggcgacatctgtatgctagcctgataactgttgttgtatgagaactccgcatacggcaaacaacgatcccaggtgccttcgaaatccaaggcacacgcacgtagcatgtcttctaggatttggtttaccctttctgtctgaccatcagtctgcggatggtagcccgtacttaaatttagatcggttccgagggcttcatgcaactgcttccagaaccttgaggtgaactgagtgcctcgatctgacacgatcttcttgggacagccaaatctacatacgacatgggtcatgtagagttctgctagtttctttccatcaaaggtggttttcactggcacgaaatgagctgatttcgtgagtcggtccacgattacccaaatggagtcgtacccgctaggggttcttggcaaaccggtgatgaaatccatcccgatctcttcccatttccactcgggaatcggtaggggctgtagcagaccagctggcctctggtgctctgccttgactctttggcaaatgtcacacagggctacgtattctgcgacatctcgcttcattctagcccaccagaaatatgccttgatatcttggtacatcttcgtacttcttggatgaatggagtaggcggactcatgagcttcctttaggatgagatctcttaactccttcttggctggtacacagatgtgtggaccgcaccaaactgtgccttggtcgtctatggagaaattggtgtctttcttttcctgtattctttttattaactcttttatcccttcgtcatctttctgagcctcccggatttgcgattctagggtaggctgtactgtcaagctggcagggacacctgactgtaccacggtcagccttaacttctccaattctctgcacaggcgatcttggtcaggccgtatttgagctacattgcaataggccttgcgacttagcgcatcagcgaccacgttagctttaccgggatgataatgaattcccagatcgtaatccttgattagttccaaccatcttctctgcctcatgtttaactcggtctgagtgaagatgtatttaagacttttgtgatcggtgtgtacttcacatctctttccgattaaatagtgcctccagattttaagagcatgaatcacggctgccaactcgagatcatgggtggggtaattgacttcatgaggcctgagctgtctggacgcataggccaccacctttcgttcttgcattaggacacatcctaagccttgtcttgatgcatcacagaagatctcaaaatctttttggatatctggcaaggtgagaactggggcagtggtcaacttttcttcatttcttgaaaactgtcttcacaggctgcagaccattgaaatttcctttccttctttaatagctcggtcataggtctggctagcttagagaatccttcaatgaatcttcgataatatccagctaagccaaggaagctgcgaatctctgacacattcttgggcgggttccaagcaagtacagcttcaaccttgctgggatctacttcgacaccgttggaggagatcacgtgtccaagaaatgctactcggtctaaccagaattcgcatttcgagaatttagcgaatagttgatgatctctgagcttttccattatcagcctcaggtgttcagcatgttcttcctcattcttggagtatatcaggatgtcatcgatgaacaccacgacaaactggtccagctattccataaagattttgttcattaagttcatgaagaacgctggagcattagtgagtccgaaggacattactgtgaactcgtatagaccataacgcgttgagaaagcggtcttcggaatatcttcaaatctgattttcaattggtggtaacctgatcttaagtcaattttttagaaaactcttgctcctttaagttgatcaaataaatcgtcaatccgtggcaacgggtacttgttctttatagttacttcattcagggctctatagtcgattaccattctctcagagccatcctttttcttaaccagaagcactggggctccccaaggggatgagctaggtcgcacataacctttaccctccaattcttcgatttgtcttttaacttctgctaactcattagctgccattcggtagggtctttttgcaattggtgcagtgcctggcgccagttctatggcgaacacaatctctcggtctggtggcatacttgttaattcttctgggaatacgtcgggatattcacagactatgggcaccgactccaaggaggtgacttgtaaacaggttaggatagaccgacttgcggtaggggtgttagaggtaaagcggacttgctttcctccaggtccttgcaaggtgatggacttttcagcacaatctatctgtcctttgtgcttagccaaccaatccatccctagaatgatgtccaagctttgcgagtctaggactatcggtttggctaggaagtcaacttcctcaattctaaggttaactcccgggcatacttgagttgcccttatattcctcccaggggaatgtactatcattggtacacgtaaattttgggttttccaaccatttcttttcacaaaagcttgtgatatgaaagaatgggaagctcctgaatcaaacagaactattgcgggtacggagttgacagggaacatacctatcacaacgtctggagcatcctaagcggtctcagcttgaatgtggttcacccggcctcgaccaaagttgttggacgcacgagaaccttgtccacttgcctgagagctaggacgagactgagctgccgctggagtaggagttctggcagtgctgccattagcatgccctaagctggtgttggtaggattctgagggcactgtctggcatagtgacccatctggttgcaccggaaacactgaactgctgacggtccctgtggtgacttgaaagaggtaacactgtttggcgcagtattgccactaggggcacgctgctgtggctgaggtgccggacggttcatttgaggacgaggggcgtagcctggctggtggttagcctgagtgaccgactggtggtattgcatgggttgaccgtagcgagggcgaggtacgcctcgggaagaatttccctgatggttagacttgcgtttcttgtattcttcggtagcctcttttctggcatcctcaagtagaagcgccttgttgatcatatgttgaaaagtggggaaatcatgagcaagcaactggagtctcattccaactgcgattcctttcaagaatttcctgatcttcttcttgtctgtgtccacttcctcaggggcgtaccgagccaacttgttgaacatacttaggtactcattgacactgctgttgccttgcttaagtctgttgaattcttctttcttcatgtcaatagtgctttcaggcacatgagctgcacggaaagccgtagcaaactcatcccaagcaatgttagtgggttcagggtgtgcattgcagtaattctcccaccaatctgcagcaggtcctcttagctggtgagaggcgtagagcgtcttctcgaccggagtacactgcactaagttgagttttctatcaacatctttcagccaatcgtcagcctcaacgggctcgatggtctgagagaactctggcggacgtgacctcagaaaatctgtcagcttggatctattgttgctcatgtgagggtggccatttccatgcgcattatgctgaaaaccggctacggctgcggctaatccttgcaagatttgtgtctgaactgccattaagtgttgcatgttgttttccacatgaggtgggaaagggaggcgttcttctccagaattgtgactggcagtgcggtgagagcggtgagactgttccatctctgcattacgggaaactgtgcgatgcgagcggctgctgcggcggggttgctcaacttctgcgttgcgggaagcagtacggtgcgaacggttgctgtggtgagactgctcattagctgactcatgattttcttctggctcaactctaccatcttcaaaaccaaagcgggctggtgcacgagctgcacggcgggggcggctagccatctaaactcccagaagagggcggggtaatagtcagatagcacttaggagggcaaggagcaaagtaaatagcaactcagatagcacacactaggcataaactggatttttcaaatcatagaaacacctaatacaacgggtggggacaaatcacaaaactaccccgagcttgactgcgcgcgccccccctaagaaaaccagactaccaaacaacacccacaacaaacacacgcacgcactacctcgccacgactccaaaagagttggcggcggaacaaaagggcctaacacacggacggctgctgaagactgcctcctctactcctcgtcggcctggctgcctcctgtggtcggctcctcagtcgaagaaacgtcgatcggctgacgcgaagggaccggcggaacctgtcgagggctggcagcagcacgggccgctggcggtgggggagctgggtagtggaaacggaacacagtggaagaaccaacaacacgcttccgcgcagtgcggataaagcgtgggccacggcgggtggaagcaactggggtgtgtccgggggtgtaggaagggctaactgggtgtgggtagggggagtacactggtgagtacggcgcacgcgagctgggggagcgcgggccactggaaggcgtggaagctgccgaaaggcggagcccccaagacggtggctgtagtcatgggccaggcgacgaagcgcagtccaggagaggtcctggtactcgatctggagagtgggcctggccacggtgaagtggtgtggacgagggccagctccgtgtatacctccacgggggtaaaggtacacagagagctcacagtgagggggaacacggtccacggagtaccccgtgtactcgggacacgagaagccaaggaaacgggcgaggtcacgaagctaagcgacgtggtgaccctcaccaaaaccgtgggagctgaagctggcgctcactgccatctacaattttgaaaaagggagaaaggatcagtaaccatttttagaaacaaactattgaaaataaagaaaacaaaagaaaccttagcttttcgcaagtagtttggaacttagtatccttagggtcgtcctaggcgtcgggtttcgtcctagggccaagcttgtgctctgataccatctcttgtcacgccccgaactagtaccgatcggaactagcccgtgacgctccaaattaacctgttaaccgataccagtcccaggaaatagtgctggtatcacaggaagacagaatatcacagcaacagaggtctctttattatagagtagaggtacagtcatgttgggctgcggacagatcccgagctcacaactgcattacaaaagggaaacggaagccagggcttagaccaaacatcacaggcgcgacttgggaactaggccgaaaccctaaaactcaacgtagccggcttgctcctggaagaactcctcatcagccggatccgcttcatcttcttcagcaactgggggggaattatttatatagagcaagggtgagtacgggagtactcagcaagccaagggaattaagtgtttaatgcaggcttcaagggaaggctgttgtttttgcaattgattttatttgaactcttttctgaaaacaactaagtgagtgcttctcaaacgactcggatgagacagagcgtctcgtccggtcggagtatgtatcagtctttagaattgaaacaaggttggcacccggccaacagcttttcaaacggccacccaagaaggcggcccaagtgcgcgcgcgcgggaggaaaggagagagagggccggtggaccgggctcaccgtgcgcggtcccgggtgggacccgcttgtcagcggctcggctcaccgtgcggagggagcacgcggtgcggcgctagggtggggaagggacgcggtgcatgcgcgcggttcgcggtggacgcggatgcggcgggcccacgcgcagcctcacggctcgcggtggaacgcgcgcacggggagggactgaccggggtcggctcgacccggtctaggctgagctggcgccgacgtggcgcctacgtggctgccacgcgggccggcgggaggtagacgacgacgccggccggaacggacggcggtcgacagcggcgagcgacggagcaaaccatggcgatacaggcaaaagcgagtacaccgggtggttgcacgtgacgaggggagacgagccaacggctcggatttgccgggggttgctcgacggcggcggattgcggcggcggtaaccggcggcgggagaaggggaaaacggcgacgaggtcacggggggctaattcctggcggcgagagcatctacgcggctacgggaatccgatgctagcgtcggattgggcggagctacgccgtgcgaggccgacgacgagcgggtgctacggagcacgggcggcaacggcggcgagcacacggcgagcgacggcaacggtcgggacggcgccggctaactacggggaggctactcgagctactaccgaaagctaagggggggagatggagcgaggaggaagaacggagggaggcactaccgtgcgggacggggcgcagtgacgagaggccgacggcgcgggagtaatctctccggcctcaggccggggaagaggaaggagatggcgcccccggagtcccctt

SEQ ID NO: 23665 - DNA, 55642 bp, Oryza sativa
agggattcggcccatcgaacccgggggaggcaaactagacttttgggagggatttgatttggaaggatttggattcggaaatgaacttgacgatagatcggggattgagatattgagatggcacggacactagacaacaagcaaagaaacaaatttcgcaattagggtttttaggagataattttcccgctaggcgccacgacggaacaggcgctacaatagcttgagctctagaggaagcacagctagggtttcccaggagctcaagatctcttgtaagaactccactataattcctcgcacaggagtaggttgttacgcttcccagcggcccgaacctgtataatccctcatcttccacacatattcgcaagcgatctagtagccagaccctaagcgaagatacgctcttgatcatcgcgccttatcccccggccgaactcacaaagggggggtctcacgacctcccgctagagaggatcactcctcgacacccttgtttcatattataagtcgtttaatttttttactagtcaaactttgttagatttgaccaaatttataaacaaaatttagtaacacttaaaatattaaattagtttcattaaatctaacattgaatatattttgataatatgtatgatttgtgttgaaaatactgctatatttttctataaatttggtcaaagttaaagaagtttgacttgaaaaagtcaaatgatttataatatgaaatcgaggtagtaatatgtttaactacacatgtgttgcatgcaatgatttccataatatgtacaaacttgaaaaggactatttggagtgggaaggattgggccagttgttagtcgggatcagggtttcccaaaccgccggggacggggttaccgcgccccggcggtaagcacggttaccgcgcagttaccgcggtaaccgtgaaaaaccgttcaaaatttatcaaaaattcaaattattttttaaatttatttaaatttaaggaggttaccgcggtatttatattactgtatcccgcggtaagcctggtaaccgtggtaaccacgcggttaccggctgtaaggtgaaccctggctgggatatccttatctcatgaggaggatatgatcctatggcccctggaaaaaaacagaagctattctacaaaatctttgtatgatatgctctcttttcattgtgttagggaccttagagggatgaaaaaaaaaacacaaatattaggaaaatacctaatattaaataaatagaaagggtgagacttcgaacactggccggctagcccaccatcttgtggagctagctaaaagatcccttggcgtttctctaaccttagagggatggacatatggaaatcgccaatttcactgaaagtgaatcactttgtgtgtcttgcttgcttagatagaattcaaactaaaaagaactaggaaggctctgagagatgtgttgtatgtaatgaggtggaaactgttgatcacataatctttgcttatcctattaatctcaatttcaaattattgtcctagtttaccgaccgtttatgataatcgaattttacaaacgaacatattattcacttgtcagcatggacatagtcctcgaataggtgttttcgactaagttggcgagccagcgggaggcagtgaagcacagataaagcaaacatatataagtgctctcttatacagccatgtcatcctaccctgaatcatttttctcaaaaattttgttatctcagctttgtatctcctttaatagacaaattctcaattggtcagtaggggaacgaaagaatgcacggctagcttctttgataattcagtattcaacaagaaattctagaatcatatatattctttttttttcaattcgtgtttatcgagatttatatcatagcgcaatgtcaccagggtaaaccatgagatttaatttcttgaacacatcgatcatttattagcaactatggttggaaatttacaaatagacttcaataattgtgatctccttacgttaggctgctttttttgtttttctagtgttctattcttttagatttacactacgttcatgaaaactactatataataattggctgtaactcttttgagtaaagaccgagatattatattccattatcttaaaaaaaaattagcaactacgagaagagacacacaccaatatatatcacttgtcagcgaggacatagtcctcgaaatagaaggtcttctcgatgaagccggcgagccagcgggaggcggcgaagcacagcaccgccgcagccacgacggcggctctctgaacacccgacgtgaccaccgtccccttgccggcggcgaggaacccgacgacggcgaccgaagccacctgcagggcgacctccagagctctcatccacttcagtgcagcgctgcagctcgtgcactgcatgacatgcgaccagtacctgttcatatctattttagattcaagaaattttacggtccttaaaaagtatctccaggtacaagtacaacctttagattaacactgaattctcctatggaaattctatatgttttaggtcgatcagtgtgactgtgtgaagatcagcagactagcttgttaatttacctctcgtagacctcaactctggtagaagctggtggcagctgattaaccattggggttaaccagccaacctgattgttacagtacttcttgaaccagtttctgaaggcgatgatcaagttgtcagatgatgtgggcacgtagcatgctttatgccagttatcaaggccaaacgcggcgtaattacgctcctgcagaagcatatatattgttcaggtcaagtaagatctgagataatcgattgcatccatgcaaccacatacatagctcgaatcattcagtttgagctgaaaagagaattaaccggtcacctcaatatgaaggacagacgagtctgaatccaggacttggttcgtcttaatatgcaaccaccaacgtggtatcatcttgtcgaaccagccatcaagattatacccgttcgcccagatgaccctgcatcttcccggagacaccgggatgcagaagaacactgtcccctgacctcaggctgcttcttgttgttggtgttgttgttgtcctgatcaacctgcagctagcacaaagtgtaatcttttcaacatgattctttgagcttgtaacagtggctgcaatatggcgaagtgatcagaggcagataccactggcttagcacgaaatggcgagcctatgagagtaaccggcgcgatgaacttgaagtagccccagttctcctctgggttggaatggaaccctgcgatgttgagctcctctatattcatcttgatcgggaggccaccttcctggtcaaattcaactgtggagaggagatcaaatgtttcagaatcagtaacgcagcttagcattgagaaattgagattaacacggcattggctcaattaacagatcgtgtcaacgcagatgatgaggaacatatctgcctatatcttcctccctggggacatgagggaattggcccctgtgcgcgtagggaacgtgagcagggtccatgaaattctccaccaacaactcgtatctgcattggttcgattcggatttcagaatccatggcacatacatacatacatacatacatacatacatacatacatacatacatacatacatacatacatacatatacacacacacacacacacacacacacacatacacacacatacatcgaggcatcgagctgcttgtgaatagcttgtaaataatttctgtacccgtataagaggtctctgacgccggagttgatgacggacgacgggtcgtcgagctcccggatgtacggcggccgcttcctctgcaggatctccttgtactccggctccgatctcgggtagaaccacaggatgttgttctgcaccacgctcgggtacgacgccacgcacgccttgctattcttgtgcacctgccattagttgatccaagaactcggttaattaatcttgagaaaatgttgatgtttttttaaaaaaatttgttttacaggagggcctagggcgggggcctgggggatgaactggcaggagccgtggccatcgaagcaccagccatggtaggcgcactggaggcagcccttgccgtcgacgcgtccctcggagagcggcgcgaggcggtgcgggcacgcgtcgtccaccacgcgccactcgccgccgccgccgtcgaaccacacgacgacgctgatgcccatcaccatcttcccgtgcggcttgcgcttgtcgaggtcgcgcaccggagccaccgggtaccactggtccagccagtcgaaccgctcctcccctgccgccggcgtctccttctcatccacggctcgtgggagcggcgcctcggccgccactgccgacaccggcattgacagccgccgccgccgcgcgtcggtggggctgatccactgccggcgccatggtggtattcttggtgtgctcgggttggttacagtgtcgcggaagggaagcgaaaggcgggtgagcgagagcaggtggagggagacaggagccatggatgattcggagtgtggagtgtttagttaatacacgtgagtaggaaaacagatccctgactctgtgtctgtgcagtgtgcagtcgtgccactgacatgtaggccccatctaagatccatatatcagtgatacaactatacactgtataatttcaggggagtctcatccacggagtagtgactaagcaagacatagaccggaaacataaacgaatgcactgtatattttttcgggaaacggaaatggggacctacagcccatattgctctacacctgctacaatggttaacactggcgtagggtctatatattttttttataatactatttctgaagtagacaaacaacttttgaaagcgtgctaaacatcccaccgtagcaaattttttaaaagttgtgatagcaaaaagcttttcttactaaattcttactaacgctgataagtcatgttatgaatgcatctatattttttataatttctatatatctaaatcaaacggttgagataattgttagtacaaatttagtaagaaaaaattataacagtgctctttaagatactagcgtactactccttttcaaaatagttatctttttattcaaaatttattctaaaatatttgttactacttaatccatttatcacctctcattcaaatttccctctattttacccttaactgccactctaatcccaatcatgtatcatttaatgaaggatagtatgtcttttatttaaataaaaaaattaccaagaataacaagtatttcagatggagggctagttagttctcttaaaataattgtagattttaagccgtgtttgatgtctaactcggaatctggctgaggcaggagctgttgcctcaaccacaatgttattgtaccttacgtaacgtgcttttctttcgtttttagtaaaaaccggccagtgtttcttccgctaacccaagaaaaaaagttaatttaattataattttcatgtcattgagtgcattaaatttacgtatttttttactcatataatggctatgtgcatacgtgtccttaaatttcaagactattaccctataaggcagtagtaaggaaaacaaaaacaaaacactaccaccacacacactcacaacaactacacacgaccaagaaaagagctaacaccacatcggtcacagctagacccaacaaaggagctatagctaaatcgcccaaaatcaatccctaaaaaatgagtaccaagccagcaaggtgacaacggacgaaaaggtagtagagggagatagcgagagagaagaaatatccctttccctcgctcgaacccgtcgactcgttgccacttaccagattcgcacaaactgtctgagcacggttttggcaaaagagagtctcctagacgacatctccatggagaaaagcgatgaagagcaccaccgctatccatcgaggtctctaggagatccaaggcaaggttctcacccggcaaccccactaaggagggagagggatgtctcaacaatgccccaaagaggataaacgacgcccaaagcgtcgtagttgtcagcctcgtaaaactgggctaggcttacacctgttgcctatccctgttgacctgcaattgtagttccattgctccaccaccaaccacccaacattgttttcaattatgatctatctatcctgccaagttctacgcgagaacaacaatagcagcctatcctctatcttaaaatgttgcaatctagaatgagatttgacacatcctaaaacaacgaatctggacaaaattctatccagattcgttgtcctaggatggattaaataaaatctcattctaaattacaatatttgggatggaggtattaatatccaacatgtttgtacgattatattgacacgtactatatgcacacattttattggatttcaatgacacgatatataatccaaatttacatataattatgaattgacccatgtgacatttctctaggattattgagattgtgtcctcaccttacttgacgtgtaacattggatctatttcgttttatttccatatctcaaactcttttattgccaagtattctaactctacaaattcataattttgaagctgtgattgcatccatttataacataatgtttcaactaattgtttcgttctaatatttgaggaaatataaaattttaagaacattataatctaagttttaaatccaggaccttaggagctaaaagtgggggcattcaatgttatgacatccttaaccgtgaataacatacaatttaccattctaacccatattcaataatttaaatggtcccactcggtgacggagccaaaatggtttttaagctcagacaaactttaatataaattgtatttgctataaaagttttatcattaatttactcattaatattaaaatttaatggagttttggtcggtgagtcctggcagccgtccgagctaaccggacgatgtctccgccactagtcccactgtcccacaaaactaatcagatcgctgccacgcgtcggtgctgatctaccaccgactccatggcccatggcactagtctgattgaatgtgctcgatcggcgtggtgtcattgtgcaatttgtgccctattttttgtgcatggtggagtaacagtcaccgccagaaaccttcaaaagcgtgtacagaagcaccctgggtactgtacccaccccaccacatcgtgagcttttcaaaagttgtgatagccgacttatccttgcgaacttccaaaacagatacatagttggtaaattttaattgtattttttatgccatttagttcattgtttatataattttgcgttgatgacttattttgatgaccatccgaatatgagcaattttaccattcaacatttagtacttcgaggtaccaaattttacattagatagtactttgagaactaaaaaattgtggtacctcgaggtaccaaatgttgaatgataaaattgctcatcggaatatatataatttaatgaactgacacttggatatcataatatatcatttttatacgtcactagcaaaaatgtttatgtgttaaaacaggtgaagataattttcacgattgataaatttttttgtcaaacaatagcaaaacaaatttagaaatcatatataacattgaatccggttccgctcttcatgcatcatcacacgaagaatagcttatatacacatttccaatagcctcacaaattgatcggatggttattccataagttgacacatgtggattttattatacctcatggtccaaagattaaaattttgagtattcaattagtaaaagttttttcccgtaaaatttttttactgtagatggaaggcatttgcaaagtaccaaacttaatgcatacaccttaacaatgataaattcaataggaaaataattgtgaggagagaaatttggaagagaaaaaagagaaaagaaggagatggagagaatcatgattattgagggaaaagaaaaggagaaaaagaaaatgaaaaaagagagaaaaaaaaaagaagccaatcgaggaagggtgtacgcagcgccgtctagtggaggcgtgcgggatggtgtgggccatttgggttgggctaggagggagagagaatgaactgggatatgggtgcataataattattctagactcacgtcaaattggatacgtgtgacatataactaactcatcaaacacagacgacgtatcaaagcgccgaagaaaatattttcaatttttgtaatattaaagatagacatagagataaatattgtactctttgaccgtgtcatatggagcctttttcatattaactagctgggtggcccgcgcaattgcgcggctagcaccgatataaaattatctattttttaatatagttttacttagaattttgttaaatagatatctcgttgtcttaagactttgaaaaaccaaaccttatcatccttgtgtttctaattttatattttttaaaagttatgtcagttgctactcctaaatattttgtcacccctcgtttatttgcttcctcgatctaccactacttctatttgttctcactaaaacctctaaaaattagaccttatagtttttagagtttattgtctcgtttgggttttgtttttataattttcagaagtctcgtcaaatgttgccaccatactactctacggtcaatccactgcctcttctctttatttttattgggattttaaaaatcaaacgtaattatcatttaggttctttttttactttctagaagttccaccaaactgtcagcgactttaccactgtactcatgtacagctcacccgctgccccctctttattgtctttgagattttaaaattcgaacatgattatcattagggttttttttttttactttttagaagtcccgccaaccgttgtgaccatgctgcttaatgacccgtccatcgtccctccttttaatcatcattgggattctatttgggggttttgtttatagtttttagatattccatcaaccgccaccactctaatcctttacattcatgttgcttctcctatatttgttgtcatttgtcatctttttataatttttagaagtcatgtcaaaccctatcaccatacttctcttcggcctgtccactacctcttctttttattgtcattaggattttaaaaatcgaacataattattattttggttcatattttactttctataagtcctgccaaccgccatgaccgggctgcttaacggcccatccgtcgtccctccttttaatcgtcattgggattctatttaaggttttgttaatagtttttagatgtcctatcaaccgtcaccattctacttctttataaacctgttgcttctccccctctttattattatttgtcatcatttgtgttctagatggagttttttttagaagtccatatttttcattctgatatttttatttataaattatatttctacttgaactcttataattatttttatatttacagaatttatttttttgttatttcaaattttagttaatctcgtcatatgttctaaatggtctcttatttcaatagtttttactttttatgacgaatttaagttatttataaattgtattcctagttgaactattatttttatttttctatttttggaatttattttaatttttatttagaattttagttaatatcgtattatgtcttatatgaattatttttttatgttttttaattttcaattttatagttgtttcatcctactcaaactatcttttttatttatctaatttcagattttattttatttttattttaaattttagttaatatcgtattgaattcttatatggactcttcttttaatatttcttatttttaattctgtattcctacatggactcttctttttaagattttattttatttttattctgaattttaattaatctcgtattggattcttatacggacttttctttcaatattgcttatttgtaattccgaatttcagctatttttaaattgtatttctacttggactcttcttttctttttctccgattaatgtgggaatttctagcccccgcagcaaacgtggtgccttcttttcgagctgttttaataatataatataatagatagatagatagatagatagatagatagatagatagatagatagatagatagatagatagatagatagatagatagatacttgtttttcttttgtaagctagcatatatagggatcgaactccactcccagattttcttagacactgtcacttgtaagcatggacgtagtcctggaagtagaagctcttctcaatgaagctcgcgagccagcgggaggcggcgaagcacagcacggcggtagacacggcggcggctcgccggacaaccgacggtgctagactccccttggcgacggcgaggaatccgacgatggcgaccgacgccacctgcagggcgacctccagcgccttcatcttcttcagtgcagcgctgcagctcgtgcactgcatgacatgcgacctgtacctgttgatggcaccagagaattaattgatcagcatcacagcagcccacaaattctgaatgaaaattttcgatgaagctgatcttgtaacgtgtttcgggtcagtgtgaagatcaacttatcacctctccaagacctgatctttggtaggagttggtggcagctgattagccattggggttgcccagccgatctgatgcttacagtactttctgaaccagtttctgaaggtgatgaccatgttgtcagatgatgtgggcacataacaagctttgtgccagttatcaaggccaaccgtggcgaagttgcgctcctagagaatgaaaatcttcaggtcaaaacatatatatgggcatagtaagtcagcaggcataatagctcacatcgccttctgtgtgtcttagaatagaaaccggatatgtaatccatttccgttatctaaaaatgtactcttttaaaaaaagagaaattttatagttcttaagaagatatcatgaggtaccactttttctattataaatttggtacctcatagtaactaggtaccaagagataccaaattttatactaaatttttttacatcatggtaccttcttatgaaccgtaaaattgctcttaaaaaaatcttgtgatgaattgtgaatctgccaccaccctcaccattaacttcctgatttttgaagttcaaaaaaaaaagagtgtgggaccaaatggtctacctattagctgaaagatacatgaatagaaaaatagataagatatgcagaatgagatggaaaaacggattgatgataatgttatttttttttaaaaaaaagtaaaaaatctgtcacaatgcatggacaatatgctagttttatcatgaatcattcagcttgagctaaacaaataggtcacctcaatatggaggaggtaggaatctgaatccaagacgatgttcgtcacaatgtggtacaaccaccgtggtattatattgtcgagccacgcatcaacattccgcgggaacgcccatatcaacctgcttcttcccggagccaccgggacgcacaagaacaccgtcatcgcctcaggttgcttcttcttctttttctccttgccctgatcaatctacacaaaatctaaccatttaatacgattatttgatcttcaagccttgaactagggacagatgtgccatgggggtggtgagggctcaagcccccactacccgtattgatactttaggagcctccactaaatccccttaattttacatcctgatactttttcaatgatgataaaattacgaacatctttcccatccttgaggaggtaccatgaggtaccaatataatctaaccgttgatttagaaggggtatgatggggctaaataaatttagggtggcgctaatccctcaccctcttgatggcgttttgcttgcttgctcgtggtggctcaaagggacccaaccatgtccgccgctggcggcggcaagagctgcatgggaggaggcgaggaggcgattgccgggctcctcgacagcggcagcggcgtctggcgagtacacgctcgtgacgacgagggcgacaagatactcgtcggcgacgtgccatgaatgaatgaatctctcgtcttctccaaatctttgccacatctccgtgccggcgtcgcatcgagtccgctgctgccgccgtcgcgtcgcatcgagtccgccgcggccgccgtcacgtcgcatcgagtccgccgcggccgccgtcacgtcgcatcgagtccgccactgccgccgccacgtcgcatcgagtccgccatcgagtccgccgtggccgccgtcgcgtcgcgtcgcatcgagtccgcagcggcagccatcgcgtcgagcttccgacgaatcgccgccgtaaccatcgtcgagctcccgatgaatggccgctgcaaccatcgccggccttaccctcttcccctctcttccctttgccgcatctccgtgccgacgtcgcatcaagttcgccgcggccaccgtcacatcgagcttccgacgaatcaccgccgcaaccatcgccgtggccgccgtcgccgatgaatcgtcgccgcaaccatcatcaagctcccgacgttgcagctatcctggtcctcccgccacccatcgccgatctgggccgccgccgggtttccgatctagggttcgggacctatatgcccctgctcccgccgccatctctcgccgccggttagttcaacgctgctcctgccctgtgagatgcagagacggaggaggaagagatgccgcgtgcgtgcgtgacgcggaataaagacgaaagtacaaaactgccctcccacccacggtaccgtttcaatgggtaggtgcggtacctcatggtaccgacgatttttgaccgtaggatgttgccagatcaacggtcacgatttggtactgcacaaccttaaagacagtaaaaaatctctaaaattacccaaaacttcatctagtttatttagcctcctctagtatttcttctttgctccgtaatggcaaagtaagagggtgctagggggcagatacctgtggttctttggtgcgaaagggcttgccatagagcgtgcagggcgcatcaaacttcatgtagcatacgtcatcctcctgtaccgacaggaagccgtcgatctttgcctgctccgtcctaatcttgaccgggtagcctccttcctgatcggactcaactgtggagaggagatgaacagttgaacactatcagtggtaggtgcagccggaacattacaaaatggcactagctcagtagcatgttcatgcgtgcagtagactgaagaattaaaactgatcatgtcatgatagatgatgaacatatctgcctggatcttctttgttctgtatgggcatcagccccttgtgcgcgtatgggacatgagcagggtccataagattctccaccaacacgtcgtacctacattacaatggagctagctaagcaaggtaaaatatgtggtggaaatgcagtggaaacctgaaagtaatagttggttcgaaaaataaacgtatgagatttgtccacgtcatcacggataaaaattttactcgcagattcactcatgagttaaaatttaactcctagtaaaattttaagattttaactcatgtagcacgttttaacttagacgtcgaattttaactcatggtgacatagatgaattccagatgtccatttttcggtccaacggtagttttcaaattttcactatatataggctttgcaactacatattttcccctaagcgaatgatcgagctgccatgctaatgggggagcaagaaattaagatttaggagaaatgcttggagatttctgtacccgtagaagaggtccctgacgccgaagactgtgttgaaggacgggtcatcgaggtctgggaagtacggcggccgcttcctctgcaggatctccttgtactccggctccgacctcgggtagaaccacaggatgttgttctgcaccacgctcgggtacgacgccacgcacgccttgctgttcttgtgcacctgccattaattgatccaagaactcggttaatcttcagaaaatgttgctgtttttttaaattttgttttgatttgttttacaggagggccgagggcgggggcctgggggatgaactggcaggagccgtggccatcgaagcaccagccatggtaggcgcactggaggcggcccttgccgtcgacgcgcccctccgacagcggcgcgaggcggtgcgggcacgcgtcgtccaccacgcgccactcgccgccgccgccgccgtcgaaccacgcgacgacgcggaggcccatcaccatcttcccgtgcggcttgcgcgggtcgaggtcgcacaccggagccacgggataccactggtccagccactcgaaccgcccctcctcgccgccgcccacggccggggcggcctcctcctcctcctcggcgcgcgcgtgtggcggcggcgtctcggccgccacggccgacgccggcattgatagccgtcgccgccgctcgccgctggtgtgtttccactgttggcgccatggaggaggtagcctgaccgtgctcagcttgacgccggcgtcgcggagcaggagaggagggcgagcgcgggagagcaggggaagggagaccggagccatggcgcttccgagggggagcttaagcgcgggacatcttttttaaagtggttacgcagaccatggccgaatgaaacgtgctacagtgggtaatattgtttcgtagggtccataagaggaatcatgctatcttttatttctgtatgtatacctattttttagctatccatgtgttgcgtgcaaatgatttctataataactagattacaaacttaaaatagtacaattctttttggaaaacgcaaacatattttagattgtgttggcaaactgagttgggaactaatagataccttccgcatgcaaaacatagtgactcattagcgtatgattaataaaatattagctatttttctaggacaacttgtcaacgaacaaaacgatctctttggacctgcactagagtaaagcaaaacgatctctttggaccttcattatttatatatcatccaaatggttatgaacaactagatagattaatatggaataaatcatttttcacaacacatgcaggttcaaatttaacttctacaagttgcaacgaaaaatacaaatttaaacgtagacatagtttaatttgtctgtttttgcaactcgtagagttgatttttaacttgcatatgcgtccagtgatatatcatatattaatctatcttgttatttttctttattttttccataaccaattagatgacatagactagctaaaaaaaatgtcgagtgttttttgaggggaaaactttcaaatctaactatagtatataatttcactagaactatactataataataataacttatatatatgtattaaaataatatatataactttatatctaatttatatagagataacaatgtagttataatgtagttacactgtagttacaatgtaattataatgtaattatagtgtaactacgatgtaactagcatgtaattggaatataacttagatgtaacttgaacaaatctaccataaacatgcgatgatgggactagcttgtaaaaaaagggtttagatccaatagtaaaatatctcagcacaaatcttagagcggaattgacggccaaaatttttttttgacagtcatctagcagttccgtataaataacggggagagacttttcgaaaacgagactacgctcagtcgttttcattctaggcctcccctaagcccactcaacatccagcgtcttcgtttctccgacacgtgtgctgccgaagacacaaaggcgatttagatttttttttataagaaaacatacatcagcaatgaaaaggaagagtgcataataacaaactggtcagactaaattagagttcaatcaaaagaagatcgaataaaatcaaacgtcagactaaattagagttcaatcaagagaagatcgaataaaaccaaacgtttgcaggtaagttctctcaatcaaaagcatcacccatttcacatatctatgttaaatcatgaaagaaaccaaagcatcgggtcaacaaaaacggttctaaatttttagttcagtggttatctgcaactttcatgtcttattttacttccaataatgcatcgaaatgtgaaaagaaaaaacaattttagtgggaacactgatacagacgctccattccccatgcaaacaaatatagagttttacatttttttttagataatgggcagcgtccggcctctacatcataagatcataaggtgaatacacacggccagatttagagttttacatatgtggttttttttttctttttcgttggacgccgatcgatcgaccaaatttattttccacagcattaaaactcacagagtttactgggcacatcgatcacttgtaagcatggacatagtcctggaagtagaagcttttctcgatgaagttggcgagccagcgggaggcagcgaagcacagcgcggccgcagccacgacggcggctctctgaaccgccgacgtgaccaccgtcgtccccttgccggcggcgaggaacccgacgacggcgaccgacgccacctgcagtgcgacctccatcgccctcatccacttcagtgcagcgctgcagctggtgcactgcatgacatgtgaccagtacctgttgatggcatcgcaagaatccaattttgatggtcactgaattctcttgtgttaattttgtgtttcagatcagtgtaaagatcactagatcagcagatttctatactacctctccatgagctgatctttggtaggagttgttggcagctgattaaccattggagttgcccagccaacctgatgcttgcagtactttctgaaccagtttctgaaggtgatgatcatgttgtcagataaagtgggaacatagcaagctttctgccatttatcaacgccaaccgccgcgaaattgcgctcctggagaaggattaattcgtcaggtcaagactgaacatatcacatatgggcatataatcaaggcagtttgatctgaagaaatgggtcacctcgatatggaggaggtacaaatccgaatccaaaacggtgttcgtcaccatgtggtgaagccaccgtggtatgaacttgtcaggccaggcgctgacgctctgtggaaacacccatatcaccctgctccttccaggagccacagggatgcacaagaacaccagcatcccctgaggctgctgctgctgcttctcctgatcaaaatctgaactttttagacggtttttttagcctgaataatgcaacggatcgagagggtggctgatgctgatacgtgccagtgtctcgaggggcaactctgaccggttgatcgtgcacggcgcgatgaacctgaagtggccccaattctccccctggattgacaggaacccgtcgatgttggcctcctctatcttcatcttgaccgggccgccgcgttcctgatcaaactcaactgtggagaggagatgaatgttctgaatcagtgacgacgcatatgagcattggagaatggcactagatgactaaactgaagaaaatttgggtagaaaattgattgatcatgtgatgagatagaacatatctgcctggatcttccttgtcttggaactgagggaagagccccttgtgtgcgtaggggacgtgagcagggtccatgaggttctccaccaacatgtcgtacctgcattgcaatggagccacggcatagtatatcaagctgcatgcctatgtgtccgtttcggagaagaatggcttgagcatttctgtacccgtaggggaagtccctgacgccgaagacggtgttgaaggacggatcatcgagatctgggaagtatggcggccgcttcctctgcagcacgtcgcggtactctggctccgttctcgggtagaaccacaggatgttgttctgtaccacgctcgggtacgacgccacgcacgccttgctgttcttgtgcacctgccattcatccaacaactcgataatcctgagaaattttgctttgagatcgacgcgggaatgtagattagatcgacgagagtagtggggctctgccttcaccctcccaatataggagcagtgtttagcatccgttatctattttttttctctcttttttttccctttcccttagcaatgggtctttcggggcggttgcgtgtaactaaaactctgcttcttctaatatattgacatgtaattctttttatgtgttcgtgaaaacaaagtttatcgttaagagaatgtagcaaaggagagtacgggagggccaatggcaagagcttcggggataaactggccagacccatgttcattgaatcaccaaccatggccagcgcactggatgcggcccttgccgtcgacgcgtccctccgacagcggcgcgaggcggtgcgggcacacgtagtccacgcgcgccactcgccgccgccgtgtaaccacgcgacgacgcggaggcccagcaccatcttcccgtgcggcttgcgcgggtcgaggtcgcacaccggagccacgggataccactggtccagccagtcaaaccgctcctcccctgccgccggcgcccgcacctcctcggccaccggcggcgtctcggtctcggtctcggccgccgatacggccgagaccgacgtcggcagccgcagcgccacgccacggccgatccacggccgacgcggtggcgccgctaggctagctattctctgactggcggcgccatcgacacggaggggaagcgaagcaggccgcgcgccggaacggaggaggagggaaaggggagccatggctttctttcacgttggcaacacagtgtgcgcgtgtgtgccagtgtgcatggctgtttggactttggatgtggcgcgcgatgttaaatatttgaagctccaggtggttcttgtagctgtagcctgtaggttgaggtggatctcgcaacaaattgtacagtctacagtaccatgtatagtaagaatctgcctgcccatccacatcatcatccaactatcctatccgtcggatgtcgggttgtatgtggcatttttttttcttggaccatatgatgcttttcttcacgtgctagctagtaggagtgaaaatgtaggaacagggtttacactttcctaaataaccgaaaattagtgaatttcggtactttcgaaactttttgtatgaaattatttaaaaatctaacaatttttttactgaatttgaattaattttgcaagttaaaaaaggtaaaattcaaaaaaattggctaggatagttgcttgccggagggggtccgaaattttaatcccttaatttgtataggaaaacaatctcaccgtgaccatacttttttctcacaagggtaaaataaaaggcaaaggtgatatcgaaactatagtgaacgaaactattcgagggggaagcacatcgatattgatcagaaactgacacttcatgagcaaagagataataagggccctttctccttattactttcatgtattaataagaagagaagaggtataacaatcaaggaagatcgttgtgttgtatgttgtcaaactttggaagatggcaggcatctttctttgaagggtagaggaataatagtgtgctactgtgttgggaatttgcaaatggaggatattggatcaaatcacctctgacctctgttaacaataaaataatagatattctagaagctgacaaacaaacaacagttaattactccctccaatctttagtgtaaaatgatattgattttaggatattacgtatgactatccatcttatttaaaattttagtgtaaatatgaaaaagtcccttctaaaaaaatatgaaaaagtataaatcatgttaaagtatttcagatgataaaacaagttacaacaaataatatttttaattagataaatgatcaaacggcttgtttaaaagttaatgacatcataccatgagacacggtattgtatttatggttgtaatgtgataagaggaacaggatatgtgagttcagagagagaaagaaagacggctacattgtcccaatgctatgtacaaactattttaaactctcgaggggacgtcccctcgttgtttacatgtcactaaaatggttatgaaaaaaactaaaaaaagttctacaacatagattaatatgcgatacatcaatccacaaatatgtaaggtaaaatttaacttttacactgattgtgaacatgtgttaactagttgtagtttgtttttttttttttgcaaagtgtagaagttcaatttaaacttgtatgtttgtgaaatgatatgccatatgataatacatgttttcaattttttattttttctataaccatttaaattacatgcaaacaacgagtgtacgtcctctcgaaagtttaaaatccactcctacacttaaaaaggcagtcctagccaacagtcaaaatggtcgctgcaggagggcaccagcaccaacctgaaggcaaatgtcatcataggataggaaggatatctagttacctctaacctctggttgttggagagtcatataactcgaaatggagctggtgaaccgacgaatatttggtagtgtagcactgtagcaagtcaatgttcactgccaaattaggacgggttattttactgtctccggtttttttcccgattccgcaagaactcccttgtccccctatcttgctatggaacctttgagaggtgatcatgtatcttttatatccttcttaatgaaattggcagagctcctatccttccccctcaaaaaaaaatatacgtatatgtgatatggaatagagctcctgtccttccccctcaaaaaaaatatacgcatacgtgatatggaattctcagggccctttctaaattgattagccgaacgttaaaaaaaagtaattatcatgtgattaatcggatatctatctatctatctattatatactaaaagttcattaaacatcttataaacactcctaagccgccaagtggcgctctaataaattagataaattcttagaaattctaagaaaaaagcaaaacatctagcccttggatttcacttaaaccggtggacccattattttacaccgtaagattagatttgtgagaaaaaaaagttaattcatctgtgatcctccttgcctgctattcgctttggatctataaaaacgtaacacactccacgattcttacacgtgatggggcatcagttaatcacaaaccaacgcactcctccaggtagcagggttctgcacgcaccatgaaacgttgactaggtacgtcaatctctttcaccggcgatcggcctgcccagctgccctagatgatcggctacaagggcagccataaccatgagtccgttgatgtcgaccagactctcgcgtcccccaacctctaccactccggcaatattttatcaattaatatttgatccaaactgaaatttgcaaactattgttgctgtttttttaaaagaaaatttccgttccaacttccaagttttttcatgtttctgatatgaaacgacatcatgaacttccaaattgtttctttccatgttaatgatatgaaacgatcgacatcgtggtcattcagtaacctaacaaatttgcactactgtatataagtaataaattgtgacactttcttattattactaattttgaagtttgcatctatttaagtggcaccaaatcataataacttactaatggttaattttaaaataagttctcaagttgataaaatattactgttgagagttacagatgagcacaattttatttttatatgttgtacttcccaaacgataaaatcatgaaaaattaaagttgtaactccaagtagagcacataccttttatgaattattttatcattagaaaaaaaatctaaaaattataactccatgcaaagatgactctagatgcattaactgttcaagtcataactctacatgtataacttgatatttactactcccaccatccttcctccatgccagtttgatctcatccaagttttttatatctccctaaaataattaacatataacaaatgacttttcgtttatttgtgtaaagagtaaataaatgggcatcgttgaataagctcatgcatgcaactaaccaaaattactttctattggtgtaaccctaaaaaaaattctcttggtgtaaactccacgaaatatttacagcgtgatgcaatcaacaccttgattgatgaaaataattttagaaccatggaggttttgttgtttttggtctcagcatcctttgcttaggtgatgatcaaattggaatagagggagtaatttctaagtcagaaatattctgtcttatttgtaagtgacaaattgcatcaatgtaaactgggctagcttgatgccaaataaaacacatgtgttagtagaaaataaacaaatttaataaaaaaaatagttagctcctaaacatttttttaaaaaaaaaccttatttttaattcacatttagtttattagatatgttttctaaatagactaagtcaacactatcttagatgatgaagaaaactatagggatgaattaaatattatacggtataaatctatcaaatagattaaacaattattgaatgcgcgggctagcttccttgttaattattaaaaacttaaaaaatagatttatttgatttttttaagcaacatgtatatagaaaagtttttgcatgaaacatataaaaacatgctaacaaaaatcaaataattagccaagctgaaattaacgtagtttagaacgcgcccgaaatttgttttctccatccatttgtttagctgcatcctatgaaatcgtcagctaactcttaagatgatcagttgtttatatacagatgctatcgatatcaagcatacttggttgtgttttctatatacatttttaagctgctaaattagaagctaaggaattcccagcaacaaagaactctctgatttcctggacgcatcgacgatcacttgtaagcatggacgtagtcctggaaatagaagttcttctcgatgaagttggcgagccagcgggaggcggcgaagcacagcacggccgcagccacgacggcggatctctgcacaaccgacgtgaccaccgtccccttggcgacggcgaggaacccgacgacggcgaccgacgccacctgcagggcgacctccagcgccttcatcttcttcagtgcaccgctgcagctcgtgcactgcatgacgtgcgaccaatacctgcagacggcatcacaagaatcatttgaattcaaaattcaaaagaagaataattgaattctcttgtgttaagttttgtgtttcaagtcagtgtgcaagagcagcagactgatgcaggtagattgtttagctgtttacctgtccaagagctgatctttgctaggagttggtggcagctgattagttattggggttgcccagccaatctgatgcttgcagtactttctgaaccagtttctgaaggtgatgatcatgttgtcagatgatgtgggcacatagcaagctttctgccagttatcaagaccaaccgtagcgaaattgcgctcctggagaaggaataataatgcttcaggtctagaatggcataacacttggcctgaatcattcagtttcagctgaagaaatagtcacctcaatgtggagcaggtagatgtctgaatccaagatggcattctgcccaatgtggtagtaccaccgtggtatgatcttgtccatccagacgccgacgttccgcgggaatgcccagaccaacctgctcctccccggagacaccgggatgcacaagaacaccagcatcactgtgggttgcttcttcttcttctccttgccctgatcatcctgtacagaatccagcagcaccaacaaggtaattgacaatactgatcttgtaagatggttctatgagcttgaacaatgcctgagatggagtctgaagtggcgagccgtagaacgtgcacggcgcgacgaacttgaagaagcccctgtctagcattgacaggaacccctcgacgttggtttcctctatctccatcttgagcggcccgccgccttccttgtcgaactcaactgtgtagaggagatgaatgttctgaatcagtgacgcagctaagcattgcaatttgcactagactgaaagaacagattaaattggggagcaaattggaaaagaaaatttgatcatgactaatgacagatgaggaacatatcttcctggatcttccttcttgcgggtgcgcatcaaccccttgtgcgcgtaggggacatgagcagggtccatgagattctccaccaacacatcgtacctgcattgcaaaatttgcaatggagctagccatgatcaacagctgcctgacaatggtgcagaaagaaagatttcagagaatggatttgggatttctgtacccataggggagatccctgacgccatagacggtgacgaaggacgggtcgtcgatctgcgggatgtatggcggccgcttcctctgcaggatctccttgtactccggctccgatctcgggtagaaccacaggatgttgttctgcaccacgcatgggtatgatgccacgcacgccttgctgttcttgtgcacctgccattgatgcgaaagctcgattaatcttgattgatttgagatggaggagaggggatgaagaagaagaggaggaggagagtaccgcggggccgagggcgggggcctgggggatgaactggcaggcgccgcggccgtcgaagcaccagccatggtagacgcactggaggcggcccttgtcgtcgacgcggccctcggacagcggcgcgaggcggtgcgggcacgagtcgtcgaacacccgccactcgccgccgccgccgtcggcggcggcggtggtgcggtcgaaccaggcgacgatgcggaggcccagcaccgtcttcccgtgcggcgcgcccgggtcgaggtcgcagacgggcgccaccgggtaccactggtccagccagtcgaaccgctcctccttacccgacgccgacggcgcgtcctccgcccgcggcgtctcggccgccacggccgcaaccgacgtcgacaacagccgcctcgccacggcgcggctccacggcagccgaggcggcgggacgcgggcggcggcggcggcggcggcggcgtcgcggaggtggagcgcggggcgcgcggggcgcgcggcggggaggaggaggagggagagggcatccatggctactcgcgtggtgggggaggggggcgcgagcggcccgcaacgaacttgtggcgcgcgcgcgcgcggttacgttgggtggggcccggcacaaacttatcggcgccgcaggtgattagctggacgctcgccacttggccaaattggagacgggagaggccgatgccgatgcaccggttttacagggtacatttaattatttgccatttttaaaatatgccaattaataatttgctacttttataacatgtggttccttatgtgcctataacatatggattcagagccaaattcttttgaaccactcgtaaaagtggcaaaaagttaattatttcgttttctagtatcacttgtcgagtcgtcgccaacgagccgccagaaactgtccgtgcaacttgtgccgatttttttattgaaagtacaaacagcaaggtagaaccatcactctttggatgataagacagttggttggttttatcggctaaatgccggttaactaaagaagggataaatcccctttatctgtttctaataaaattgaatatgtgatagagttaattttgtgatcggtaaaactaatctctaaaactgtattcgagataaaccctagagcccctccagcgtctataaaatagaagttgaacacaaaggagaagggacgccaaattctctatctaaacttcaaaaccctaaattgcccgaccaactagaaaaggtttgtgaggcgatctcggtgaaattttacattggcgcataagaagaaaagaaacagaagaataagagaaggaagaaactaaaggagaataattaacatcgatggcatattatgtgggtattgaagcataggtgattatgtataagctaaatcattgagatcgtaaatttatattccaacacagacatgctagatttttcattaacgaatcggttcgcgccaattccattaagtagagcaggaaaaaaatgttagaaaaaaatatcgaaaggtatataggaatgaatggaagctgccagtttctaggcacccgaaaggttcaagttttggcatgataaaatactaataagggtgtgttagatccaattttacaccccatcacatcgaacgtttgaacacatgtatgaagtattaaatatatgctaaaaaaataactaattgcacatattgctactactttgcaagatgacttttaaacataattgctccatgatttgacaatatggtgctacattaaacatctgctaatgacggattaattaggcttaagtctcgcggtttagtgatggatactataattagttttttcgttagtgcagaataccctatacgacacctatataatacctgatgtgacacataaaaactttacaccctgatctaaataacccgtaagaatgtactacctccgttttgttttttaatagataacgccgttgactttttttcacatgtttgaccattcatcttattcaaaaaatttacgtaattataatttattttgttatgagttgttttattactcatagtattttaagtatgatttatatcttatacatttgtataaaatttttaaaaaagacgaatggtcaaacatgtgagaaaaagttaacggcgtcgtgtattaaaaaacggagagagtattttgctatagccgtttttacttatggaagagtgacgacatctgagacagatcgaagagcatcgccattgtcacgatggcgacccaatcacaaacatggcagaattgcagagagtctagtaaggcagaagctgaggctgagcttaccaaacacaagcacacgcacacgcacaccacacagtctacctatacctactactacctgtcatcttctccttcttaatcccaactaaatgcgcacataaacgaagaagatttgcactgatacccgcgctgatacaagcaagcatccggcgatggcggcggcggcggcggcaagggggagcgtgtgggagatccagcagcgggacgtggaggccgcggggctggccgacgccgacgcgggcgccttcgtcgcggcgcttcgctccgccgccgccgttgcgacgggtgggcctgacgccgcgtgggaggccgtggcggcgggggtgctgcggccggagcacccgcacgcgctccaccagctcgtctactactccgtctacgccggctgggatcgcgccgcccggggcccgccgccgtactggttcccgtcacagtaagtcacctcgccggagacgaccagactggcaaactgacagtggctggtttcagtgtatgcaaagttcaagcttatgttgatagcgtcctagtactacttaatttctagtgtgatatcatcagtgataagatttccttgtgttaatttccacttgtcatgtcaagtaacctatttgaagtacaatgatcagtgcatgatttctctacgtagtgatttagtgtttgaaatgtgacaggattgacactaaacaaacaaatcttggtagactgatggaagcacatggtcctaggttgttaggatcatcatataaggacccagtttcaagttttcacctcttccacaagttctccgtagagcatcaagaggtcagtcggttgctctaaactagtcagctccagctaagcaaccaaacaagtttgaagtcatttctttacaaccattggagtggctatatgaatgttatttcttgaatggacagtttaagtttccacaggcattttgatcctactcccagtctatcctttgttaggtctactggtcaatggtgctgaaggagatctcaatcaagttccaacaagaaccaaagtcaattctagatacatcagataaatcaaggaaagggggaacatggctccaaggtgctgtgcttaatattgctgaatgttgtctgttaccttggccttcccaaaacaggacagatgacagcacagctattgtttggagggatgagggtcttgacaatcacccagtgaaccgtatgtcactgaaggagcttcacaatcaagtgatgtatgtatatgttatcagactaacagtaagaatcatgctaaagcgtattaagctttgccataacttattctgaatcatcaccattgttttgctgcttttggtgttttcagtacagttgctactgcgcttgataccatgttccaaaagggggatcgaattgcaatagacatgcctatgacatgcaatgcagtcatcatatatttggctattgtccttggtggttttgttgttgtgtcgatagcagacagttttgcacctcaggagattggtacacgcatgagtgtgtcaaaggcgaaagctatttttactcaggtaggaaattagtgaatctttcatgacatagtcattaacactaaagtagggcttcatctaaatttcacgagatttcaggatttcataattagaggagggaagaaggttccactatacaggtacgaacggatgattgatcagttcatttcagtttgtctattctgatagtataatgcacttagcattttgtttttttaaaaaaatgcattttcttcatatatttttctaatttatgacatttgcttagtttgaagttaagtaggagtgtaggacgttatcatgtgaacactgaaaacattctctttcattgattttagaattcagcttagatttttcctgtgaatctaaaaaataggagtacttaagtaccagatagttcatagtacatttcaatcagaaagacaatttgcagaacagataaatatttcataataattccattcttcagccgtgttgtgcaagggacttcatctaaagctgttgtaattcctgcaactggaggctttcttggggtttcactaaggaatggtgatatgtcctggaaagatttcctttcttgtgctgctggaaggtatattatacagaaataaatcttagatggctttggataagtgtattgtctttccattgaagaaaaaaggaacatgcaattgttttttttttctttactaatttcatgatatgagtgacaatatatgttggatttgcaggtcgtccatttatcccacagtttatcaaccttcagacgctctaactaatatactattttcttcagggacaactggtatattaacactatttcattgcttcccctgattttagtatttcttttgtccacccctgatttttgtctgttttatttacttgtgcaggagaaccaaaagctatcccatggtcacaactttctccaataagatgcacatgtgatacatgggcgcatttggatatccagccacaggacatattttgttggcctactaatcttggatgggttatggggcctatactcttgtactcatgctttttaagtggtgcaacgttggctttgtatcatgggtcaccacttggtcgtggtttttgcaagtttgtacaggtacatctgatgtactttgcaccgtcacttgctttggaatgttaaagaagatttatattttatcattgcttcttgtgtgcactgtaaactgtactaattatgtaggatttgagaccctgcttggttgagcttcaggttataatctaaagctgattttgaattttagaatttgattttaggattaatcttaggggtttcctttgttacttttgtcatctagctctcttctcacaattactataacaagacaagtaaaaatcctaactaaattattcttaaaaattaaacctcaaagttccaaattgcttttgatttttcttaaaaattaaaaatctgattattctttgtttattcattctgatttcatatttggttatggcacatctctactgggtagtgagtactaacaacgtgtttcacctcaaaaactgtttttgctctcagatcctgtttctttgagccccctttccccccacaaatcaggaagagttttgccaaatgcttatgtttgaagataaatatgaactgaacttacttaatcatcatgctctgtgaaatattttgcaggatgctggtgtcactatattaggaagtgtacctagcttagtgaagtcatggaaagctgggaattttactgaagggcttcactggaccaaaatcaggtgagtcatccttccactatcagaaggctcacagcttcatcacaatcagaaaggaagttaaaagtagtattataattgcagggtactctccacgacaggagaggcttctgatattgatgatgatctatggctatcttcgcgtgcctcttacaagccgattattgaatgttgtgggggtactgagctggcatcgtcatacattcaaggcagtcttctgcgttcgcaagcttttggagcttttagtgtgcatccatgtccactgggtttgtcatacttgatgaacaaggaactccatatgtaagcatctcccctgaaagttatgtattctggcattatgtttgaagcataaccatttcagttgactatgatagcctgatgatgtaccttgtgctggagaagtgggcctcttcccttatattttggcgctacagatcgacttctcaatgctgacaacaataaggtttattttgatggaatgcccatttacaatggaagggtatggagttatgtacttccttgtctccttttctccaataagattgctatataaacagtccattattctttgatgaaccaaatggatccatttgcatactaagttctagccagaatgacatgaactcatatgttgtattggtactgcagcaacttcgacggcatggagatataatccaaaggacagtaggtggttactatattgtgcagggaagagcagatgacactatgaatcttggaggaattaaggttgaccctcctatttcaaatgttttcaatagcttgttgtcacccttgaattttatgaaactaaataaatactgctcgtcttataaacagacaagttccgtggaaatagagcggatatgtaatagagccgatgaggctctactagaaacagcagcggttagcatcaaacctgctggtgggggaccagaacagctggctatcttggctgtgctaaaagatagatcaccaccatgtgatgcaaatgttctcaagagcaaatttcagagagccatccaaaagaacttaaatcctcttttcaaggtaagagttactacttactcgtttctgatgttaaggtcagatagtgagatgtgcacacgtgtaccgaggtcattggaatcactctttgtcatcttgacaggtgagctatgtcaaaatagttcctgagttcccaagaacagcttcaaacaagctgctaagaagagtactgagggatcagctgagcaaagaactctcgaatcgcagcaagctatgaccgacgtgacatattcaacaaggaccacaacaacaacaacaatagtagactttagtccaaagcaaggtagagatgaagagccatacgaacagtgagggtaattcaaaatcgcttcaaaaatgccctcttgcttgtcaaatggtaatattgaattatgagtgtgtcaaaaaaaaaacagccacttgaataaagagtcatgattcattgggggcgtatagagaacttcaggaaactatttttttccatgttaataaatgttgttgaattgtgagcatgttcaataggcaacggcttgaaaaagtgacatttcccgatgggaatttgtagagaacttcagaatactcatcgctgtactgtattatgttcagctcatgataaagtggtggcatggtgtttggattattttggcacaattcatcccctttgaagctttctgttccttttttaaaatgtttctttgaggggttttatgtgccattgctaggtcaaatggttcatcatatccagacatccagttaatcgtgttcctgaagtgtaaagaatgcatcatcttgaaaattaagtcgtaacaatatttcggtggaaggagccgtgctcacctagtcacgttacagaactgcatccatattctgactttatgcacaccctacatagattaatttctggtgttagacggctaaattgactagcgtgaagcttagttgacagaatgcagagatatggccaatatttcctgcgtgacaaatatgaagaagtcaagctagacatgcagaacaattaattgtattcccattttttttccatatcatgtgtgctgaaacagaactaaaaactcctccaaaaaaaaaagaaccgaaaacacctccaagactccaagtcagccggcacatctatgggatcacaacccccgttcttcctgatcactagaatccaaataccaccagagcaggtggaaattttgttgtacaatgttgaattttttttctttgtttgattggaccattttataattgattttaccaaaattatagttcagtattgtatgctacaggttgtctggaatgagaattaagcaatattacatcagaaaattagacatgctgagtccttccctgcaaaagaaaaaaaaagtgagtcaatttaccgaaatacattaagcctgtccagtaggagaaaatccaactaggtaggcaatgacatcaggttgtataacctttctaatcgccagctaataaccattatcctatgccattatgctcccaaaaggtcattagcataacagcaatgtagtatgtattaaaagcgagagaaagataattctcccagtaacagtcatccatgtccggttttttccacgcagatatgaggaggaaatgagaatatggtactcaagtctgaacagctaattgcccattagcgtgtctttagcatgtaatgatatcgaagtaattttagtgataaatataacaaaattataactaaatgaaagttcaaatttatgcgagctaaaccttcggtgtttaggtttcttgaggtgaaaactatctttccaggctaagtattaaatttaatatgagtgcttatatttatggttaattatttttttaaattgataagtgatatacagtacctcttaacagcgaggccattaatgattaatctcaatgtatgccaagtcaattctacttttaagattcaactatattatacgcgcttcaatttgttttacttttgaaatcaatttcaaagtatgccgagaaacccgggctaggctaggggaggttagcctgcgttcgtaccatgttttcaaaaaaaaaacaaaatttactaaagtcttttaaaaaattgatttttattagctataaacagaagttctttgaaaaataaaaaggagtactccagtatgcacagagcagaagtttggaagcttccaaagtcaaaatcaggtcatagaaaattttagaaacccacggatcacaacatcacgtgaaaaaaaaaagaagaggaaaaactagaagttgccgagagccgcgtggtgttcgtccggtctccggtccagagcgggaggcggccggcaatccgcgacctccacctcctcctcctcctcctctcgtcaccaccaccacggcgaccccgtcctcctcgcccctctaaaagcctctcccttcctttctctctccccttctcgtgggatcttgtattcttgcgtcgtcttgggactcttgtggtggtcaagaacgaggacgagagaggtcggagagcgaggcggcggctgtgccgttgcgcgtgcggtgcgggtgaggtagctagcgagcgagaggggagatggaggcggtggcggttgcgggcggtggcgcggggctgacaaggtggcaggcggcggcgctgtcggcggtggcggggtgggtgtgggcggcctcctccttcgacctcacgcggcggtcgcgcgcgctggtgcagccgtgggtcacccgccgcgtgctcgccgagacgccgtccatcgtcagattccaggtccgttttttctattttttgtttgcatcgcgcgtctcctgatctcctcaagattggagggaaattcactgcatttgctgggattgttatattttttgtagagataatcaggatgttgagacgatttcttgagtgaatagggaatggattttgatagctttgtgttatggaatagtaattgcttcgatttttacatatgtttttgtccttgtagatttctgaattatttttttttggatgttgaattattgcagaaggtgcatcacaagttgctggacagtttcttctctgtgctgtcatgcgttgtctctgtccctttctacaccggattcctccctctcctcttctgggtatgccttcttgtcttacacacataaaaaatgcatgtttcttttcctctgtaattctagctggattagctatgaattgctcttactcttatgtttatgtaattctagctgtattagctgtgaattgctcttgctcttctgtttatgtaattctagtgggattagccgtgaatcattcttgttcttgtgattattgtagagcggacactccaagctggctaggcagatgacgctgctcatggcattctgcgattaccttggcaattctgtgaaggtcactatcgatttatcatacaatagatgagagttgctgatattcgattcgtttagctgttgacactctggaagtctgtggatacaggacgcggtgtcagcccctcggccaagctctcctccggtgagaagagtgacagctactgaagacgagaaggaaaatgccatggaatatggattgccttcatcgcacgctcttaataccgtttgtttgatggggtatgctcgtgtacctattcttttactaagaattgtattctgatgtattattccgtttgtttcgatgtgggaagctctgaagagttcctttgctaatggcccttctggttgatgtagatatctgctgcattatgtcctaacatatggatcacacgacaatgttatggttgtcacgggcttatctctagctttcttgcttgttatgttagttggcattggtgagtctccaaatttctctatgcaacactcttagagttacgtcgttcaaaaaacactcttagagttactagtagatattgatgatgtggtttatttgaaattgataggacggatatatttgggcatgcacagcttgattgatgttattgctggcatctgttttggcgttgtaatcctggcattctggttggctgtccataatcatgtcgatgcttttgttgtctccggtcaaaatggtatatctatacgcctctgagttttgtctgataggtgaaatgtaattttggaaggcttattctcgttatcttttcccttgcagttacaaccttctgggcgagcctttctctgttgctgtgcttcgcatatccaaaaccagaattcccaactcctagctttgaataccacacagcattcaatggggtggcttttggaattgtaagttcttgttgactaatgcctgggtaatccaaaatttttagtagctccaaacttgcttgcatcatagtggattctggtcacatttaatatattatctacaataaagaacaagactttttaggaaaggcctgcccttgaaacaggataaaacagcacactgtttaccgcgtgaatttcattatctagagaagcagctctgacactgtttcttaacacttttcaggtctatggaatccaacaaacctacttccatttccacaatcctgatgtccccctcattttcagcccacaattaccgcttattgtatttgtcgggagggttctcgtggggatcccaaccatcctagttgtgaaattctgcagtaaagctctctcgaaatggcttctaccggtgatgtgcaacaccctgggcattcctattgtatcaacctgctatgttccagcgctgaaggcttccgaaaagtgcaaggtcaagtccgacgcgaagcagggcggttatctccagaaggtgttctccctctttccacagaaggcgtacgatgtggacaccggcataaggttcgttcagtacgccagccttgcatggtcagtggtcgacctggtgccggccatattcactcatttaagtttgtagtgaacactgcaagatgcattctacttggagacttgcaaaatcccaaatgggctattcctactcatgagagagagataatcttatgggactgtaaatccgatgatctccactttatttttatttttgcgtggtgtgtgtagaggtgttttgtccatagtagcaaccaggaagtattaacatgctgtgaaattttgtttcatgatgaagacagcgaccaccacgaactctgaaacttaactgcaaagaaatgccattccttttcttgcattgtattgatgcaggttctttgtatccatttcactttcatgcccatgtcattatctgccaaactaagagtctaagatcaacatcatcttatgaagagactgactgatgtgtccctctttttcttcaaagaaaaaattaaagaaaaatacagaaaccagttaagatcagcaagatgatgaagaaattgcagtgttttgtccccctcccaagtctaaagcctgacggtgaataaacgaccagtttgtatgctgctgttttgtgcgatatcatcgctgtgtgcttgcgttgtgcagaattgacaaagcgagttgctgggccgccggcgaggcgagaacgacgtgcacacttcgcctccggttttctagaactcgaatttcccgcggcgctggcgttggcgagcgcaccaaccgcgctgatggcgacgagagaaacaacctgccacaggaatcgaaggcacagaggctctttttttaagcctacatcaaccatccattgagatatacagtacacctgaacatgcctaaaagaaattcctgaatgtttggggggaaaaggcaaacacaatttgctactaaacgcaaacataagttacataaaaaggtgaaatctcttctctcttttttatggccggtttgcttggtaaattcatgagtgtgtgaccgtgtgaaacatatttgatagtagcggcatcgtagagaccccaagggaagcgatatgtaaaacaagattaaagagtcaatcagcagtacagtttattgcctcggttgaatcgggaacgcaatagaacctatcccacacgacacaaataatccatccactggcaataatccatggccttccttatcagctgataagaggtactattaacttcatccaacggtttcttggggggcaaaaatcatcacatcttcaaggaaagaaaaatcggagctcaagtgttggtcacaaagaattctaatactgtttttcaagcaattatgtacggcaaatcaagatgtactcagaaagacctaccggctcaacagggagccatacaactacattgttcatctctacaaggatcatgaaaaaagaaaaaagaaaattaggtgaaatttgtggggaagaaaggcgaacaaaatgaatacaaagagaatagttttcctttcataatacaaatttgctacttgatgcttcgagtcaccactgcagcccccaagccaagcatcagccaattagagataagtgagaacacgatgaatcctcccagctgtaggtatacacttgaatcatgatgcagcaaagcagctcgcgatagccaagcgccacgggcaaaggtagtaagaataacacacaggagattcgaggggaaaaaaatatctgcaaccagggaacttcacctagctatcaaacatttgctgcagagacagtccaccacttttacatcacaggaaatagtcaggtgttctacgagttacatctggctctccccttcttggggctggctcaaactgcagaatgaaacaacatatagctcataaggtgcaacagaaaataaccgtggagccagatcacaaaggcataagcaaaatgggaacccaacacatagaatgagagttgcaaaagcagaacatgtaccaatcatgcattcatgtttcattagtcaaatacctgtcactggggaccatgaaggggcatgtttcttaatagtcttagtttgtttctataaaccatgaaggggcatgtttcttaatagtcttagtttgtttctataaactaaaagtcaatgaatgttcaaccattacctggatgaatgtatgctccctgcaatcatcaacttccaagattgatgccatgttcccacagcgatagcaataattaggtgcactaaatatggtaacaactttttgctcctgttcagtgtttgcaaaatgttagtgaaccggtatggaaaccaaaaatactgagttcaagtagagataattacatgagcccaattgaatccctccatgaccaactggtgagctctagcaataagtcttaaattattggtatggttgaactgctctgatatatcctgaaatgatagaattgataagtcgatgaacatgaggtgcacagctaaatatagagattctttttcttatataaaatgttacctgcccgaaggtgtatccagcacctcgaggagaaataccccaaccacatcgatcgtctggatcagaccacagaagatcacacatgggcccttcatggggaacttcttggacacgatcgaagttacgtatgttatcaagtgtctcaatggatggcgataatccaccatgcaggcaaaatatttctgactcaacctacagaacaaatgaacagcttctgtcagattcactagataatgtgggaaggatgttggcatatacatatgaaaatgctgaatacacaccaatgctgtcaaggggaagtaatcgaagagatctgtaaaagttttccacacatttgcattcccgtacctgcaagaaatacagaaaaaaaaacggttcttgtaagcttaattcaccaagaaaagggagaataaatttcagtctcaaattaaaaaggtaattgatataatacaagcagcagtgaagtttattgtatgaaacaaattgttgaaaaatagcctaaatacctttttacacatgattcatcactatatttttatcagcacaaaatggccttttagaacattgcagtaggttcatcttatgtcttagtaacaatagttgcaagttgcaaacaactatacacatgaatgatacaaatatccttaatggtcaatggaccaagctgacccatcataaaattatatagaagtaaattagttactaatggatcatattattttaccaccgctgtcatttatcagaacaagactagataaaagcttgcctagaacaaatttactttagttacaacacataacaaaaggcacttacttccttaagcactcgtcatagaatccataaacttgagtgatctgcaaaatgattcaaaaagcatcattcagttcatcagttgtgacttgtgagcatgtacagttgtacacagaaaggataacaaagaatgaagagatgcaacaaaagctttaactttcatataatgacagtaagcaaacatcaagaatctgcattttaaaaaaagtacatacctgtcgactttcgtggtttcctctgagaatagtaattcgctgaggataacgaacctttaaagccaccaaaagctgtttttgtaaaggaatacattaaaatcaagaactattaattttagaagtatttgtaagttaaatgtgcccaccaaaacaaaatgataatcagccatgttgatgcttaaactactcttaccgtgacagtttcaacagaataataaccacgatccacgtaatctcccataaacaagtagtttgtatctgggcactggtaaagtgaagagaaagcataaatatatttgaagtttgatggactcaagatatgcaaaggggacaacgaacaggaaaatacaactgatacctttccaccgattcggaacagttctgcaaggtcatgaaactgcccatgaatatcaccacatattgtaacaggactctttacaggctgcagaagcatggcaaagaaaatgttaaattatcaacaaaagaattcataatttattatatgggaggcacataaccatctcaaggaatcactgtaagttaaaagtatacaaaataaagctgctttaactttcgtttgcacggcagtttcaaaacaaaacaaaacctgtaaggctataccatgcaacacataatacagaacaaaaccaaatataagtacttctgtcaatattatggatttacataaattcagaacaagaaactagaataaaattttccgaggagacatgcatatacatgatctgaagactaaatccttgtgtggttcaacctgggtttcgtctcaagactaccccaacttcctctagattacccgcaacttattttgctattgttgttctattctttaattattatattttgtaaccaagtttgatgtacaatttaatttttttttcgtttctggttgacttacaaaagaatttgatcctagatgaatatttctagtgatctgagcaaagatccatgacaaatttaagagattaatgaagtgtgattgttgcactgccaacatgaaatattcatccttgtcaaagacaaaccatgctcataggttcccattacttcaaagactatagaagctaattcgtcagtcaaatagtaccatcatttcatgcaagtgatccaagaaaacaagctggagtattgcacatttagacaaactaaattttggaagttttccatgcaaggtattgtaacagatgacaccatcacagcatagaagactagtctggtagagatgaccttagtctcaaaagccataagaatataagatattgttggctttttcattgagttttcatgagaaatagatctgatgttttcccttaactattaccacctaaattatactgcgatgaacaaaagcaggcccaaaaatgagatcctggctaatcctagcgaatcaagaaagacatcatagagctgtaaaatatcatacttgaacgttgctctcctccatcaatatctcttttgccttctcgcaaagtgctctgacctgtacgaaaaatactcaagaatgagagcaaatctatggtggctcactaattaaccagaaagaatttaatcgagagaggtgtgaatttggcaaaaggcataaatctatcggtttggaagaccaataacaccctaaacattttcctgccaagactcattttttctttcacaattcaaccagctgccaaaattctgccattgacgacgagcatccagagaacattggcacttcatgcaaaagccaggggcctcagacagaaaataatttcgtcatctcaccgcatctaatcctgtgagatgcaaacctcgtcgctttgcaacccggagagtaaacacacagcgttcgctccaccaaatcacaacaaccgaaaatccgagcaaactttttttcttcaacaaaaaaaaaacgaaatggagccgagcgcaacccgaggcccgatctcccccgaaaggcccgcaaatccgccagatctggccacacccgccacgcccgaaccgaaagaacagacagcaacagcgcgaggtcgagcggcggcggaggaggaggaagaacgaacagccagcagagggagagcaggccgtgtgggtggtgggtacctcgggctcggggaggggcttgcactgcatgaggcgctcgatctggtcgtcgaggccgccatgggggctgctcatcctcctcgccgcggggggggggcgtcgcgcgcgcccaaccctagatctcggcgcggcgtcgggggacgcgctcgtgtgtggaggaggcggaggagaggaggggggcaaaaggtctggtaaggagcaagggacggcggatatataactgagatttggaggcttgtggccatcggaaaaggaggtgaggaagggagggaacggaggagaaggcttctgccaaggtggggccacggttgttttggtgattcaaacctcctccttttttttctttttttttggttgagaaattggtgattcaaacctttgcttaaatttaccatttggtgatttctggttaaatttatctaagtatttgcatgtgtttgcttaaatttaggtgttgaatttgtaattggctacaacaccagccgcctttaggatgagtttagttccaaacgttttcttcaaactttcaacttttccatcacattaaaacttttctacacacacaaacttttaacttttccgtcacatcgttccaatttcaaccaaactttcaattttgacgtgaaacacacccttatatatgacattggaaaaagagccatttacagggtgtgttcggcactaagtttctcaaccaatcttcctcgttttccgcgcgcacacttttcaaactgttaaacggtgtgtgttttgcaaaaagtttctatacaaaagttgcttaaaaactcaaattaatccatttttgaaaaaaaatagctaatacttaattaatcacgcactaattgatcgctccgttttccgtgcgggagggattagttcccatccaaggaatctgaacagagccaatagataatacaacatttaacttctctaaggtgttcacgttgggccgatcgttaagatgtccacgacggatgttagcaattttaatgtgattgttcgtctctttttgcctctgcgagctagtgagatcataaggatgcttgcttgttttcttttttcgtacttcgtgcccaaccatgtgttgcgtgagtggaccaatttttcaggcgcgcgcgagtagtgtgcccacatgtctctcatatgtgggctccagctaggagagacacaccaatcaacgttggcctcacgtatcggttggaacgtgggacatttacttgtttttgttgtcgcgcttgttgcgtgtaggactccgccccagagtctgcctcaaggcagccaagctaaatgaggcgtaagatgacggttcacataccagcgctggtgactaaaggacgcaagcaagtgcaaggggatttagacgatggttttcacctgcagtaaatactagtaacatgagaggatgaaaatgatttttttctaatttattttttttgcttaccaaggtgatatgtaacctaaaatccaaactagaatagagctgaagaataacataacttgttttgaaagttatactacgtggtattttccaattaaaagtaaccatacttgtattgctaacatgcctatctacgtagatgaacacggtagaatacagtgttgatgacaatctggaagaaaataatgatatctgaaagaagaattatggctgcatgaaacaattccacctacaggtcaggctttctgagatgataagacaataaatgcaattagcttttttttcaaaaaaaaaaacctaaaccagttgttgctggttttatattaagcgagtgaagagctgtacatagtaacaagaacggtgaggaacagagaaagaacgaaaacaaaaaagaagcagaaaaagagaacagacagggagatcagaggagctacatagaagcaaggaaggttacaacaaggtgctatttggcgctaatctcgctaagtcttttggcccacatcctatccatgtgttgatttcatccacaattctcgtcaccatatgcaacattgtgagttccttgttcccgaaagctcgccggttccattcacaccaaatctcccagctgagaagcgtatgtatggagtgtgttccttttgttttgctcttgtcgctgtggctcgttcttctttcccaccagtcaagcaagacgtcgttggcatttgcgtggcatgaaagcgtgatcgcaattcaatcttgaagagaccctagccccaacttcctttgtgaatgtgatctcctttaatagatgatgcgctgtctccaagtttctgtagcaaagctgataaaaaatagttgttgggctattgccagagttgcaaccgatcaatcgtccaaatattttttgcagcagcaaccatgcgaggttcttgcatttggatggcgcctaagttttccagatcatactaatggctattgatctggttataccgttgatttgagccaaatatgctgattttgatgaatacttgcaactagttgcattttatgttaatctagtttgcatggtttgattcgaaaatttcgcactgacagactaacaggtgtacattcaaagttgcagaaccactgctacagaagccgagccacaaactgaaatttcacgtctcattttattttaaccctgaaacaaagtcaacaccatgtcatcatggaagcatggacacttcaagcaaagatgactcttgttcattaccaggaattaaattgaagtaattaattactctgttgacgcagcagatgcactaataacaccgatcaaaataaagagagaaacgaacaataacaaggtacaacaaccagatggaactgcaacatgtagcttccctccagtaattcacaagtaacagcggttacttttctgtccaattatcgcaaaaaaaaaatacttttctgtccaatttcttttttcctcgagcagtgctaacaaaaaaactcatccaaatcaatcacttgacaatttcctcttgattgcagttgacgagcactcctccaaatcaccacggttgttagacactttttaggtacgttttagtatgttttttaatacaagttttaagttttttgttcatgcatatgcaaagtgtcctgtaggtgcagggcattggattcagcaccatgaaactgatttgtgctggtggaaccttgccctaacaaaacgatactcaaaattatttaccggtatctccaaatatgcctgcaaggtcatctgtgacgtgaaacatgttctccttttatttttttaaaaaaagaaagatagaaatctagcatctatatccgcaaaggatatagacagccaataaacatattcttctcacagtagtagaacaacaatgtcatatgtgcacgctaacttattgtgtataaggtcaatggctatgtgaaacaacaaatacaaattatgcacgttagagctacaatactccctccattcataaatagatacagtacaaattatgcaattaaaacctttaaatcatcaatatgtaaaatattatatcttatataaaaaaatatattaatagttttttcatgtacatgtattttcaataattttcataaatacatgtttataaaaatcattcatgaaatatattcattagagactaaggccaagttattttattttatttttctaatttctgcgatggactatttactccacgcttattaaaaatatgatttcttgaacttattttactgcaattgtttgcatcacttattctaagttatgtataaagtttttctgttaaaatgttaattaatcgtgtcaatcgagtaaacaaccggtctcaacaatccacgtaaaaaaatgttccaatcaagccttaacgtgtgttttatagtccttctttccaacttctattacttcgttttccgtacgtacgtttcccgaattgctaaacgatacaatttttttagaaaaaaaactaaggaaagttgcttaaaaatcatattaacctattttttatgtatttttagttaatatttaattaatcatactctaatccatagctcttttacttgctagggaaggtttccaaccgaacacaaccttattcatttctctaagtgtaaaaaaagtgacaataaaaaaaaagaaacgtcttaatgtcactgtatggccaatgcaggccacctcacgccacacgctgtatcgcgcccatagtttagcgtggtttaggtggtggcccatagtatacaacgtcatacaaaaagcttccgtacccgggccgcttccggatccggcccataccgggcccatcaacggggccaccgtcatagagcgcgcaagaggcgtgacgtgtcccgtcgcgtcgcgggccaagtcagatatttccggtgcgcggtgcgcccacctcgctcgtataaagccctcccctagttgcccctcttcgaactttcggcatccgctgctgttttctcttccgctttttcctctctctctcgcctcgcctctgcttcctcctcccgttcgtctcccctacctacctagggtttctcgccgcctcgcatcccctcctcctcctcggctggttcgcctcctactctacgcttgctgctgcaggtgagcatccccccgatcccgtctattcgtcttcgcgcgcgcgcttccgctgccgatttgctcgatccagttcgttttgacgggcgattgctcttgtttttgggaggaattccggttgtttttttgtttcgagggcgtttgcttggagttggcggtgtcggcggtgctgcttgcttgttgaatctattggtgaggtgttttgagatttggagctgcttccgctaggttgcatgcgggctatgtagatttggtcgattcgtagggtttccgcggggggattggccgcggattggaaaggaatcacggtttagggtagggttctcccgcttaatcgtgtgggagacgtacctcgtttcgtggcttcgattcacgagtttatatggggtttccccgcttgcatgctgctcttatcgtcgtatctgagatgattgcgttagtttggtgtgattgctgcccgttggtactgtttttgtgttgaatacgttttctaaccgatgagatctactggttaatgttaatgcaagtgtagtcaatttactttgtgctgtaagtagattatgattccctgtccacattactagttggagattggttttggtgctgtttactgagtaatttgcttagcatagttgtagctaccagagctcttagcaaaaatctgccaatgctacgaaatatgataattcccactcggctctttgcctctgttagctttagtgcttctttattgtggattttaagcttcattttaatttctggatgatgtttatagagacataatttggattgtttcatatatgttttcatacaatctccagtaatttgactgcagttacatgttgtgttagccttatttgtttgccacttaccaaaggcttaccaaaggattgacaagaaaaaaaattgatagttgttcatttagttgatattctgtattgttgccgctgaagcacctttcttttttgttcccagatgtcacattatgtttgtattgacttgctttatgtatctgttatctccaggtacaagcgataagcagtagcttcttcatcaaaggttttgtgcaaaattatgcgatcttcatgggctgattcagttgcgaacgccgaggaatcggcgcccgcgactggtgctgctcccacccctgttgctaatcaccagaactcacgccccactcgcagcgcatacgtgcctcctcacctccgtggccaggcaccaaccacaactgcagctccagctccagctccaggaccagctgctgtccagccctcagcttctgtacagccttctggttacgcagctattgttggtggctctcgctgggctggccctgccagtggtgatggtactggcgctgtaggtggcccacgccagagcgttggtggtcgtggtgggggtgggggtgggggtgggggttggaactcccgccctgggtgggaccggagagaccgtgaacctaacccttttgccaatagcgaggcagaggaagccacagaggttgattttgatacggcaaacactggcatcaactttgatgcctatgaggacattcctgtggaaacaagtggccatgatgtgccaccgccagtcaatactttcgcagagattgatttgggtgatgcgctgaatgagaacatacggaggtgcaaatatgtgaaacctacgccagtgcagcggtatgccattccaatctccattgcagggcgggatctcatggcttgtgctcagacagggtctggaaagacagccgccttttgtttccctatcattagtgggattatgagctctaggccaccacagaggccaaggggatcgaggactgcataccctcttgcattgattttatcccccactcgcgaattatcagtccaagtacgttttccactccttttttggtttggggtggggcatggggctgtccttattgttgcattgtttcttactatatacttttctgtttcagattcatgaagaagcaaggaaattcgcataccagactggtgttagggtggttgttgcgtatggtggagcaccaatacatcaacaggtttttctcgcagccttatttatttccgcataatgatggatcaatcaaccttggagctttgctgtttggtctgctgatttcctttgtaccttaaaagagatcattatattgtgttgtgcatatgagccccccttccattcatgtgcactctagccccaaattgtaaccttgctcaataatgtataacgaaagctcgcaggtctctaggcattctagaaaggttatgatagccatcctattttgtttgtgggtgctataaatctaacaagtgatctttgctgctggctgcatacatgctgtaatgtggaagagacattattaattatatgaatgtctttccaaatcattggacttgtgaccataccgtgctaaaaattgactggagctctcataacatagatatgcgagctatcttaactatgtatatggtgatagatgattgaagtatgtaggcccagaaaaatagtcatgcatctgtttaggcaatcatatcatgaccaaatattattagctttggtaagctagcctagaaagtaaacagccatcctttgcatagtgacgtgcatagctattgaacacacgctttatctgttattgcagttgagggaattggaaaggggcgttgaaatccttgtggcaactcctggtcggttgatggatctgctggagagggctagagtatcactgcaaatggtgaagtacttagctcttgatgaagctgatcgaatgcttgacatggggttcgagccgcaaattcgtaaaattgttgagcagatggacatgccccctcgcggtgtgaggcagacaatgttgtttagtgctacttttccaaaagaaatacaggtatgttttctactttaaacttcctgctttgataatatccatcagcatatgatgtatttaacgattttattggcagtcctgcaatttagtcaatttatacctgtccaatagttggttgtgtgtttttatcaaacgtgtattccaaagtaaaaaaatcagatctattactatagtggtctatctacctacatttaagaaagatcacatgcaacatgtttcaggggtattgttttccaaatattgtgtggtagaatttgatcggaaaaattgtaggcacaaatgcctacagtaaaatactgcgataatctatatgcagtcatctggttagataatcttatatttttcttgatgcaaatctcctttgcccccttgcagcgcatggcttcagatttccttgcggactacatcttccttgctgtaggaagagttggttcaagtactgacttgattgctcaaagggtagagtttgtccttgaagcggataaaagaagttacctcatggatctcctccatgcccaaaaagcgaatggtactcatgggaaggtattgatgcatcaatagttcttgatgtaatttactttatgatatcatgaacatttattcactagactaatgaaagctactcttaaggaagataggttcagctcaaactgtgatcaattatgaatctttatgaataggagtattgttccaccagctcatgttttcatcttgtttgcagcaagcgcttactctggtctttgtggagacaaagaggggagctgatgctttggagaactggctttacacaaacgggttccctgcaacaagtattcatggcgaccgaacacaacaggtacgccaatctgtggatgaccttgcactatatgacatgggcatttcaattattttctgatttatctgtgcatatcataattggattttagggaaataaaaagaacttcaatgctccaacaaggcaaaaacaaatgcatgttactaccatacttgatatgtataattttacaaatggaagtgatagctcatcactcgtctaaaacaatgcagtgataaagctatcttatatagagaaaattggaaccatgccattataatttgtagaaaaaagttataacatattcaacctaaaataaatttattatgaaaacatattcaattattgatttaattgcttccagtttaatcaagtttgtagaaaaaagttataacatattcaacataaatggttggcattctttatgttttgtttcaataattcagactgagcagcatgatgcttgtttctgatgtcacataggcacatgtatggcaccttgttgatgccttaggtctgctgaaatgtaacatctttgttatctctgtatgcttggtattcccaggaaagagagtacgcgcttagatcattcaagagtggagcaacacccatccttgttgcgactgatgtagctgcccgtggacttgacatacctcatgttgcccatgtcatcaattttgacctcccaaatgacatagatgactatgttcatcgtatcggacgaacaggacgagcagggaagtctggcttggcaactgcatttttcaacgagggcaatctatccctggcgaggccgttatgtgagctaatgcaggaagcaaaccaggaggttcctcaatggcttgaacgatactcggcccgttcttcgttcggaggtggtggtggcagaaaccgccgatcaggcggtgcccgttttggtggccgtgacttccgccgcgacaataggggtggaggcggcggcggttatggtggtggcggtggtggctatggaggcggcggttatggagggggcggtggatatggcggtggctatggtggtggtcaaggctcaactagttcgtgggactgatactgattcccggctgtcgcgagcaacgatcatattctattgatttccctgaaaacatctgatgtgttgggatttgtaatcagcctggttggcatggtgctggaaaatgcgcccgtttaccttcaatttatggatggttgttactgcactggctttctcgtttactggcaatagtcttggttggctgattcacctgtccttttcagttgattgtttcgcgtagtttactagtttcggacgaggcattactggccagatgttttttttcttttgtttattaatgttctttcatttttgaccggaatacttctatactagttttggcacatttgcattgttacgcagaagtgattaacattcgacggtgttacatatggtatggataaacatacatgtttttcatcaggcaggtgagagccaagataaatggatactgcatataatgaataaacaaaagaatgtcgccgggaaaataaacactcgcatgatcttaaattacatcaatataacacaagctaacaaaaccacagctatcttcattatcgaacaaattcttttttgccccattctacccaaaattttgcaagaaacaacccgcattcttataaaccatgaaaaggtttagggtgaacagataggtgaagagatccaacttcatagaagtacagtctattcttgcagtcagtcagtacttataattgctgcatgtgctttggagttggcgctgataataaatctggatatcaaattcacttcatgatcaaatgcagcaggcccttccctgtttcaaattttaaaacgaaatagaacaggtaaaattgttgaaaccatttgacatacctgatgcgcatagattgtctagttgagggcaatggaccacctaggacgaatcacttggcatatatcatgcccaaaacaatagccaccaacagaagtacaaccattatctgagcaagtcacagaaacagtttgagaaagataaatagaaacagaatcactaaaaggatttaaggtttatatattattctcaccagcatggagttgtactttgacttctccaaatcgtatcccctgcataattaagatgatcggtagggatgagaaatgccaacagaaataaatggaacactaaatcagaatcaaccaacaaaccttctctttagtgagcaagatgacttgcaggttctctttatcgcatcaacacgtttccgcgttagggaagcatttggatcattattatcaatctggacatgtgggtaaaacatcatacactcttgagcaggacaactaaggtagcctttgaaggccagaaataacagtgcacatcctatatttgctgtttagaacattctgctgaagactaaaataatttcatgatccttaaatcaacacaacatttaatgcaaaagtggctcaaagaacaagttcaaaagaaatgtttacatattaacaaaaaataattatactgagtgaagatttttgtgcaatacaattgatggatagcaatctattgtaaaaaatgaaatatttgagtgtcttattatctatatggaagaaatgagcgacagccaccctacattcatggtagcaaagatcatggtccttaccttcgattctatcagcgaagagaactcatagaaagcagtatagacatctgacattgtgtttgtctcatcaattactcgtgcagtgagccctgagagaacatgttaatttcctgaggtgagagaacataaaggtaactagagactggagcagatgtacttagtttataatagataaaggtgacaaaacaaaataaagttgcttaaggaaattattactactatgcaaattcagtgataaatatatataaattatagttgcaccttctgctaactaaattatagctgttctactgagatatggagccatgtgcccaaaaaacaaagcatacaataattctaaagatactcatctagtcatcttactcaacaaatcaccattctttgtctaaaccaaaagggacaaagaaatgccagcaatgaagtggtgaaatcttatgatacactaatcaacaaaactgacacaagttacaatgatgccaacttgtgacaatgaacacaggagcactccattgtgtaaccaataggattattgttgcacattgatcaatttctgacaactgagtaaataaatacaattactcttaaattaaccatacaaaagaagagaaccggatagcctatccatattgaattccattaagcaaactctgacaaggtggtcatggagataaaataactattctcctcaaagtaaagagaggttactgcaatttgaatttacttagtatgtcttatgtaatcttaccacgcctcatcttaacaactcctctaaagacattcacattattgtagcaaatagcacatgtcccaattgccattatctgaaaagatggaatgatgtattagtatcctaaagtttgttccaaaataatacataccaaacatattacaagaatagaagtgtataatactcaaacacaaaatgttaggtcaattaacagcttcaaccaacgaggaatgctacccaactgccaacaaatatcaactatcattggcccaagatttagcatgtcaacagtgatcaaacatgaactaataaacaaaccaattcaaatagctggctcctctttaccacagatatggtacaaagatttgctatagcagtaaattactgtgagtctgtgacgccccagaataattaggaaaaaaatagagatgaaggggaaaagatagagaagaagagcaagtaagcaggcagcaatgagcaagctagttagcgtaggcgcaagtgagcagcaagcagaacagccatctggccttgggccacatgtgagcacagcagcaatagcgctagctagtaaacacgacagcaaatgcaggagcaggagcaggagcagcagcagcagcaagcaagcctgtagctagttttttagattgcctcattattgccgcgacaacagcctagttcttcacattcaccgagcaatgcatgcagtcattgaattacagaaaaataaaggtatgcatttctgtgtattagctaaagcgttgtgggcagagggctccgctacttcattcaggggggctagcctcatgacttcactggacgaggggtactacttggaatatagataggccccattctgattcgtgcgtaattaatgtgatgattccatgaatctcagaaaaggtaggggtcaaggacctagcctaactatttctaatggtacaaccctacttcgagaaagcctgtcttactgcatctcgatctatatgaaagagcactggtattttctttcggtttcatcgatagcagaagagtacgctagctagcatagcctgaaaacgcttgctcagtaccacctcggctagctggctccatgtgcaccagcttataagtagtagtctggtagaataaattcccggttaaccgtcactcagatgtgtggttcaagtagatgagttgggcttagatccatacctggaccctaggcattacaatcagcattacatacaggtattttaaaaaaaagagtaaaatttcctagacgtgtacactagcaataggtgtacactagcaatagcttaactaaacttcatggccaatataaaagttatcattatatactgcaagcaagcacaagagaatatcataaactgttaatatttgacacagactggcacaatttgcattggttcaaaaatttggtactataaaagattaacatatacctgaggtattgcacaaaaacggaaaatggcatgatccttcaatgctgacatgtattggaggcagtcttcagcatgagacagagcgttagtcaccatatcattcaaacactgaactgccttttctgaattttcctcgtatttcaaatcctgattttataaaaaaatgtgtattattacacacagaaaatagataaaactgtagtggactttccagcataataaatgaatttatattatttggttattgacagttggatttaacacttcaaatggcatctcttgtcaattgtggtgacaatttaatcatttcgaataaatttaaagctacttcctccgtcccgaatacttgtcccaaaatagttgtcactttaaaatactacttgtcatatcaaccacttccaattcaaatttctccccattatacccccaaccatcattccacatccaactatgcattattaattaaggggtattatagtctttgtcttcaaaccttagtacatgccaaataacgtagaacgacaagtattttgggacggaggtag

SEQ ID NO: 23666 - DNA, 1783 bp, Oryza sativa
tcctgtgagactacaaatggccacaaggtagataacatctttcatatggaggaaaccaaaagtacaaccacttactgataggacagccaaaaactggacatggaactgaaaagaaggcataaaagcatgtcaaggttgcatgaagcatatgaccatctgttatagcctttggtcatcacttgaataccagtaaaaacatttgttcttttaagcacgatatatagtggccactggctattcactagataccttaggacttaggaatagcgtggaaaagtatatggacacaagcacacaggcttttgtcattctctttggtcaaaattcacagtaacactcctaccaagcatgaagttaccgaaacacaccatggactgtaccctattttttgagccagaaaagaatatgcacggatagtaccatatacagggcagacatttctaataagtgatgagacataggccttaccatctactgctgatatggaaaccagaaaaaaaaaaagagtacaaggtcatcgcctcacactaaaattaaatactggtttttgaataaaatgaccttgtgatctccttatgttaagaacattgcaccaaaacatttatttcaaaattatgtttgcttagatgttttgatggctatattaacaacatacctccttgcagataaattttgccattcctgctcccattagcctagtgatttcttcaattgcctcttgataactaagaaagaaaagagtatatcagaatattgagtgatgcaagtatccggggatatgggcaaccaaagtaaaatgcaattttacattcagaaacggctgaacacatgctctccgttattccaacaaaatttggtctgctcctcgtcgaaataatataaatatgaccaaatataatcgagtgtgaagaatacttaacattaacaggattgaagaagttctaacaaaaacaatcaaaagaacacggttcatagggttcacgaatataactgccgttcaagtttgtgtagtcccctgtttttctgtaggatgcttgtttgctaattcatagcaattatcatcgtacaaatcatcttactgtgtaaatatcatgatcagctttttatttcaccatttgagtctgaccatgcaggatggtttctcagctagctactactaccaagtgaacgccacattatgtagaaaagtcttgaagtagtttcatggatatgaatatctggactgacgcgtccaaagaatttgagactacgccaatatacaatttgagaaatggcatgcgtccaaagaatttgagaaaacgccaatatatgagaagcctcaaagatgtcaagtcgcgaagtactaggaaccaagaaaagtcagacaaggaaaacattcagaagactcggaactgaatttacccttgaccaagctccaagaaagccgtggagacaaggcgaaacttatccatcagtaatttgtagtcttttgttccacctgcaaggtcacatcaaaccaatcaaactccgattaacaaaacacaaaaaagccgccatcctgctcagcctgagaacagcatatttagtggagcgataccgtacatgaataatgccagtcgcggttgtagatatgccgatggaattccttaaggatcggcaccttcaccgcggcaggaatgctagtgtcgtcctctgcacgcacccatgaaaaaaaaaaacatagtatgtaagtcgataaaggaaaacacaaaaaccatgggtaattcaataattcaaaaggcgccacaaaccactttgtttgaaa

SEQ ID NO: 23667 - DNA, 38607 bp, Oryza sativa
  unsure (1)..(38607): unsure at all n locations
aaccagctggactccacgtggagcggagatgggggtgtgggcggtggggccacggccgacagtcgcgtcagggtttcgtcgttttgtttccagagggatcgggtgtctttcagtgtttgggttttcactttttcttcttacagaaaaagaaaatgtttgtacactatttatgccgttggttttataaagtcaaagaatatcacattgctggtctatcacggtatagggcttgcacgcttgtagtgctggctgctgggcgtggctgcattttagcgatagtactaacaagtctagcataaatttttatgttgtacaatctggctcatcctcaacatatttacaaacgaaaaaataatactccctccgttttagattgtaaaactttctagtattgctcatatttatttagaagttaatgattatatatatatatatgagaaaagtgtacaggcggtccttaaacttgtaagtgtatgtcatctaggtccctaaactatcaaaatgcatatccaagtcccagaacttgttatagtgtgttatctaggtcccaaatcgacacaaccccttcaggatcctacgtggcattgatgtagcatgctacacggacatgacatggtattattttgactgataaatgggacccatttaagttttttcctttttctttttcttctcttttttcccctttcttctcctttctttgtgacccatgcagaaaaaaaaggaaaaaaagaagtatgagaagaaaccgaaaaagaaaagaagaagaagaaaaaaaaaggacacgtcacgtccatgtggcattgccacgtcagcgccacgtaggattctagaggggatgtgtcaatttgtcactttgacaagttctggatctggatatgtattttgagagtttagggacctatatgacacaaccctacaagtttaaggaccgccaatacactttactatatatatatatatatatatatatatatatatatatatatatatatatatatatatatatatatataaagtcttacattgtgaaacagaggaagtatgtgaataaaacttttctatacatgtgaaaaataaactttgattaaaaaaatcccaaatttacctttaattttaaggttgaaaatttattttttttataagcataagtataaacaaaaagataagacctttcgaagctaaggttaatattttaattagaggatgtagttactataatagtagtggtccagcaaattaagtatacatataataaattgagtgtgatccaactataaactatcgaataaattgccatgaccaaactcttgtttttagtcatgtagccttaaattcgacccgcatcatgcagatccagctgactggaacctaaggccatgtacaacgcatgaccctagcctgtggtctcgcaggtccacgtcggagctgagccgagctgtcatgagtttgggtggtctcgcaggctgtcagtgagcttgtagagaaactggtgcaagcgtcgcgcttgggctcgggagctgcaaagccacaggccgaagcttcgtgttggaggagtcggagccccgcacgttgcctcatccggtccccccgtgccgtggtcgtcgtcgcctcacaagatctgccgcagccgccgtggttgtcgtcgctgctccccgccgccgccagatccgccgtcgccgcttcgccgtcttcgctgctccctgccgacggatccgccaccgccgccgccgcttccctgccgtcggttccggcgagcccgcgcctggatccggcaagctcgccgtcgccaagcttgtgtccacgccatcgtgggtggaggaggacggcaacgtcgaggaatcaccgccgcgttgtggccaccgccgctagatccggtgagcccacgcccggatccggcgagcgcgccgtcgtggggggaggaagacggtggcgtcaagccagccgccctcaccgctgctccccgccgctgccaccgctgctccccgctgccgccgccaccgctgctcctcgctgccgctagatccgccgccgccaaagctcgagcgacgccgatctgccgccggagtggtgggtggcgaggggaggaggggagaggaaagagcgtcggtggagaagaagtcgaagagagagaggagagtggaataaaaaagagagggggatgggaagaggctgacagtgggtcccaagttgtttaggggtatacatatacttcttttggttactatagggttcaaaatataaagtttcaataggtttgataatacaagggctgacatataaatagataggggctgacatgcaaaaacgttttggagtggctttcactgtgggtagtgtgacctttgtgtggttctatcctacgtggcgtcttgagccatagttacttgtggctaccattgtacatgccctaagggaagagatccttcgagtgaaacagctaaagtgattgacagttggccgcgaaaacaacaagggagaaaatggtttaaactaaaaattagaaatagttcgcatggcttaaatgcgtgggccgaggccttatctcatctcgaagccatcagcccactccgtcgtcttcacatgggcctccgttttgctttgtgctcacgtcgtcttcaaacgggctgggcgggccgcttgtatcttgagttgctgaacaaaagagaatagggacatttacaattttaccactatttttttcacttttacaagtatgtcactcgaataacagttctggtgatattttttaatacttcggtggtagccttacaataattattcaaacttctaatagcgtcccataaatagagattacacttatactctctctgtcaaaaaaagaatccaatcttcgagatgaatctggacacaatatatgctcatatttattcttagaattggatttttatgagatagagaggagtatatttgagtggtgagaaattgtaatagcagcccataaactgacaaacagagataggggactgctaatgcgcgggtgatcgctgggaacgatcacccgcacccgctccccctatacgtacgtccctcttctccccctctcttccctactacagtaaaccacaattttttttaaaaaaaaataaaagttagaaaaatttatgtaaagaaatactatatataaaaaatttgaattcaaattcaaatttgaatcgggtatataaacttttgacttacaaactttgggtctataaactttaggtgtataaactttagatgcatagaaatactatatatagaaaatatttgaattcaaattcaaatttgaatcggatataattcaaattcaaatttgaaactggtatataaacttttgacttataaactttaggtctataaactttaggtgtataaactttagagtatagaaatactatatataaaaaaatatttgaattcaaatttaaatttgaatcggatatataaacttttgacttataaacttttggtctctaaactttatatatgtaaacttgaggtatataaactttaggtgtataaatttactaaaataggaaagtaatgcggtaccaaaaaaaggaaaccaggtggagggagggaggggggaggtgatcgccaccccatccccagggcgatcgatcgcccaacagcatttccgacagagataacatttccatctatgattgacgagagtatgaataatcattgtttctgcgcagtgacttgtaagttagactgcttcctccagttttaactacctgtcaatgttgatcaatataatttcagcttggatcatcaacaaattttgattggtcagatcataacgtgataagtatttcaacccaaaaattggtagtcctacatgttattgagatatcgatggtatatctcaaactttgcaaaattataatagcatggttccaatttaaaaaaaaaaaagctacagtacacttatttgccgtgagactacatcacgagacaaatttatagctacaattatcattgtactcaaaagttgttgcgacttgatcacatcccagatgatgtttacttgggagccaacaaggatttctagaattttaaaatccgcgcacgaggagcgcgagctgcaacgttgcaccttagaatgacgcgcgacaaagctgaaagctccttaaaattatggacgcccacgacacacacggacacgcgttgctacctcgccattggagaaccagtttgctctagctgctccggccgcgacgccgccgttgcaccggccggcacgatgggagacggcggcggcggcgggctcgacgtggtggtgttcccgtggctggcgttcgggcacatgatcccctacctcgagctgtccaagaggctggcggcgaggggccacgacgtcacgttcgtctccacgccgcggaacgtgtccaggctcccgccggtgccggcgggcttgtctgcgcgtctccggttcgtgtcgctgccgatgccgccggtggacgggctgccggagggagccgagtcgacggccgacgtgccgccggggaacgacgagctcatcaagaaggcgtgcgacggcctcgccgccccgttcgccgcgttcatggcggatctcgtcgccgccggtgggaggaagccggattggatcataatcgacttcgcctaccactggctcccgcccatcgccgccgagcacaatgtacgcacgcgcgctcgcacgtttcagtatttttgtctgagtatttgatcgaacacctggcgcgcgcgcgcatggcggtcatgcaggtgccgtgcgccgtgttcctgatcgtgcaggccgcggcgatcgcgtttctggggccgaggtgggcgaacgccgcgcacccgcgcgcgccgctggacttcaccgcgccgccgaggtggttccctccaccttccgccatggcgtaccgccgcaacgaggcgaggtgggtcgtcggcgccttccggcccaacgcctccggcgtgtccgacattgagcgcatgtggcgcaccatcgagagctgccgcttcaccatctaccggagctgcgacgaggtcgagcctggggtgctagccctcctcatcgacctcttccgtcggcccgccgtcccagccgggatccttctgacgccgccgcccgacctcgccgccgccgacgacgacgacgtcgacggcggaagctcagctgaccgtgccgagacgctccggtggctcgacgagcagccgaccaagtcggtcatctacgtggcgctggggagcgaggcgccggtgacggcaaagaacctgcaggtaggggtgcaagtaggcttgtcaacgaacccgtttaaagacaaaattagtgtatagcctatgggtttgacttgcggatgatctattaattttatatatcaacccacttatatatcttagatgtgacaagataagccactacatgaaaacctataaattattatttatttgacctataattgaattcgctggtcaacctgcttgcattgctacctgcaggagctcgcactggggctggagctcgctggcgtgcgcttcctgtgggcgctccggaaaccggcggcgggaacgctgagccacgcctccgccgccgacgccgacgagctcctccccgacgggttcgaggagcggacgcgcgggcgcggcgtggtgtggacggggtgggtgccgcaggtggaggtgctcgcgcacgccgcggtgggcgcgttcctgacgcactgcggctggggctccaccatcgagagcctcgtgttcggccacccgctggtgatgctgccgttcgtcgtcgaccagggcctcgtcgcgcgggcgatggcggagaggggcgtcggcgtggaggtcgccagggaggacgacgacgagggctcgttcggccggcacgacgtcgccgcggcggtgcggcgcgtcatggtggaggatgaacgcaaggtgttcggcgaaaacgccaggaaaatgaaggaagcggttggggatcagcgacggcaggagcagtacttcgacgagctggtggagcgcctccacaccggaggaggggagatcaatgacgaaaaatactgttaaaatgcgtgttaattctgtggtgaataataagagcctgataacattgtcaagcctaatatgagatgtttatattacactgtggacgtacacgcatgtacaccatacattggcaataataagattgtcaaagcagcaaggtttgcatgggatgttttttttttttgaattgcatggaagatgcacaagtgcacacactatatatgcaacatcacaccaaaatatcaccaaagatgtttcctaacacacactcaaagagacataaaccgctaaaatcttgttgacatcatactagcgtgtacgtaatatctgtggttaccaggatttaaatcctggtgattaaagtcaaccacccaccatttcaccattatattaatggtgtttcccctagcatgagatattttccctcttattttctcttttgtgcagatgttgccacatttaattttataaaagtaatcaaattttaaatatctgacttaacaaatgtaaaacgccttatgatataaaataaatgaagtataaagaattattttattgtatttgaaaaaaaaatcctcccaagatatgagggcctgctctgctggcccatggtatgtgaaaatggaatggagaagcattctatttcactaccgtgttttatgtagtgtcatttcttgttttcaaaaaatatggattgggaaggtgtaacagagatgcatccatggtttgaaggtgccataaaatgttggagattaaaagccaaacagaggcagaataggcaatgcatacacccttcgttctaaaaataacttctgatgataaatctagataaagtgtccctataagtagatcttttttttttacggagaagacttatattaaacgacccatgagcaaagatctgattattagacattgaatcggttatgaagtgtaatgttcaagaaatgacaaactgcagatgcgtcatcgtagcacatagtacctctgtcgcaaaaatacaagcgtaagtgattcatcataccgtagaacaaaaaagagttcagcgcaacaaagaaaaaagatacttcggcatacaaatctgaaagaacaaatcctttttagagctaaccattttgatacattggcatgataataatacaccgagacaaactcacaaacacataccccgcagaaaatcagctcaaccatgcagcccccacccaaacgtgctgtccaggcaccaaaatcttcctactgaaccaaacttataaataagataaaaaagaggtctacttcggagaaacctcagaacacggtaaacatggaaaatatagcacggtagcaaactaatcttcgtccattccaggctgagcatctctccttggccctcctgctggctttgccatgatgatctgcataattcatgtgcacaagcattagcatatgggaatgatgaaacgatttcacttcatttttaacacagccaacagtacaagattgctcttacctggtcaacccgcagtacagtacatgcagcatccgcagagtattttagagcgaataacctgatgagagaaaagaacacacatgatatgaggttggccaacttgcttaagtctcgccagtaaacatgcaaataataaaaaaaatgaatacatgggtatcacgaaaagtaaaaaacagcgtgcttcccatacagtacgtgcacctattatgccatactggaaggttatggcatatgacttactttgtaacataaaggtcccatattttcatgattgagacatccttgcaaccaccttcttccaagtcaataccaactttcgtattcccaccagcatgttcagcataaagggaagatattatctccatagcactaagcccagcattttcagccagggttcttggaaccatttcaaaactttcagcaaattttgcaatggcatactggtccaacctgcataattgttaactatcaatataggaagcaaaaagcaacaatgtatatactaaggacaatgaacatcataaaccaaggtacataaacagatgctcatgaatcaaatgtatcaggcatactgacgtataaaactctagaaaactacaagcgaattcattttttttaaaaaaaatccagatgggttaggcagtatggacacctcaatatataagtaagctgcacctggacttcagatagtttaattcaaatattacaggagaacattagcaatagggcttattatatttattgacagtcgactggaaacaacaaaagtttgtcagaccaaaagtagtaaaaaatggaacatatttttatcatcatgttccacacatgaaaattttgtctaacaaatatacttaccctgtttccttcagagaaaattccttcaatctccttgccaattctatttctgttgcagcagctccaggaataatccgactatccctgcacattgactgtataaacaccaacagtcaggtaacctgttagctaattaaataagagtagcatgtatgttccaaaacaatgacaggaagttgatttacagtcataccttgtaagtattcacaccatcatcaacagctctttcaagatcatccaatatactatcggtgctgcctcttaagacaaccgtagccactgagtttccaccttcttcattcttgacaacagttacctataaagaattaaacgtggtaagaagaatgaagtcatgtctattggaaaggaacagaggcatgaaacatactcgggcaccaccgatctcttccaccgaaacagagtctgcatatcctaattcatccgcatttggtcggctgagtttcaactgtttttgaaagagcacatgcatcagcatatacatactactgtgcaattgaacaaaagcttgagatcagaacttacaagtgcaatggaccctgtagtacggcaaaatcttctcagttcaaattttgaactgattctaagaaccattagcctgcaaataaatagaatggtaagtactactgtaaaacagaacctaatcataatcattacagtgacccaactttgagacacctttcaacatcaacattagaacttccatctgaggatttcagttgagtagagtatttataatattttcagttttgagatgtaaataagaagttgcaaaaaagaagaagagagaattatataacatatcaagcccattcacataagatgcaaagaactgacttgtaacgctcacagaaatgcagtgccatgtcgccaactgctgctccactgacaataacctttgcacccgagtcagcaacagctttgataagctcctccaccttagcttcctcagtcttagcatagttttctagctgcacaacagtacaagtatgagtgcctactctgcagaagatatttgtggaagacagtgcttttgataaactacagaagcaagaaccctgtgctggtcagaacatactaggatattgagttataattgcaactagggctcattggtattttacaacctacaaaatagattataagtggaaactagcttaatgcccatgctttgctacggataaaataaaataaaatatttttttcatgaaatgtgttaacacctttctgctattgggaatattcacttatatgtggctatccatttagatttgatgttttatcaatattaagaagttcaaggggtaatttgtatttttttaaaggcgtaaaggcacacacacggaaagaagttcaaaaaataaacaaaagaaagcaaaataataattagaagataacactgtaatggattagtctataaatgagaatgggtaatataatagaacacataacttgaaagttgaaactcgaactatactaactgcagtaaaacgttcgtgataattaggccaaaaaacgatgtttctttattaagaacatacctgctcagcagaatgtatcaaaacagttcccttggtttcagttgcagaagtatcaacaccgccagcaaatactgcaatctgattgatttagaaattagagcagatattgaccggcattgtatagagaagatcatgtaacttggattggctaagactacaatgtgcatacagtgcatgaatacatgaataggtctacaaggttgcagtttattgtaatgtaggtgtacagcttctaattgaccatgtaccatatgtaagattattgagcacatcaacaaaaaaactgtaaaaatgccacaggtattctaaagaaggtttgctactactatgccatatacaaggaaagaagaatgttatcatgcaattcctaattaagccatatgatcataactaggtggagaccaattgaagactgactaccaaattttagaaccctgctaccttcaaagcttgttagcaagatatattccattaaatgtaaccaccaagcaagccttgagaaaatcctttacatcatcagtgtgaaatgacaaagaaaaataagtatcatatctcaaatcaaaatttcaaaaagatgaattatttagttattactatcgattttatggtgggaagctacaaagaatagaataacaaatatttgatcccaagtgatgatatgcttcatccatgaaagggatgagaaaggaaaatatatgttaacaccacctaatgtatgatagtatacagtgtggaaacagccctcactataaaagcatgacagtatcatcaatcgaaaatagataatgtatcaacagactgccaaaagacacaccaccaattaagtgtaacatttagttgtcacctttgccttctccacccttttgatgctcccaacagcgtcatttttcagaaccatcccccggactacagaagagttgtgcaaaccacctccaagtagtttcgcaactctaacattgtcaacgttgaagttagcaggatttttcgggcagacttgcatacaggcctgaaaatccatggtaaaaaaccagctattagttgttaagaaatgagctccctctcacataagatggtaagaattgtcttacatcagccacaagagggcacaatatatcctcctgaccgaattgcttgctcgcaactgcagatctcatcagcaacacaacctcctccttgttcctcacatccatgttctctgaacctttctccacaagatcttccaagatctcaacagtctgcgcattgcagatgcaaatgcatgaataactagcctgccatcaggcaacaggtttttttaatcaatataaggccagctcaatcgggagggtaagtaaccttattaatggccttggtgtagccaatgatgatctcacttggatgcaaccccatcctgataagctcctcggccttctcaagcagttcaccagcaaaagatatggtgaggttagctccatcaccgatttcctcctgctgagccctgccagctagtaccaggatcttagcagcagggtgctggacctcgagctcattcacaattgttgcagcatcgttcgtgacaaagagcttgtcgagatggttaatgaccatcttattcattcctaccaaaacaaaacagcgatgctgttaagaaactagcttctgatactaacatgaatctgtcagatattatacatcacagaaaaatgtagcgcaggagcatgtttactgctggcctctaacaataaatcgctgaaaaattaactgaactcaacctaaaaccgcaagacaggcaccacaattttttagtgtccaaaagatccacaacttttctctgcaccattaaattagctaaatgtgaaacactactaacgacttcatcacaatactgtcttcaacctcattacctaagggttgaacaaacaaaagctcatcttttctgcagctaaataattaacacactgtggatgcagcaacaagggccatagcctaaccatttctaccgtaccaccacatcacgcgcgcgacactccccagatttgatatatcgatcgagtccgccgtggcacatcgctagatcccaaacttctcggatcaaaacgcgggcaacgaagacgccggagcacagagcggggaaggagagggaagggggcctcaccgttggggccgagggaggtgcgggtgatggcggagagctcgcggcaggcgtcgatgttcttgaggacggcctcatcgaggccggagaggtgcttgtgcccctccttgagcatggactggatcccgtaccccggcatcgcgcccagccccaccatcgtcggcggcggatgagatcggtgacggccgcggaggaggaggagaaggaggcggcggcggcggcggcggcgaagcggatcaaaaaccctagtgtgggcgggcgatgcgcgagtgttggggagaagggaaaagggaggagggagaagggagaggccggcgagttctagaaccagcaggttacctgtgggcctgcattttgggccaagcctactaggcccaaatatcctcgaactgtaggcccgaaagctaaatggactgaaatggaagtgatagagctgaaagttaggtaaaaataggcttaaaacagggaagacagattctaatcacccaagtggatgtctatctgtttattgcatgataaataaatagttataaaaagttaaaaataacataatagatcaatatgtaatatatcactctataaattacaacttgtagaagttgaattttaacttggatgtttatggagttacatattacatattgatcgtcatttttttcaaatttcttaataactatttagattacgtattaaacgagtggacatccacttgggtgattaaaagagtttcccttgaacaggcccaaaagtgaataatgtaggcttggagcaaagctggtttttgaaaccagtgggctaaaactagttttttaaactaggtacatggcctgtttagaagagctctagctccaaacttcactttagaggtggagctaggggctttaggttgttccacaattttactttaggttcaggttttgttcgagcgatcttttgttcgacatttgctacatgtgtatgagaattcatcaaattcgaaatgatcaaatgcacttttatttattcacgtgccaaatatatacaggcaaatatcgtatcagaatatcaaccgagaagcaacggtatttacgggaataaacatatattccacgtaggagtactatatctttgttatctaggacagctgggcaaatagaagtttcatcagccatggcggatgatcaagacttctagaacttggacttgaggagcttgatgatcttggcgtccacctggaagctcttggcgaggacggcgtcgggtatctccgggtcggagccgaacagcgtcgacccggcggccacgacgccgggcatctggctgttgaacgccgtgatgacctgggcggcgacgccgccgacgttgtactggaagtggatcatcccgcgcggcacgacgaacgtctccccctcgccgagcaccttggagtagaactcccccgccgtgctcacgaacccggcgagcaccctcccagcgacgacgtggatcagctcggtggcgcgcgggtggctgtgcagcgggttgacgccgccgggggcaaggtcgacgcggccgatggagacgccgagcgtgttcagccccgggaacgtctccgcgttcgccgccgtcacgttgaacccgaaccggttgtccgtgtcgctggcgacggcgaggccggcgaagaagaagtcgtcggagacgaccgtggacgccggcttgcacgggaagcccgggtaggccgggcacgccgccgccgcggcgtcgccggcgcgggggacgacggccacgcagaagtcctgcaccggctcagggtcggcgatgcaggtggaggctagcacggcgagcgccgccgacaggacgagcagtggcgccgacgatgtcctcgacatggctccggtgtgctccattggtggcgagtggtgtggtgcaaatgcaatgttatataggacgtgaggaaggataaatatttggaggactttgaactgtctgaatctttgaagggtaaagggtttaaactttaaaagtcctctctgttagtgcagtactactgattacagatgatgagatgagtactctgacttaccgtgcaaaaaatgactactcagcttgagagattgacaaatctttgggtggtaattccgtctataattaaccatcatttcgctgcattagttgctatcttttagagagctgtgttaagaactaactcttcaaattgtggttggtgaaatatgagaggaactatattgagaggcaaagttttcaactatggtgatttgctcatcgagtgagttccacaagctgatccatgtactgctcctgagcccacaacttgcccttcttcctccaccataacgcgctgcacggctgcaccactgcggcgacgtcagtttcggtcgagaatgagctgttgtcatagacctctacgccgacgcctctctccggcattggcgcattgctcaacgaggccctggttactttacctatcttcactcatcatggagccgcgcgtagtctaaaaatgttatttgtcgtacatacgttctagtgcacactttcatatgaaagttttttatagaacttcttcaattaaagtatttctatgaaatatatagataaatgtttttccgggtgaaacttttgcggacaaaaaatttttggatgaaagtttttagggggaaaaaagggatttgttgggaacgcaagtgcgttaaatagtagtccccatacaatcaccaaatcaccaagaccataaattgacacatcgcatgccaccagggcataataagattataagtcatcgcaacaatattcaataatctctacgatatactatattttaaaattttagactcccgctatatgtttcgtgccaagaccttcaatttctaactacgaccttatgaatcataatccgattactaggatcatccaacgcgtactgccactttccagatcggtgaaatggccatagttgagaactttgcctcttacaaaatagtttctcacacgtttcaccaatcacgatttggagagttagagttctcaacaactatctaaaagataagtaattgatgcaacgggataatgattatacacggaattaccaccgaaagggcctgtcaatctctcactctgcgtagtcgtttttttacggtaaccatgagtagtcactagtgattaatactgcgttaacagtgagtcagagactttttttttttaacccttcaaatatttttctttcattctcgaaaaaaaaaatcctttcatcacctcttgtatagcatgaaaactctactcatcccttaaggggatatcctattcttttttcatgtcacttaaaaaatcataaaaaataaaaaaatagtgatatatcacttcacaaacatacatatttaaatttaacttataaaagtagaaacaaaaataataaatttgactataaatagaacgtgtaatacacgatcaaaattgttatctttattttgaattatataagtcagattttaacttgtatgtttgcgaaaagatatatcatatattgatctatcttgataaattttttaacttttttataactttttgaacgtcatgcacacaactagagtatgtcccatcggagggacaaaaatccacttcctatatagcattgcacccgaatatcaacctcgtcaccaatggagtgcactgaagccatgtcgaggacatcatcgtcggcgccattgctcgtcctgacgcctgacggcggtgctcgccgtgctagtctccacctgcgtcgctgaccctgagccggtgcaggatttctgcgtggccgtcgtcccctgcgccggcgacgccgcagcgggctccggcctacccgggcttcccgtgaaagccagagtccacggcggtcatctccgacgacttcttcttcgccggcaacacggagaaccggttcgggttcaacgcgacgctgggcaacgtgcaggcgttcccggggctgaacacgctcggcgtgtccatcaaccgcggcgacttcgcccccggcggcctcaacgcgctgcacagccacccacgcgccgccgagctggtgcacgtatcgtcgccggtagtatactcgtcgggttcgtgagcacggcggggaagttctctccagggtgctcggcgagggggaaaccttcgtcatcccgcgcgggatgatccacttccagtacaacgtcggcgacgtcgccgcccaggtcatcacggcgttcaacagccagctgcccggcgtcgtggccgccgcgccgtcgctgttcggctccgacccggagatacccgacgccgtcctcgccgagaactaccaggtggacgtcaagatcatcaggctcctcaagtccaagttctagaagtcttgatcatctgccatagctgaagctttgacgcgcaaaagaattgcacgtcaatttctccgttttatattataagactttatagcattgtccacattcatatatatgcataaaattattagcatctatatgaatgttgacactataaagtcttgtaatatgaaacggaggggtagaaggaaatggctgaagctttatgtacatagctatcctatattatgtgctctttgcactgatagctgtcctagattacatgtacgtacatagtgcggacctatttggcatagcttctgctccaccccttatagagctggagctcagacaaacagtttcagctacataaaaaatgggagtggagctaggtggagctctctcacaaaatgaactttagttgtggagctgggtttaggtagctccataactccactccagacctaactcctagagctaaatttaggagttggagctgtaccaaacagaccctatatggatacatgtttattccagtaaatagccttgcttctcgcttgatattatactctgatacgatatttgcccatgtatatttggcacatgaatgaataaataataaagtgcatttgattatttcaattttgaatacatattttatgaattcagaaatataacttgagaataagacatcatgttagaatgtgaggatagaaaataccatattaattgaatataaagagaaaaatagctatggcaatacatgctactattggtatatatcaaatctcattcggtttgaggtagcagttcagataggaactgtagacttttttccattggtatatgattcagacttccaaatgggcgcaggctatattctgacttgcacaccaatttcggaattttcgttgcggcccatttaggggaacagcgtactattgaactttctggcaaaagtaggcccagcccgatttgttactgtcatatgcttctccttccgccggcgtcgatggctgcttcgccgcgcgctgatgggcggcctcctcatccccgccgggatacgcctccgtttcctcctcctcgaatctctccgccgtgcaagtttgcgactctaaggcagtttatgattcctcgccgcctcctcgaatctctccgccgtgcaagtttgcgactctaaggcagtttatgattctcgccgccgcccgcggcaggggaaggattccgatcaccggcggagaaccaagcatggcgccgccgcggccgcgtcatggtggaggaagatgggaagatgcgtgaagggttgggtgcaaaattagccgtggctgccgtgctgtcgtcaaattcatttggtaaattcttctctaaattgttgagaatttgatgtctttaagtgattttttccgatatttgctgcatgtataggacaattcaaatttactttattgatgtgccaaatgggcaaatatcggaccaaaatatcaaacgtgaaacaactctatttactgtatctaggacagctaaagcaaaacagatatgctgtagccatggcggatgagacgtcagtgtcacttcttgaacttggacttgagcagtttgatgatctcggcgtccacctggaagctcttggcgaggacggcgtcggggatctccgggtcggcgccgaacagcgccgtcgcggcgggcacgacgccggggagctggctgttgaacaccgtcatggcgcgggcggaggcgttcccagggttgtactggaagtgcatcagcccgcgcgggatggcgaacgtctccccctcgccgaccaccttggagtagtacttccccgccgtgctcacgaacccgacgagcatccggccggtgatgacgtgcaccagctcggcggcgcgcgggtggctgtgcagcgggttgacgccgccgggggcgaggtcgacgcggttgatggcgacgccgagcgtgttcagcgccgggaacgcctccacgttgcccggcttcaggctggccccgaacgggttgtccgtgctgccggcggcggcgagcccggcgaagaagaagtcgtcggagacgaccgcggacgccggcttgcacgggaagcccgggtatgccggcgacgcctcgccgccggcacggggcacggccacgcagaagtcttgtatcggctctgggtcggcggcgcaggtggaggctagcacggcgagcaccgccaccgtcaagacgagcaatggcgccgccgacatgtttccggtgcactccattgatgatgatgaggacatgaggtcgatagttttggtgccaatgcaatgctatataagtgcatataggaggacgtgtggaaaggacaactttgtgaaagctttgaagggatcaaacattaaatcactaaatacataaaaggctctgttagtattgtgatcatcaataagtactctttccgtcctaaaatagaaacactattaagtcaaacatttttaatttttactattaataacaagaaaagtagaaagatcaatcgtataaaattgatgttactaaatttatcattaaacaaactatcgtaacatgtagttactttttatttaaaatttttatagatattattaatcaaagtagcatatcaaagattatccaagaaaaaatgctaactatagcgagagtgagaaattgacaggccctcgggcgatttccatgcataatcatcatcaagctttgatcattactttattggagagttgttaagtatttaagttgtggttggtaaaatgtgatcaaaactagattgtgagagaagctttttcaaccatgtccgatttgtcaaggggcagcgcgtcggatgatcctggccgtcggatcgcgattagacggctgcatgataagtggagattggtaaatcgtcctcatcgttgacggactaacgagtgacgtggacaggatgtggtctggtagaatagacctggtcacggagtgcgagatgagcatattgttttacttattcttatgttaattcgaatcacttattactccctccgtttcatatacaaatcattttgtttttttactagtcaaacttctttttaaatctatagaaaaatgtagtagtatattaaacacaaaacaaatatattattaaaatatatttaataaaactaatttgatattttagatgctgatattttttatataaaacggagagagtactaaataaaagatcatttgtgactaaaacttttatatgcatatcattagcaaactcaaaataaactatgatgaaaaataaaaaataatcaaattcaaaattaagttttaaaaacaatgaagaccaaattctccaatggtaagcgaagtcctcaattccgtgcacttgggcgaacccaccactaaaaaaaataaaggcgaaagcgaccacactgtaggaagaaaggtaagcacaagtcaaattggttggcaggtagcaagcgcgtgttcagtgcatgttggcttgttgctaggctactatggtacagatgaatcttcagtttttcagagttcatcatcagcctttggaagacaatactcttttcagatgaacaatcagcacaaagtcagtctacgcgtatcaagatggtacagtatgtttccaagaagacaaactacactgggtcatacatttctcaccaaatttacaaagacacatctctgaacaaccgattcaattcaaatattttcctaaggccgcctttggaatatgcagaatcccattccatccatgagtttgggccaggattttagttcagaatcctggcctatacacatggatggactgggattgaggcccatccaaacgaggtctatatactggcatgtacaccagatggggaacaaagctaggagatactcactcctatacaagacctaaggagagaatacaacagggaaatggagaaactatttcacactcactcctatacaagacctggttactaaggctactatgtacactaggagctgccatgggatctgaccgacgatatagattgcgctgaaacggaggctgtcgggctgttcacctccctatccccattggcagttcgagggttgccactgatcctactgatagtgtcattagcaacgtcgatgaaccaatcgtcgcttggaaggacactgcagagaataaacgggtatatcatcttcagttaccaacctttatgaataaaccaggaattgcataatcactagcctattccagctatgaataaaccaggaattattatctaaaaaatgaataaaccaggaattgcataatcactagcctattccagccagtttctggtatgtgaggaatctattacaattgtaacatggagcaaaatacatgcatgcatccgattgccattacagcataacatgcatagatattaatattagcacctcctactaaatacagtcggactgaaatagatttattaaccgcaaaaggatagatgcaagtcagatagatagtaacatacctatcagggttcatccctgtagcagaaaatgctgccattgctctatcaatgattttcagtatcacttgatgtacgtgccgagataagaaacggcctcgcccggaaaggatgacaaattgcatatccaggtagaactgaaaaggaaggtgaaaataagaataatagttggtgtcataagatcaaaacaagaaaaaaagaactcacctgctgaagtccaaggggacccagagcccttggcccctcttcaatctcttcccaaaagctctggtcctctgatagccacagtatgactgtttctgtaagccgcatcagtaggaatgtagcaaacctttccctaccaacaaacaaatctgcagcaatgctcgccatcctgtttaactttgcatataattcctgcaacaatatatgagatgctgcaacaaaaggctaaagtttcttgggtagatttgcaagcagcatgactgcccaagtttcatgagttgtcatctaagctttacattaacaaaatttctgcctgacaaaatactgaagtctattatctaattcaaaattgtacctttgttatatttctcaaagtgcaaaattttctggtttcaatttctaaataaagcatttcttcgaacaaaattgcaagccagccagctgccaaaatctatttttggtgacaactcatcaggaaccaaacagagttctgtactgttggttctacaatttggttgatcttgttaatgttgggctagacataccagtataatagcacaagcaataactaggaaattatttgcaagctgaatgcaacttctttaccatatgagtgaattgcattggtggtacatgaacttgtttggtgggtgcaatctagtggatgaacttggcaaacactcgttttagtgcaaagacttgtctagtgtgtgcgaaccaaggccaaaaggacacgacaaggccaattttaccaagtttatgctgattaagacgtaatgtgtacatgtcaagtgggcatgcatgaaacatgctatatttactttatccttctatgtatctaacccttgcatcattcctcggtttttcatgtcttctatgtatataaacaagaaaggaagtgctatagagcatagattcagaaaaacaatttggtttacttattttacaacaattcatctaaaaatcaatatattttatagatcatagaagaactacctcaatgatgaatgtcataatgaacctcattcttcaaacaaatataagcagtaatgtttatccagatagttgttaagggcaaaaaatttatacggacctgaaaaattagagatggaacccattctggctcttcaacagtattatccatattgatgtacatttctgcactcagacgggtgtcatcatcttccgtgaatataagatcaagggcgtgctgtctgcagaaactatctttaagtttatccacaatacgttgcagcttctttttccattctcgctgctctgctacacggttttgcctgtctacactttttttacgaatatcattcacaccagtatggtttacagacgacaacttcatagctgctctaggtagcaactcttcagctagtaaggatgcattagcgaacaatgctagctgctgctcctcagtctctgccactcgaacaatcttatttcctaaaccttccaaattcgcttcatcatccagtgagtgtggcagagcacttatgagcagattgacatatgaattgaatattttcagaagcccgtccattgcagaaccacctaactgcaagctatgcagtgggccaacatcctcaaagaaatcctgcaaaataatacagtaaaacattaaaagaataactttatgtataaatcctcaattacaaaggctagaaacatttgtcaagcaatagaacattacctgaaccattgaactgaagcgatggccactgtttgagagcttaggttggagcaacaaactactagcagatgatctagcaaacgtccgtataccagatggaggataggtgagtacccagtcatcagctgcagctaaagcagcagtactctcttcaattctcctcaaactggactccagtgcttgctcaacagagggtttgaattgcttcatcagaacagacgaaagtgacaaaccacgagtttccagcaaggaagaatgaccaagtgagatctgaatacattcggcagcagctctcaagcccccagcagccacacaagcggctaaagcatgcctctttacaagtagtgcaaataacattgcttgttctgtagcccatgtaatcagttcagacaaataagacggttcatcaccaaacagttctaaagagtcactgagagcctgggctataacagaaaaaacttgccgtgcaagagatgcagtgtatgccccactgtgtgatgtgctagacggatgtatagtttgcatgctgcattgaagcctctggttgtgtgcactaagcaacaaactatgagcacggggtccatcaccgagtctcttgagagcagaagctgaagcacgaagttcaacgccacgagtagaagactggcaagcagcttctgctagctgatttgccaatttcagacgattatcagagatagccctcttcacggccagaatgtcagctgtggtgagtgtctgtttctgtttttcatcagcaacgacacgttctgcttcatccaaagcatccaatgcttcatccactcttctctcagctagcaaaacatcaagcatctcagggaaatctgtgcaccagttttgtatttctgagggctcctggtcttcatctgtcccctcttctgcagagccttcagaccctgtagtcaaggaatcaatatgaaccccttcagatagaccacgaattagagctgactgtgtacttagcagatttctgacagatagcagctccctttcaaggtctgatatctcctttgatgttctgaaaaccaggagattgagttatcaacattttatccgaaagttatgaactggataaaacagagaacaatcccaggaagtaactaagaaaaacagagaaataccagatgtgaaaaaaaaatacaattatgattttgcatcccacaagttttatgacatctgcatataattttgcagaaacgacaaatccgctgcctacctttcttttttcaataattctttggattgtgattcttacaaaatactaattcaaaattttatgaacttgtatggagtgcgcagcggttgagatgccaaagattagcaataaacaaagctagcaggcatactcattttagagaaacaaaaagaataaaaattggagaataatcagacacgatactctgagtccagggatatactcccttgggttagattaaaatttcaacaattgtgttcacaccttatgaatgcagcataattcgcataaacacttctacgcatctcttcagaagaagccttctttaggtcttgcagataagaacagaggtgtcttatttcctgtcacagtttttgagcatcaatcctgttagattttccaagcatgatgtgccttttactaaagtaatagttcaagctctaaaacacacacagggagcatgcaaaggaaactcaacatttgaagcctcagaaaatgcacacatgcatgatacggcacaactgcaaaataggtcttaagtgagcataactcatgcagaaaaggtagaagtgtaggatcatccattcgttgctacccaaatcctttgacaaccatgagcacaagtggtctcccgcacaaaacaataggtaaaagcaatttaaaggcaaccatttatctcatatacaataaacgccaactttctaaaacaaaaaaagaacccttacaaaatttgcgtacgattcatttcatcaccagagccgccataatatagtacaaactccggttctttgcaaatatgtgtaaatctacatgtggtcacttctctagaagataacataaaactaacaaactaacagcactctacttcagtgctccctccaagctccagacaaatgcaaattcaaggttattgacaaacttaattcgacctcaattcaactacgcaagcatgcagcgcaaccagaaatttgtcantactggccagaatcagtatttctccgcatcagagtaaaaaaaacctgtttcataactagtatctgaacatgaaaaaaatcaaaccaataaacatatctagttccatgcaaccaccgttttccctctaagggaaacaatcctaataacgctcaattcacactttcgctagttcaaatgcactgggaaactcccgacaccgtatccctcacacctctcgaacacagaacagcaaaagcgcgtgtgaacttccgaccaaaattctaccactccagtttcctccccgtttcacgagtggaccaatccctttaccttctcgttcatggcgtggcacttggactgcacgtacgcgtcggggtcgaagttgtcggtcttgaagatcttcatcttgtcggcgagaggcaccccgccgtcgccgcctccggccgtagcgttcaccggcagcacgccggagtgcccggctgggcgcgacctcgtcgacttggcggacgacatcgccgcgcgcaggcgaaccccaccgccgccgccgccgccggcttcccctctccttcctcccgcgtgattaagaagcttctagaagtggaaccgctgctcgattgagagctccgctcgcctttgcagctgcgcggattttttttttttttgggtgggggatgtttttctttgggtacgtggaataatgaggagttgagttggacggttgcgaaaggaagaaagacatatggttgttcttggaatgtctctggagactgggagtagaccggtactactccctccgtccatatatccctttaaaatcttttatattatatgattatattatatctctttaaaatcttttatattatactaacttcgttttttaatagatgacgccgttgactttttcttacatgtttgaccattcgtcttattcaaaaattttatgcaaatgtataagatataaatcacacttaaagtactatgagtgataaaacaactcataacaaaataaattataattacgtaaattttttaaataagacgaatggtcaaacatgtgagaaaaaatcaacggcgtcatgtattaaaaaacggagggagtagaacataacgatcataaaatagaatttttagtgatgagatttattttttaaaaatatacttttaacgaaagaagtgagtaggtagtttatgtttatttttaatttttttaacacgtggagggtcaaagattatctaaaaacttttcgtagaatatttgaaaactaaatttctttgttttttcagaaactagctgggtggcccgcgcaattgcgcggctagcacccaaacaaaatcatattattttttaagtatgattttacttaaatttattgaatagatatctcgttgtcttaagactttgaaagaccaaaccttatcatcctcgtgtttctaattatatagtttttaaaagtcacaccggttgctacctcttatgtcatctccttctttatttgcttgctcgatctaccactattttctatttattcttcttgaaagctttaaaaatcggattttacagtttttagagtttattgtcacgttgggtttcatttttataacttctagagtcccgtcaaatgttgtcattatactcctctgcggcccgtccactgtctcttctctttattgtcattgagaatttaaaaatcgaacataattatcgtttgggttcatttttagtttctagaagtcccgccaaaccattagcggctttgccattgtactcctctacggctcgccctttgcctcctttctttattgtcattgagattttaaaatcgaacatgattatcataggtttttttttacttttagaagttccgaacctttaaaaattggacttgtagtttcattcttttataatttttagaagtcccatcaaacgatgccactatgcccctctacaacccgtatgccgcctactctttattatcattgtgattctaaaaattaaacataactatcgttggaattcattttttattttctatagttacaggctctgcaactatactcttatacactcagcctgctgcttctcctttttattgtcattaagattttaaaatcgaatatgattatcaatggggtttttttttttaactttctagaagtcttggcaactgctttactcgtttgcttcacggcctgcctgacgtttctccttttaatcgtcattaggattctatttggtgttttattaacaatttttatatgtcgtatcaaccgccaccactctactcctttataggcatgttacttaatttatctcgtcatgtgttttagatggtcttttctttcaataatatttatttttatcacaaattttagttatttataaattgtattcctaattgaaatcttatttttctttttctaatttcatcttttttaaaaaatagttaataccgtattgtgttcttttaatgttttttattttttattttcaatttcagttgtttcaaaattgtattccttgaactctcttttattttttctaattttggatattattttattttttattctaaattttaattaatctcgtattgggttcttatatggattcttctttcaatatttcttatttttaattccgaatttcagccaaatttaaattgtattcctacttgaactcttcttttattttcttttgctaattttggatttatttatttttattccgaattttaattaatctcgtattaggttctgacatggactcttattttaatatttcttatttttaattctgaatttcagctatttttaaattgtattcctacttggactctcattttcttttctaatattagattttattttatttttatttcgaattttgattaatctagtattggattcttatatggaaacttctttcaatattgcttatttttaattccgaatttcagctatttttaaattgtatttctacttggattctcctttccttttctaattttggattttattttattttatttttatttctaattttaattaatctcgtattgagttcttatatggaaacttctttcaatattgcttatttttaattccgaatttcagctatttttagattgtatttttacttggactctcctttttttttctttttctccgattaatgtgggaatttatagcccacacagcgaacgtggtacctcattttaaggctttttaataatataatagatatataggatttttttttgcataaaatgtatcttgggaaacgtgcaaataaaaaaaatcctttttaattctagtgtgaatgatggattaatactaaccacaagatagttggacaatatcacctagctaaaagaaaaacacaattacacaagaacagttctacaactcaaagtatggttggactgttggagtaggagccggtagtctgtaaggagtaactattgaccgaactttttacattttcaacaaggtattgttaaccagagttactataaagaatcatcgagggatacaaatgggactttttccaccaacggacctgttgacccatgtcaccaccctagccacccaatcgaccttccccatcctctcaacctcgactcccgtctcctcgctcgctgcgcgcatcaatctccatcctaccaccagcaatgatgcgggtatattattccgcttccatcacacttttgtctcgaatttgaattcaccatctgcaccgatctccatcctacgagcgccggcggcaccggcatagccaaacggtttccataaaatacccactcatatagtcatatgtcttttttttaaaaaaaaagtttggtactgaaacctcaccgaatcataatcagataatcctaagttctaaccgattccgatttgaacaaatttgactattttcagttaacccttacccaacaattttaatttagtttcaattttcttttatggttcatctagaaatccctctaaacgatcttttttgtgcgatttctttttcaaagtaaaaacgcggagctgagagaagacgacctgaccgcccgcgtactccacctctaacctttgccattcccctgtcttcttccatctccaaatccttcttccctaatccccctcgccggcgaagcgcggcggcggcggcggcgccttcttccctaatcccctcgccagcggggagccgcagggcggcggaggcgtgcgtcggctgctgctgctgcgcgggcgggggaggtggggagagatgcacagatccgcgggcgccacgatggcgtggaacgtgttcaggttctgcactgcgctgagggggctgggctccatcatgatcctgctcgtcctctccatcgtcggggtcacctactacgcggtcgtggtgtacaactacggccccgcgctcttcgccggcggcgccagcaccctcctcgcgctcgtcgtcctgctcctcttccacttcctggtaactattggctcgaactcttaaggggggggggggggtttgggtgtcaaaaacggtgaaaacgattagctggttgggtcgaatctcgcaagtagacgagagattgagtgtttttggagcaatgttaggatacaggtcgaaaattttgttatctgtgttggttgtttttttttggggtacttggttggagtggctatatgcaggctggatactgatttggataaattgatctatagcgaccgtgatctagtaattgtttgcctaatatatgcttctgtacaaaatactggatttgccgataaattgatctgttgttgccatggtataagtaattattttcctaatatatgtttctggacaaaatacatgatttgcctatgatgtatgcttgctacattgttgaaatggatatgggttgcagtgatagatttaaggataaaaaagcggcagaatgagttgataaaatgcaatgttgatgctatattgattagagaaccgcaatgttaactgaagtttccttgcccgaaatagttgattataaatactagcccccgttatattggacatattcgcactgttttgattttgtttttttccacctttattttgataccaattagtactaagtagccctgataccaatcagtactaagtagccctcgttgtatttcctcagattttttgtactaagtaggagtggctacgagtgagctggatacatgttcggacaattgagctgttatgtccatggtctagtatttattttcctatcatgcttcttgacaacatattagatgtttcctgatatacactacccacattgttgaaatgcggatggattgtactgagaagttaagaaaggaaagtgcaaaatgaggtgaacaaaatgcaatattgatgctataatgattaagaatcacaatattaactcaaaaattggatgcgaagaatagttgactataaacattagccctgtaatattaaacattttcgcaccgtttcaattttttcccgcatatttgcttttgacactaattagtttatttctcattgtagcttgttatgcttttatggagctacttttctgttgtattcaccgaccctggttctgttccaccaaattggaatctcgactttgatgaggagaggggagaaactgcccccctttctggcttagatttcaatagccaggtaaactcgcaacaatctatcgctcacaatgacacaggacatccaagggctaggtattgtaggaagtgcaaccagatgaagccacctcgatgccatcattgctctgtttgtaagttgttgatttattcttcaggatcaattttttgttgttctagttattatgaattgtatagtcaacaatattgtgtatttatcactaatcatggtttcaggtggaagatgtgttcttaagatggatcatcattgtgtatgggttgttaattgtgttggggcactaaactacaaatactttcttctcttcctggtatgatattactgtaattgatatatttcttaggatgtgtttagaagggagataggctttggagttttgttatttttaacatattcacaggctgttatttattgtcatgctagtgaaatatgcagattttttttttgttattgctttaaccctatcttttgcaatgagactggtttcattttgcccagtctatttttatgcactgtgttgacaaatcaagatcttatacagcaaactatgtccatccaccccaaaccacacacacgcacgtgaaatgtataatcaatttaagccaccatgaatacttaaaatgcttcttctattcgatgttattagctagaggggtggatctatgatgcaaggacatagatgcgtcaacacgacacaataccgatctgcggattcaccattttcagaaaaataccgatacggcgacacgtctacatattttaataaaaatactttcaaattctcaattatttacaactaaaataatcaataatgtattgcaagcaagtacaatgtacctcaaggacaatccttagctcctaaaaggatggcgctttggtgggggtgtgtagggggatgtgatttatcatgtggctatgtgggccgggccatatcgcatatgtcatatgtgccggagatgaatcgaccatgtatcagaacataaaactaattatttttttctatttaattttacaatacttggtcgatacgtatcggaggcgtattgaagatgtattgatatcggacatgtcattggtcactggtgcataacgtttccatattattatgtttacaagctaataaacaagctaaccaaatattaagtactaaactaatggagacgcaatccaacaaacagttggtagctcctctgtcatgctgctgacccactgcatatgcatcttctgtggcttttgtggctttgatgcatcagagtaattagtgtgttattgttgaatattaattattgcttttctcatctacttggggattccacttatatagcagtgaagaaaataatgcaaaaaaatataaatcagagtaattagtgtgttcacttctctgataataacatattaatattggcagtataaatgctgctgccttggtggtgctttcgtttgacttattttggactactatccttttttcttccacacagctattcgatcctttgatttctgaagctgagttcatgtttttaatgattccatgcagttttacaccttccttgagacaacactggttaccctttctctattgcctcacttcatagccttctttagtgatattgatatcccaggaagtcctgcagcacttgcaaccactttcctcacctttggtaattgcattactttcattcatgagaaattattcttgggcacgtttgactgaggattggcttataatattctttttctctgcagtgttgaacctggccttttccttgagtgttctgggttttatgattatgcatgtttcacttgtttctgctaatacaacaacaattgaggcaagtatctagaatgtataattaaatactcaagtatttatcaatgtctattaaatacttacttttgatatctccaaggtgagattaatttgttacattatttttttatttaggcatatgaaaagaaaactacgccacgctggatgtatgatattggccggaagaggaatttcattcaggttaggctttcagaacatgttaaataatctgttacttcttgtaatggtgcaagcgcacgcgaaattatctttgtttaaaggcttgatacaccttgatgaggtgggattataggacatgcacaaatgcagatattttagagggaagccatacttttggcccctctactatcccttttgtttactccacctgttccaaaataaacaaacgtagtatagggtgtgacacatcccgtactaggtttgtttattttgggacagagggaggtcatattctgaatgccaatgctaattagaaaacgtccccagttatcaaaatcatgtatatgatggttagagagtggtcttggatgatatgacatcatatatatgatgcatagagtcataggctgatgtggcaaataatttacggaaggaaattaatgctcctttttttccagatgaggtaataaatgacatactgtattaaaaaaatgatgatgtggcaaccacaaaacccaaaaccagtcaagaaagctgctttggatgcattttgcaccaattccaacagttgtgtgatgtaaattaaatggtattaaagtacaggttgtaaaccagagtagttcagaaatcaaaagtggaccttttaccccctaatttagacttctgtggtagatccacccattttcactcctcattttattatcccatttcccatacaagtgccaaattttccttatccaaatagcggttctgcaaggacagataagggatgtgatcaacctccagggcaaattaagaatttacttgaacttctatttctaatttgtgaaaattgtatatattgttccaaacttctaatattttaagctgcccgtcatttagagttccatacatttcgagtgtggcattttacaggtgctcaagggccatgatatttatttaacttatggttactttggccagtattactaaaatataacccagcaaagccgctagcctggtagtacactagtactaattcaagttagtactatgtgttatcttcaacatctgaaatatgccttctttttcatttttatttctttttttgctaagcattctactgcaaggttgcaattcttatctgttaaagccctgtttggtagtgagtttagggggtggcaacttccgggttttccattagcactttctcaaactgctaaagggtgtgctttttgcaaaaaaacaactttttatataaaagtttctttaaaaaaaaaatcaaataacctatttttcaagtttgtaataattaatactcaattaaacgtgcgctaatgacttgtcttgttttgcgtgccatgaaaaaccccattccgacatcactactgaactcagtcagccacatgtgaataagtgaacataactttaacaaaaggcaaagctaactaaacagtgttctgttaccaggtttttggaaatgacaagaggtattggttcatccctgcgtactcagaagaggatttgagaagaatgccagttctacagggccttgattaccctgtcaggacagatttggatgggcaagaattgtgatgggacaatttcgcctgtgccctcacttcccatatgcaccaaatatgttccatgtaaattttacggtttccttccgatatcgtagagttaaatatttttaaaggtacaccttagtactgacagcattgctggttgggtactacatggcctccgaagagagtgttcccagaattacttttcaaaccctgtgtaattcacttgtgctgtctgattgggcaaagaacgtagaggtcttgctattgtggctaaaagaggcatgtgatgtaaattctttttagtgtgtttcagatgggtttccagatgtatgatgtacaatgatttgagctgtgcaatagacgtacagttattagagcatgacatgttgataagataacctgtgttaattagagaactggatgtttaagtgttattttattagtttgtcattttaaaatagtgcacccgttttcaaaaggaatatatgatgtattttgtttcgttacgacaaggctttggctaacaattgctctattagggtataatctttatgacgtaaaattgaatttattagatttatatttaaaagtacttatttaagattataattttggatcacataaatgttgttttaatagagccaagccagtgtaggttaaagtctagtactataacgcaacaaaataaaacagatggagttcatcggagtagaagatgaacttgatcggtacttgtttcactctagaatagaaatatttacaattgatctgtgactaatgtcccatccgactaacatgtttttttttccttgctcttctaatgtgaaaatctcttccagttatgatcattccgtgattgtttttcttctttgattgatggtgttgctctcaccacgcaagtcaccaatttcttctgtatgtaaaaaatgctccaaatttcgtctcatactgtgctcataaacttctatggcttgtaaatttttgtggagttttctgcttatgtgtgaaataatttgtccaatcatgccaccaacttggctgtttcctctttgaaaaagtccactttgactttcttacttgtgcgccgaatctaattcatatccctcaaccagaaaaccggatatgacgactcccaaaactattgaaaccagtgtaatttgactccctcagtggttttagagggtgattttgctgatgtgtcgctgacgtggcggtattgacccggtcttcgtcccacgtgatgcttacgtgacattagaatttaaaaaatatatgtgagacacatctatcattcacatacaaaaatatattgtggaacccactgacatgtggggcccacctccctctccaacccttcttcctcctccttctccctcccttctctctcttccttcgagccgcaggtcatgcagcgacgcgtctccgcgcgaccggatctcctatctctctttctctcccctttctctcccccttcgccgtctgcggggagagctggagcgacggcggcggcgggcgagggccagaactgcggcggtgcgtcccatggctggtggcggccgccgcggccgaggaggccggagacgagagcggcggcagcgggcgggcgagggccggttgcaacgccgccacccccgccggcttccgcgacctccactgcctgtccacccctatcaatctcgactcagcaggagaaagagcgcctcctagatctctcctctaggccgaccctgtccccgtccgccggtctgggctaccgcggaccagctcctcttcgtgccgccgggccacccctccgtctccgtcactcgagagggaggagtcggcctctccatctcgggatgtcggcgctgcctcccccgacgacagagacggactcaggtcagcgacgcacgcacgcgcgctttcttgccataaaaggagcaagcaagacgtcatctcctcggacatcacgattcacgaagccaaacccttctttatccgatcatcgagcatgccaaccagagtccaagactgtcaattctcggcaccagcggtcgagctttctgatccatcgacgtcgacggtggtggcctcggcgagcatggagatggagcagctcacagcccgcttcaacgatgccgtcgctgtgcacggcaacaactagctgctgctggacgctgccgccacggcgccacacgcggcggtgggcatggagatggcggcgccggggcgcggtgatgatttggaggagctcatcacccggctcgtcgacgtcaccgttgttgcgctgatgatttggcggcgctgttccactactgcggctcggcggtcgccgcgtgcggcatggcgggggcaggcgttccggctggtgcggttcgccagctggtgcagtatcacccagttttttttaatgacaaataggttccacagatttttttttaattctaatgccacatagacgccacgtgggacgaagatcgggtcaacaccgtcacgtcagcaccacattagcaaaaccgccgagggagtcaaattgcactggtttcaatagttcatagagtcgtcctatccggttttctggttgaggcctgaggggtacgacttaagattcggcgtataattaagggagtccaaatggactttttcctttcctctttcctgtggcgcgaggcagagcgtgaggcatacttggacgtggtgggccgggcgactaggcccgtgtcctagtttgtgcataaggccttggtccattgcattaagagaaaacaaaatatagaaatacacgtgtaaaacaaatgttgattaattaataaataataaaactttgggggctgcctacggctcgggcgcccgatgatttggagaaaaatcgggcactgacgtcatgctgacgtcagcgcccgatttacgtgtaaaaactaatttaaactgatttttctcttaaattacttatccaaattatgatccgattgcaccattaaattcgttgcaattaaatcttcaaaacaagaccacacgtggatatattccgacgacaatttttttaagcttattattgaattatttttaaatgttgcacgatgttccaccaagtatatcggaattgtttcactaagtagatcgaaaatgtttcactcatttaaattgggtattgtttcaccttatataaaaacaatgtttcagcaaatagcgaaagattgtttcagttcactgcaacatttgatccatacacagtgaaacattataagtgcactaggtgaaacatttttgggtggaacaaaaaataaaacgaattcccttaatagggggtttccaaaatatgtggattttttgttgcaatggaatatttcagttcactgcaacattagatatatacatagtgaaaccttgtaagtacactaggtgaaatattttttatggaacaaaaaataaaccaaaattccttaatagagggttttcaaaatatgtggttgatttgttacaggtggggacaggtattgtggtggggccagcgacatcagcgtgcgcaggggcgggggaggggggagcgaccgatttttcctcccgccgcccagtcacccgacggccatcattatccaaaactttggcctgacttcggctgtgttcttctcaatgagttgggaactcatctcccaaacacgtaaaacaaaacgactcattagcatatagttaattaagtattaatagaaaaatggattattgtgatattttaaaataacttttctatagattttttttaaaaaatatatcatttaacagtttggaaaacgtaaacacgaaaaacgtttgaggaaaaaacgactgttcttcgctccatgctcgcctgagcacaccaactcatggtttctcagtttctcacatatgctgaagagtttatccctccagcatctattttttttctctctttttaatcgtattgttgatgtgaattatttgctccacacgcctctgaaaatgtggcttctttaacaaaaacatttctttcattgaattacttaggctcatttgtttaaaggtagtatttgttaagtttgtttctaaaatgtttaattcatttatataattaagtagtcaatctatgataataatttagcgcttgttcactttgctatcattttcaaccttaccaagttttggcattgtcaaattttggtaaggttatcaaaatttggtaagattatcaaattttagcaagatttcatatgtacttactaaaatttagcaacaaactaaatgtagcaatttttttaactttacaaaaaaaatgataagattgaaaatggtaacaaagtgaacaagcccttaacgaatggtctgcttcaaacgctactagaatttcttcaaacgcttaacatgttaccatcaaagagaagttctcaaaaaggacacacgatcaacttctattacacacccttccaatctcttgaacataacccacgacaaactgacaaaagttcttttaaaaaaatgaaactgacagtacaaactcgacggtcgacgccaagct

SEQ ID NO: 23668 - DNA, 694 bp, Oryza sativa
  unsure (1)..(694): unsure at all n locations
ggcggccaaaacanaactagtggatcccccaatagactgtacttctatgaagttggatctcttcacctatctgttcaccctaaaccttttcatggtttataagaatgcgggttgtttcttgcaaaattttgggtagaatggtgcaaaaaagaatttgttcgataatgaagatagctgtggttttgttagcttgtgttatattgatgtaatttaagatcatgcgagtgtttattttcccggcgacattcttttgtttattcattatatgcagtatccatttatcttggctctcacctgcctgatgaaaaacatgtatgtttatccataccatatgtaacaccgtcgaatgttaatcacttctgcgtaacaatgcaaatgtgccaaaactagtatagaagtattccggtcaaaaatgaaagaacattaataaacaaaagaaaaaaaacatctggccagtaatgcctcgtccgaaactagtgaactacgcgaaacaatcaactgaaaaggacaggtgaatcagccaaccaagactgttgccagtgaacgagaaagccagtgcagtgacaaccatccataaattgaaggtaaacgggcgctttttccagcgccatgccaaccaggctggttgcaaatgccaacacatcaggatgttttcggggaatcaatgtgatatgatcgaggctcgcgacagccg

SEQ ID NO: 23669 - DNA, 14115 bp, Oryza sativa
tataaattctagacatatatccttctgatacctgcatatcatcctctagtgttttgaacggttttttatgtatgattttttttgtaaattaccaggcagtggctcttttcaagtcatactttggtggtgcttttgatgaagatgctatcagaaataactttgttttaatctatgagcttcttgatggtaagggacatcttatttttggactttgtttcatcaatttgcactgtggatgcttctatttacctgtagaactgtctctctcatctaactgtgcagaaattatggacttcggttaccctcaaaacctctcacctgaaatcttaaaattgtatataactcaagaaggagttcggtcgccattttcctccaaggtgagaaaaatgtgacattgaaataagataaccggataaaaagtcacatcaaatagtttgttgctcatttattttgtgtgaaagcatctgaatcattttttttttgttctctgcactgatagccttcagataagcctgttccgaatgccactctacaagttactggtgctgttggttggagaagagagggtcttatgtacaagaagaacgaggtgcctgttccaaatgccacctccaagtttcatctgtatttggacatattatgcattgctagctagctagcatttctaataatcccagctcagcatagatgctagtaatgtcagaacgctgcatgtatttcgacatgcagaatagttttcatacatattgtcaatgtgcactagattgcctgttacagaagtagtccatactttatttgttgatttctttgttgccattttggttctgcatactttatttctttttagcactttgcatgactctttttagcattgagatacactaatatagtattcttttctcttgaaaggttttcttggacattgttgaaagtgtaaatcttcttatgtcttctaaaggtatttcatggattactatgattttattgtactgctctgatgtttttgttgtccttaatgttgctttgactgatgtttaatgtggaaattgccttctctgcagggagtgttctacgatgtgatgtgactgggaagattcttatgaagtgcttcctttctggaatgcctgatctgaaattgggattaaatgacaagatcgggcttgaaaaagaagctcaactcaagtccaggcctgcaaagaggtatcactttatcaataattagtacatgaagaaaaaaaattgagcatctggtttttctgattagtatagtttatatggtatgtacacaatctttactactttaactgaattgtctgctggtcggttctcctttttcctcaacagcggaaagaccattgagcttgatgatgtcacattccaccagtgtgtcaacttgacaagatttaactcagaaaagacagtcagctttgtgccgccagacggtgaatttgaattgatgaagtaatattatgatccctccttatgcttgtattagttttcccctgtagtgacatttttattctttacttggcttttgaccacaaaattctgttgtagatatcgaatcactgagggtgtaaatctcccattccgggttctaccaacgattaaggaattgggccgaacacgcatggagataaatgttaaagtaagtgtgcatatctgaaattgtgaatgcatgaggccattatcacgttttctgacacgatgaaccttttacacaggttaagagtgtttttggtgctaagatgtttgcacttggtgttgtcgtcaaagtccctgttccaaaacaaacagcaaagactagtttccaaaccacatctgggaaagccaaatataatgcttcaattgattccctagtgtggaagtaagtgcaaattatttctatatagcagtttatctatgagaaagatgttctttggcttttctttttatgggttaggtcttgttctggcagagcataaacataaacctaccaatttttgttggttacggtgtacaaagctgtatccgatgctatattggctcaattttcttactcttgaagagctactccttgccaattttgccacaaatttattagcatgccttttgcactcataagtcttgacacacttctgcaattataggatcaggaagtttcctggacaaactgaggcaaccatgagtgccgaagttgagctgatttctacaatgggggaaaagaaatcatggaacaggccgccaattcagatggaattccaggttaattttacctccttttgaacaaccctcttatcattagcaaaatctgtcagccagttcattttatttttgagcttacagaaaatgcaatgttagagatatcataacagttatgaattaaacttgagcatgcacaagaaaaaaaaatggtattccatcattcgttggcctttgagtatgtttattatccgaggtgttatcttgaagtgttcttacaaaaaaaaacatcttctgcttcattgttatgctgataaaatgtgccttcgagtttggttatcttgtttaaccatgctttctgatttgttgtttctgtaggttcctatgtttactgcttctgggttacgagttcggttccttaaggtacgtgcagggaatgctaatatagaacctttttaacacataccagacagttcagaactcatgttgagatgcatattccaggtgtgggagaagagcggttacaacaccgttgagtgggttcgctacatcacaagggctggatcatatgagataaggtgttagcgatgaagaaaaaagtcccaggtatttggcacggttatttcaaggattcgcggagctttctttctagtacggcgtcatgaatgatcataaagcatgtatattacatatgacaccactttttctttaagctattactttggcaaagggtagagcagagcagacaaattttcctgggttcttgtaatcgttttgacacgggatatctagtatcccctgagtcttgtttgtgtggtagggcatattttcatttgtatatgagaagatggcggtagcgtttgttcttgttgatcaatatacatatactcattggcagtttgtattgctttcttattaaattgatgggtgaattcacttgcagaagcaatgtgtataaacatgtgactcgacggtgctcgagacatcgactcctgaagtatacagtgtcttaacattttttgaggttttttttgcccttttgcgaatgactatttgtgattgccaccggagtccatgcgttttatagggcttacattggtatcgaatcaattttcgtaggaatctgaaatatttcctgcgtttcatcatagtagttgatgggttgagatagagatagagaaaaactgaggagtcagctgatttttatgatagctatttattaagatacaaacgaataaattaattcctacagagttgaaatcaaaaggtattctaaaaaaatattactacacctagtacaaaggtgaaaacttattttagaaaaatattttaagaatagggtagtagcgcatgagcatccgattcgatatggcacgcatctccgtggcgtcgttgacactaacaatgtcgcgtgattcgtacgggagtcgggacagcctcctcttgatctcgtaaaaatattagaacttcataaaataacagaaaacctatacaacgatatcccattagattaggatacccttttatgagatagtatctgattcttttgtgatactagctgtatggtacccgatacctgtaataccatgttacatggtacctataataccgaggacatgaaacctgtgatactcgcaagagaatagttaatatgtctatcccgttgtagtgggatcccgttttatagcagccctcgataataaagttagatagattttttgaactttctttttttctctaatttgcaaatctatttttcgatctcgttttcatgtccaactttaattgtccattttatttaattttttttaaaatctaaaaatataagtcatgcataaaatactattaatactttataatatactaatagcaacaaaaatattaatcataaaatttttttaaataagatgaataattaaagtactattcatgttttattctaatatactaatagcaataaaattattaatcataaaagaattttaaataaaacgaacaattaaaattaaacacgaaaacttatagctacgcttattttggatagagggacttgattggctgagtttgagagtaaaggaaataagaagattaagaagagacgcaaaataaggtgagctattagcgcatgatgaatataactattttaaaattttaaaataaattaatatgattttttaaagtaacttttcaatagagttttttttaaagaaaaacacatcggctagtactcctccgtcctataatataaaggattattgtttgaccactcatcttatcttaaaaaaatttgtacaaatataaaaaacaaagttatgtataaagtaatttgaataataaaataagttaaaaaataaataataattttaaattttttttaataagacgagtggttaatctttatattttatattagggtcaattgcatatttgccatcggtttgaaccggtacggtgaatttgccattataaaaaattttattgcatatttgccaccaaacacagatagaacccaacaaccttgccattagactcacagatcagactaacactgttagaaggttggttttgatgaaaattaggacaatgttaccttgccaaggaaattgaagcaacagagtctttcctctcctttttcttctgccgccatggtgctgctacaacatgttgctgttactgcagtccgaagcagcaagccgctgcagctgcccaagatgcagccgtgctcgccgatgttgtttgccgcagcttcacaagcctctgccgtgctcgccgctgctgcttccgtagcgtcacaaactgccgccgcgccgtcacgccgtggccgcccgccttgctgccccgcaaaatccatccccgccttgctgccttaccatatcctactttattgcaaccaatttttgtttgatttgctcttgatttggaagaagagatgagaggatttggggatgtagtagggttcgaggatagggaagggaatcggccaatcgggacctgcctttctgggagatgggggcttctgcgtgcgagaggggtagggaggggggcaaaacggtcttgttgtgcagctttgtttttcacattagttttatgaattatttttgtcttcttatttgcactagctcaaacggtaatggtaaacggaaggtacacatatcagttttaatggcaaatttgcagtttgcgtttttttatggctatttcgaattagagggtaagagtagtggtatatttgcaattctccctttatattatgagatggacggagaagtagtttgggaaggtgttttctctcactcaatctcccagcaacgaatagcaacctaggttcccatcgcaactgaccgatccccagccgccgccgccgccgccgccgccgctcaaggaagcgcatcagatggcatcgccgtcgctcagggacgccgtgggcggcctcgaccgcgaccccttcgtctccctcctcgggaagctcatcggcgagtcccgccgcctgcagaacgacccgccggccctcgtcccgcaggaggacctcgtggcgcagcacgtggtcgacgcgctcctcccggtgtccatggagaccgggggcggcccgctcgtcgtgcggaaggtgagctacgccgagggccggagcaacgtcatcgtcgagtaccccggcaccgtccccggccgcgccatctccttcgtcggcatgcacatggacgtcgtccccgccaaccccgacgaatgggtaggttgctatggagattgttctcctgacgctgtcaaaaattgcttctcaagtttatgcttctttatgaattaatgatttgagtggttgcttgatttggtgtgtttctgccggatattttgattttgtgatcttatctaatttcgttgatggttgcctaaattgcatcattctcatatttacgggtggattatcctggtgagtagtgaccttgtttatgtgagctggtgatttctccatagtaataaccgctttgttgtgtggttgttgtaagaaaataataagttgcatgctagcgttgcataagcatattgatagatatgatgggatatagtaatgtgaaaaatggcatattgtttacttccactgtgttgtatactgcaaaaatctttgctcaatttcatgatgtttatttttgctcgtgctagctttgttgcgtcaaattactaaaaggtttacctcaagtaaatttctccttggttctaattggtggcccaaacgtctctacttgtccaggatttcgatcccttctcactaacgtttgacagtgaagacaaggacaaacttaggggccgtgggacaaccgactgccttggccatgtggcgctggttgctcagctcatgaggagacttggtgaggtcaagccggtgctgaaacattcggtcattgcggtgttcattgccaatgaggaaaactcacttatcactggcattggtgtcgatggccttgtgaaggatgggttgctggataagctcaagaatggacccttgtgagtattgtgctgtttgatgcatggagggaatgtccgactaaactaatgtgttgttcgtgaggaatatgtgctgatttggttgtcattgttgtgtggcattgtgaaggttttggatagatacggccgataagcagccttgcatcggcaccggtggagtgattacatggcatctgaaggcaattgggaagctattccacagtggcctcgcacataaggtacctgatttgaacttgtcagaactcagaatagtgtacttgttgtgttatatagctccagtaggttccagcaatacactgcttcgtggaaagaatgcataaagcatatggttcattttctatgacctgtgttcttttaaattgtatagctgcataaattaagcttgcatccttgtagttagtgcaaaagcaacaatttatattgatcaatgccaaattgaaatgacacaaaaaggataaggaaagtgactgcttaaacatgagttatgttgcaacttacagcgtgatcactctgcttttgaaatgttatctgttgcaacattaccccttggattttttttggggggtaaaaagtgcagaacgtgtcttcatcatgctagggaagattcattcgaatattcaattggcttagagggacaaaacaatttcaaacatacaagttgggagacaacaaatattgtatttgtatatgaattacttttcttttgtgtgtgtcaggccataaatgccatggagttaaatatggaagcactgaaagaaatacagactatgttttacaacgatttccctccacatgagaaagagaagctctataagtttgctaccccatctacgatcaaaccaacaaaatggagctgtatgttcaagttttacttgtgttttctaatgttacaactttttagttgtgtttcctaatgttaaagaaaaccactgtgtacaatccatgcaattaacaaatggtgatttgcagatcctggtgggggtctgaatcaaattcctggagaatgtacaatttcaggggatataaggtccaactattgctatatggttcttgaatgcactttaattgtactcaaaagaaaaatggtccaagcttttgttttattatgttcatacattgttataggcatggggacatgcggttggtgaggctttgttcctcccaggggccctaccataaatttgcttggtcatttaggcggtgttcttttctactaaagatgaagttagggcacataaaataagaaagccaatagtgcatgattaattgagttttaattattaaaaacttgaaaaatggatttacatgatattttaaaacaatttcatatagaaagcttaagcacaaaatgcaccgtttagctttttaaaaagcgtgctaacagaaccgaggtaaaatctatgtcttaatcagaaaagaacggggccttagtgttacaatgcagcagagtatcactgcacaaatttttatatgtttgcaggactaggggaaacaaaataatgggatcaccagtatttcacaagtcacaacattcaataaagactgatgcttctgttgtttcttccatatcattgaaaaatagttttttaaattatactgaccatatttttgtacatattacaggttgactcctttctacaggtaaagcccatttttcatgcatggactgttctctctcataattttgtctccacttctgccgaatgttgttttaatttgacagttgcatgttgccattcatacagcacgacatctgtagtgaagaaattacaagagtatgtacatgatataaatgagaacattgaaaagcttcctactcgtggtccggtatctaaatatgttcttcctgatgaaaacctccgaggaaggtgaagcatatatgactttattctcttatggcagtaacagtaaccatcataatttacagattgattatcaattcgccattacttaccattgatcttgctaggcttgagatcactattgatgaagatattatgaatggggtggcctgtaatctcgagtcgcgagctttcaagcattatgcaaagcaactgaggaaattgtcggccacgtggaaccatattccattactgggagtctgcccctgattagggaattacaggtttgagaggaaactggtgcaagtgttatcttgggaacaatcgccatttaactaaaacaaattcctcttcaaactttgcaggatgaagggtttgatgttcagactgctgggtatggtaagtaccttaccaaaaaactgtttcctgatttctttaggtcatgtcatcaatgaacaattaatggaaaagtctgttaacagtattcacatggttgagagtagtatagattaaattatgtataccgttcattttttgttgagttccacttggcatcctattatattgatatactatcgcggtaaacaagtggaaatgtagacagtgtgctgtaaatgtttatctgatgcttcttctgttcctgtaggcttactcaagacataccacgcaaagaacgagtactgtctattttcagatatggcccaaggctttcaagtatttctgagcatcatttcacagttggaagcagatgtttgagtcttgttttagggaggaaaaaaatgagcgttcactggtacttattcctgttacttgttgctctaataaaggcactcacagtgcaagctacccaaaatgaggaacctcaggctaaggccacacctcctctcccacggtgcaaagatgctttagggtgttcttagtttttcatgtaaacccttgtcatcttctattctagtcctcacatgttttcaaacaacataacatacaaaatttaccactaaacaccctaaaatgtacaaactagtataaaatttctcccccgccctcaatctctccgttccccaatccaccacaacagcgccaacggaagccggcggctccccgacctcttcccagccagtggcttggagggcgacggcggcgtcacgagaactcgctggggccccttctctccctgctggcaacgagggtgacgggggcgccgtgagagctcatcggtccctccacttccggtcggcgatgagggcgcagaggggggcggcggcgcgagagatcactagcccctctactttcggccgacaggccgatgacgagggcgcggagggcggctgcggcgcgagagctcaccggcccctccacttctggccgtcgacgagggcgcggagggcgacggcagcgcgagagctcacagggcccctctactcctagccagggtttgcaaaaccgtcagtaaccgcgcggttaatggtaaaagaaaaaccacgataacctccttaaattcaaataaatttaaaaattaatttgaaattttgataaattttacacggtttcgtatggtttgccatggttaccgcgcggtaactgtgtttaccatcggggcgtggtaacctcggcggagggggggggggggccacgatagatccacattgccgggaggctggggacaagacgacagtgtcctcggtctcgtctccacggcgcgggagcggagcacggggacgaactcagcgaagcagagcggagcaaggggcggcgacggggtcggtgacgcagagcgggagacggtgacgaggtcggcggcataggagcgggagatggcgacgaggtcggcggcgcggatcgagaggcgattctcccttgaggtggagccgacgagctcaccggttgccgctgaatcaagtttccctggcgacgaatcgagtaagctcgccagagtgggtctacctcctcgccctagtcctctcctcgttcattcctctccgcccattcctccctagccatcgccatcgccgcgacccaacctgtccccgccgctttttcccgtcctttggcttctcctcttcctcgtcagcacttggcacccggcgagctccaagcctgctcagatcttggcatggcagcgtgggttggcggggacgaatggggaacatttgggagtagcaacagagaggggaccgctcgcactttctttttcaggcatgaggaacccggaccctagctaggaggcgcaaaccttgcaagggcacgagacccacctccttttctcctccacgtcaacaaggtaacgctccacgtaggagcattgtgaaaggcttaatagttctctgctcttggactcagtccattgtactaggaaatcgagctcatgttagagcataagcaatgggtggcttagggtcgtgcccttgctcatggccgtccgacccagttacctttcgcgcctgagccgtctcctctgctaggcacgcgactactagcggggggacacgcccctcggtcacttttcgttgagacggcgtgggggcacgtgttgggtgcgcggtggcctggcgtgtgtccagtggacaccgctcccacccctatattttaccgttccacccctcgccctcgtcgttggaagtaggcaagaggcacacggcagtgaggaggagctagaggaggcgaggtggtggaggagccggcgaatctgcgatgaccccgcggtggcgacggccccacgacggcgacgggctcaccagatccagggccggcgacgaccccgcgatgccaacgggcggagggagagcggtggcggcccggcactcaagatccaacctccgcgtgccgctcgccgtggtggaggagctgttggccaccctgcgcaccatcggcggccccacgaagatccgcgacagcgacgacctcacggcagccgacgacgggagagagaggccgatgggagagagaggccaccccgcgctcccctcgcggtcgtccaccccgcgcgctgctcgcctttcgccaccgtgcaccgttcgccatctatggaggagacgagaagaggagaggaagagacaaggacggcagcgtcggtgggctgatgagccctttagctgggctatagaagggtactttcataatttttcactttgtgggctggagtatctttatcaagtggtctcagattttgaagaacccattggaggtatccttcagtgagagatgagttccctagaaaggatcctcagttagtgaagacactctaagggtggctttggatgtagatgcccttgtaccacgtagaagctcttgtcaatatcgaacaattccattgtgtgtgacaatcaaggatggtgcttttccgctgggccattttcgtgggttgttctgacaatggcccgaacttatgaagtctgacaggcagcatttgttcagtttctcgtttcatgggctgcatacctgatggtcatcctcaatagccaggttgcaatggaaatccatcatcttggtgcacgaaatgggaatatgggatatcactacatcctgggcctagggttaccacatttagggtccatttgattgttagcaaaaacataggaaattagaagattttgatttgtatgaaaaacatagaattttagaagattttaatcgtataagaaaaaaatccaatgaagtcttttgaagcaaaggattaaatcatatcttttccttggagattcgtacggaatgaacaatcctatacgtattttgaagaaaagttagcaagaattctaatatctttttcatccgattcctgcgtttatctcacgtcctaaccaaacaaccatcttgtgtgtttgcaattatctattttgcatttgttttccttgtcaaaaaccttttttttctattttttttgttttttttaatttttgttttctattcgtttcaaatgaacctttacactttataagctcagtaagtcattgacttgtccctagactgtcatatgttcctaagtaacctggatcacaggacgagctaatgttcctgtcccgggaacgaagcatctgtttgttcctaagtaacctggatcaccagatgagctaacgttcatgtcctgtgaattttgttccctgatcgagggtcgtgattgatgtatgggatgagcagggtgttgcacctagcacaaggccaatcgtcatagtaaaaaaactagaatcggtgggtgacccgaccgacctctcagttcactagtcttggcttgggcggtcgtagttcacgtatacatttatgttattattcctttctattcacaaggtgaggaatagtatgatggttagggaatgacgtgttggaaatatagtcatatatcggcatattttaatccaaaatattaagacaataataatgcatgaacaatgtgggatgatctagtgataaaatctaacataacaggagcatgcttaagatagaataagcatcatcatcatacaaagaacgcaatagaattgcgactaacaaagatatcaaaaattgaaataacagtaaacgcagaaggttatacctgtgaatgtccctccgctggattgtgaggctgaaggtgtggaagaaccccacggcctcggcccggcgcgccgcgcgtgtggctttccgatccccacctcaaccggtcaatagggagcctccaataactccctatttaagttgagatactcctcttttaattcccaaggtggtattattatccttaacatttattatgggcctttgagatttaatagaataaatcgggcctagcccatttattctaacatgacattgtcaactcgctagccaatcagtagcgattttgctatatatttgtcgacaaattttctcccaaaaatttgacagatgtaattacagtacaatcgtagtgtaattacgctgtaacttgcatgtaattacactgtaactatagtgtaacttgtatgtaactttcaaaaatctctctgtaatatgttatttcggtaaaatggaggttgtgggaacaaatccttatacatatgtgtgtgccgtgattttttttcttcctcagcaaaacaaatcttgtaatagatataatgatttaaaattacatgaaacttacgtacaagttacactgtagttacatgcaagttacagtgtaattacatataagttacagtgtaattacactacgattgtattacaattacatctgtcaaatttttaggagaaaatttatcgccaaatgtataggtggtcccatcagtagtggtttaatgtctggttcacctgaaaaccaactggttctctaaatgcatgtctagcgagttgatttttaggtgaaccagatattaaaccgttactgtttggcagcgagttgacaacgtcattccctaaccatcatgttattgctcaccttgcgagttgactagagcatttgtgcaattattgttcattcatccataatacaaccaagcaggagtggggtttattatcttccgatgacccaacctaaaatatttttgtatttgatttagtgatcatagccccaaaaccccttttgccaaacaccaggtccctcacaaatctatctgtcgactacagaacatcgacaacgaccatcacattg

SEQ ID NO: 23670 - DNA, 13123 bp, Oryza sativa
atatatatatatataatactaagaagtgtcatatctgatattagattaggattttatatgatagaaggagacatatttagatttgtcatactagaatgtatcatatttgtactccctccgtcccataatataagggattttaagtttttgtttacactgtttgaccactcgtcttattcaaaaaagtttggaattattattttatttatttttgacttactttattatccaaagtactttaagcacaactttttattttttatatttacacaattttttttttaataagacgagtggtcaaacagtgaaagcaaaaacttaaaatctcttatattatgggacggagggagtaggttgtttttttatatggaatggaagaagtaatatggcaaattactgcagacactacacgtaccaaattaccaatcactccgcgtctccgccactccggagtcctggcttctgaacggcagagttggcaaaggcagaggatcactctcccctgcactgaactcaaatggagaaaacgtaaaagactggacaaatgtacgggatcccattgggtggattcgagtggttgttggattgatgtgcatcccaattgatagagatgaattcaacggagttaactcgaatcaatcagcgagtactcatatctactcctagtactgtttcgcagttactacagagttgagtggatgagcgcatccaggccagatcgagaggcgaagactgtgaacgatctactactgcccgcaacgccttcaatgcccctcaccaaccctaataacttcccggcgccgccccgccctatctactcacccgaccgtcctacgtttgcttccctgtctaccggccgtcgttaatcctctcctctccgatcgcttctcagtttgggattttctttttcccctttcgcttcacgtgaacggccggcacggcgtcgcgtgcgtacgcgatgccgcggcgagaaaaaaagcaacgcgcgcgggttgcatgtttgttacacgcgcgtggcgtgtgcatggtgatgttatgttacgcgggggtgagtagaagtgtgtgtaccttctcggagatggcgtcctggacgacgaggatgtcgctggtgatggcgttgatgacctcgccggtggaggcctcggtgtcgaagacggcaatgtcctggtccagcatcgaccggaggtacgcctggcgcatcttcgccgcctgccgctcccccgtgtgcatccagcacgccacctctgcacgcacacgagagccaccaatcaaccaaccaccgcgcgcattgcatcgctcgcgtctcgaaatctacgcatgcatcagggctcaccggtccacgacgagaagagtatgacgatgccgaggtacacgaagtccagcgagtactgcatgcacggggagacaaggtgagcaagcaaacagagtgtgacatgcacggtgcagtgcatgctcaatgggtggatcgggatgtgttactagctagtgtaccttggcgacgcggccggagacggtggtggggaagaggtaggcgaggccgatgatgttgatgagcttgccgaagaagatgaagaagacggggacggaggcgccgtgcgcgcacgcgcccagcgaccccaccgccatcagcacgtagtcccaccggtcggcgaacgagaacagcttcaggaacggcaccttctccaccttcgccgccgcctccttctctccctgctccgccttcttctcgccgccgccgctctgccgatgctcctgcacgccatgcaccggcgagctcatcttctccgactcgctaccaacaagatcgcgtgtgcgggtgagccaagacgctgtgtggcgcctgcgtggggggaggtggtggccggccgcgcgcgagctgaggctttaaagactaggagtacacagtggtacagctcctccagttcacttcactcgctgtcgtcgctggaatggtggcggccgtaatttagcccgcgttttagccgtggcagcagcgagcaaccggccgcgtcgcgtggtggtagtggtagagaaagcaaactgagactcatcgacgggtggggttggttggagtagatggttaatgtggtgcgcgaggtttgactcgccttgtgctggctactggctagctcaggccctcgcagtaatgggtgctgagcaagttagtgctgcagtaaagagcgtttgtccaaatgctgttgttggatttgactcgaaaaatcaatgctttggcaaatccccaaaaattaactgccgtgagtttacctgtgggatcctagtactgaatgaatggctgaacagttaatattagcggaattgttaaatcacattcgacattgattcttaggagttcatttttttttcagattactgatcttagtatttgctttacaattcgtgccctatgatcccgacaaacgacattagagttacgatctagggtgcggggaggagattactatgcttacagatctggccaggagatacgatggcttgacagtggatggtggagatggacaaaagacgaggcactagagccacagggaagaaggagggcggtgggctagcgttgacggtaaagggcaagtgagcttgtggttaattacgggtacgaacaactgcatatggctgggcggtgtgtggcacggggtggcgcccgacaggggcggtgtaggcggcgctcctttggtgaataaggacggccggatgcaggcggcgagaggtgacatcggcgctagcaacacgtgaggagaggggagtgactggcgccggcaacatgagaggagaggagaggtgacgccggcgctagcagaaaggggaagtgcggcagcggcggcggccctagcagcggcgcactcggaagtgcggatacaacagaaaggggatcgagagcagcagagagagatgcggtgtggatgcggtgaggagtttagggttttctctcctcagccgccggaggagttgggcttgggccttggctgttgtctgttgggctgggtctttactctagtctctaggagtcctagctcgttaaggctcgcaagcagctcgcgagctagctagctcgttatctctaacgagcttaaaagtcagctcggcctgttacgaaatttaaatgagccgagtcgagcgagctaacgagccatgagttttatgtccacctctaattgttagtacctctttgatttggtcaagagtagcggtgtagtcgagagcaaaattggcttgacacacaaatctgcggctatgcagttgttcgtacccatataccgtactgttataggtcacttctattgaaaaaaaacaaattgttagagtcagagatcacggccctttattccccactttcaacatgtctctccaacgcaacacaccaaagctcgtgtatgattttaccctgtagtaagatgaccaaaaggaatgaagaggtatctaggcgagatataatgatacatgtcaacggtttaggtcacgactatagtatttgcatggtatggggatcgtcggtaccagggaatatgcgagattaaggtaaaagagacaaagacaaggattttatacaggttcgagccccttatcggacatgtaatagccctactcctgttggccgaattcggtgttgctcctgttggacaagtacaatatttgggataacttatctagctgtcgtcgacttggtggcatagataaccaacacgtagtcaacgacatggtagtctttctcctcgagtacgaactcatcgagatcagaaatggcgctaaatccctcttgtcggcctccgcatgcaccatacagggtctgtctacttgtctaggcttatccctgatgttaatgtctagcggcgtgtgttggcttgtgtattgtgtgtcaatctgttgttgtgtcttgttggtctctccccctcctcctagggggtcttgtatttataccaatagatatcctcttgttcaattaaaactagagagaccaatatggatacaattcgagtagtacttgtcgtttccatatagaactctacttatcattccttatccggaactctttctatatacgagatatgattccgtataagacttaatatatggttgggcctgtcgtgcttagtcatctactattaggtatatggtatctataaccatgataatactacttggttaatccagggtgggatcagtttttgcatcacaaagccataaataatctaacatcagtacgtgggacattcttgcaaactgaaatggctggttgcagagttgcagttcgcaaacttcaaccttatcaggcgggctaaaactaaactgaatacgtacttaccctactcaacagtctatcgtatacacacatgtgaaatgcctcacatgccatggtctgtctacaagcagaagcagggcaacgccaaggaggcttttattttcacttgatctgacaccggagcagattcgtcttgtacttaatgatatgtaccgatgcgaggccttaaatggccacaagggaaaaagggggtgatttaaatgtggaaggaaaatgcagttgaggacgggatagatgggaggaggatcatggcctgatgcgatcagataattgccgaggtggacacttgtgccgcgcgcagcaaaagaatgccaagatgctgggacttttgctgagagcagcaagaataccaacatgctgatgactgatgagaaattgagaatgctttggttgctttgcttttcccatcgctgtggcgacggacacgcaattgatggtgaattgacgacaataatgtgtcgtttttgcccttgatttttttttgtcttccgttttttattttgtttagttcacatcaaaattaaaagtttgattaaaattgaaatgatacgacgtaaaaattaaaagtttgtacgtgatatgatagaaaagttggaagtttaaagataaacacggtgatgcgcgtagtgtgccaattcaggatgcgcaactaccgttgggattggtggttgcagaaaggcatactagtacttgcttctcaccgaagtacactgcccgtctgcattgcaagtttgcaacttcgcaagacaggcacagcgccggaaactgtaggcatattaagagaaaagaatatgtgtacggccatgtttccacgtcaaaataaataagaatacagcttgatgctcgtcaactttaagtatatagctgagtaaatgtgcatcagccaattgcatcctgcagaccagatacagattcttctgctgaagagaggaaaggccagggaaggaagagaacgagaaggtgatgattcttttttaatagaacgatggatttctgtgccaaaagcatactggaagttggaagcagcatttgctactaaggcccaggatcagtatgaagcccagcccatgtaatgacatggcagccagtaaaaggccggctcctcggtgttttgtttaggaataagtccatttaacctccctcatcttgtgcttgtctgaataacatcctccaaccggaaaaccggatatattacctcccccaagtgttaaaaccagtacaaaacaactccctcggtggtttttgacggtggttttgctgacgtggcagcctagtcatcgaaaaaaaattaaaatattacgtgagggcccacatgtaagtgtcatttctattcttcctcctccactctcctctctcctctcccttctctctccctggacagggcacggccaggggaggtgccgaagcgcgcgagagggatggggaccgccggaggatgcgggcgcgtgccgcgaggaaggggctcgccggccgcggcgcccgcggggagggttcgcttgccacggcaagcgcggggggcacggttcgccgggatgggtcgtcgaatcgccgccactgccgtcgccgccgacgagttggctcctctcgtcgccgttggtccaaagggaggagacggagacctcgctccccttgtcgaaatcggcggagctcaacctgggcattgctattgctgcctttggctccacctcccggatcggcaagacaacacagcggctgcgcaaatccggcagctcagcggcggtctccgccgcgggaggccgtggtagtggccagcggggtgacgagaggatctagtaggcaccggtgtctcgacatcggtggctgcaacgggagtcgtggtgggagacggcgaggcggtgatagtggccatcgtcgggcggcggcgcccgggtgtaggatcaaggaggccgactagagggggggtgaataggcggttttaaaacttagtggcacttaaacaaaactaacctaagttgctaggcaaggtaaggtgcaaggttaactaagcaactaagttaagttttgcaaacctaggtgatatgggctcaaatatgtctctatgaatgtaaatagaacaaatataaatacaacaaataaatgagacaagagacaaggaatttttcaccgaggttcgaaaacttgccggtttcctaatccccgttgaggcgagcccaactccaccgctcaaccacgaagccaccgcacgcccccttcgtcaaggggtgggcaaggcgggagctggtgtcacgcccagaaatttaacccaaatttccagactattttgcgtattaaatccctgtccaggaccagccagggtacacaaaacgacaagtaatatacagttccaaacgtaaataaagcgtaaagtacttacggaagaggcacttagtcctcacaccgaaacagaacgacagcagaggaaaaaggtgatcctagcggggcttcagctccactccacaggcaaaactcaactggggtctgagccttggtcctctaactccatcttcagctcagaagcactacacttctgaaaagggggaataatagcaagactgagtacaaccaccgtactcagcaagccacaccaacgatgcagatgtgcaaggggatacaaggatggtttgtggctatttgcataaaggcggttgtaaaatattttattgagcaaaacagtaaaactgttgagtaattaaagtaacattaaatctccactgatcaacgctacaccacgttgaacaggcccaaccaacccacctgaactacagtgtattgggtcgatttattaagatgggactaatcacggtgaatctggtcgaccgcccataaccgcgggcacggctattcgaatagctttactctgatcagaggtgtacaactgtacccacaagacacagccccacgacacgtttccgtgcgccgacatgccaccatgacataccggaaagaggtcgtgacaggacccttcgcataaccccctctagccaagcacaccacacctcaggtttcacccccgtccccagcgggcaacgggcagtcccctctcgtgcctaggtgaatccggaagcgacagaggccgtcgcagggcccgccccgctccatcacgcccacccttgcctggatgcgtcgactagaggaaagctacactacaagcccagccgttgcccacgctggcttatggtaagtacgataagttcttccagggcatcccacgaaccggttcttaactgccatgggtgcgaccagcaaaaccatgcacccacagcccaccattcaatcgcattttagttggataattacgaccatgaagcatggccagatgtctcgagcacgcagctcaacaagatactagaatgtctaatactgcaattatcccatcgactgagctagtggtaattaagcatggctaagcatatagttctagctaggtcatcaaagtaacacaagctaggcgatttattacccatggttgacaaaggacatatatcaagtaaacatggcacaagcgagtagataggtaaaaccctgaccccatgtaattagcaaaacatgcatatttatttgcaaacagtaaaacatttgtaaattgggatcaacatgctcaaggggaatgtgtgacttgccttgcttcttcacttggattttctgaactcttttcctcgcgaccgcgatcttccgaaacgacggattctatacgctggcacgcaaaacgaggaaaaacctaataaaaacgaaggaaacagtacctaaaaaataaacaaacatgtagaactcaattttagatgaattttgcaatttgaatggcccaatttggagttcgaatgaattagatatgaattttagaagttttgagccactaaatgaatttctataattattaatgatttattgcgcaattattaaatattttcacaaatgaaaaggactgccgctgacgtcagcaagagagggggccggcgccgacaggcggggcccgtatgtcagcgagacgaggtggcggtccaccgtggaccgggaccacaaggacggtccaccgccggtccacgggttggacggcctagatcggccaaggccgatcggacggctggggacggccgggcggcgcgcagacggccagacaaccggcggcggcggcggcgcaacgcggcgctggcacgggaggtggccggcgaagaggaaaaggaggagggaggcggctcaccgagaggcgcggcgacggagggagcggccgcggaaggaggcggcggcgctccacggggtgaagacgacggcggcgattcggcggtctccaatgaaggtgaaggagcggccggggtatgggggaacgcggcgaacgcagtagaggcggtggtgtggcgcgaggtggcaaggaacagcggtaagaggcggccgaaggcggcaaacgcggcgacgtcctcggcttcgcggtggagatggtgttgctgcggtggaacgggaaaacgaagcagaggccggggtgctacgcgatgcggcgaagccgacggtggcggtggcgtggcttggtggtggctagggcggcggtggcgcgctgccggagtcggcaaagtggcggtggagctcgggttcacggtggaatcggtgcccgggtggtttattgcggaagcggagcggtggacgggatgcgacaaagcgcggcgaggccggcgatgcaagcggcgcggcacggggacggcggtagcggcggcagcggccggctggagtccgccggcgagcggcggcgcttgggctcacggggaggagggggttccgggcatgggggagcttgggagagaggggaaaacggaggaggggagcacgagggtgctttatatagggctcagggatggagatcgtggccgggagaggtgggatcggccggtgacgtggggaggtgaagtggagctcgtggggaggtcaaaccggcgccgtttcttgcggggtgagtgggggaaaaggtggaggacgtggacggggtcgtgtccacgtggttggatgcgagctcgggtgcgggagggcgccggattttgcggcgacgtgggcggcaatggcggttggggttggccggcgagaggtaggaggaggagctgacaggtgggaccgccagtcccacctgtcggccggatggagagagaggagggaaaccgggggacgtaaagtagactttcgcaaggcgcgggccggccgagagagagaggaggcgcgcggcctgcgggagaggaggggaaggcttgggtcaagcccaaaagggaaggatggagaattaaatttgttttctttttatttaattggttaaatgatctttgtgactttaaaattatttcttgagctccgaaaatttgcggaaaaatccggagagtattttagggcacaaagaatattacaaaatattctcggccaatgatttttaaaggaaattttaatttcctctataatttcacttgattaaattgatttaacttttaatataatttcttgaaatgcattattaattgatttttaatcccgaacgaaaatcggggcgttacagctagcccacggagaagactacccaagcctcgatcactcggggtagttcttccttcactccgaaggtggtgaactccaaaccactcacaaacggcgccgggcctcctccacaatctcctcggagaggtcaccgggcaacacctacacaagccgtctaggaggcggcaacctccaagatgaataagtctaggatgcttgccgaggatgatcaagtgccacactagctataacaatgaagcaatgcacttggattggcttaactcactctctaacactagataaactaagtgcacaagggtgtgagagctcttgcaagggttcaagataatgcaatggagtgccaaaaccttacccttgttgctggggagtgggtatatatacccccaaccaccaaaactagccgttggaaccgaaatccccaactttgtgctctgccggtcagaccgccgttgtgaggccggtcagaccggactactttgtaacggctagggcaatcattgagcccactcaacctggccggtctgaccgcagtgtagtggccggtcagaccatccacggctcggtctgaccggttgcggctctggcggctctgtatcgccaccaaaaaccagaccagtgcaacagaccagtggggccggtcagaccggctaacaggcccggtcagaccggcctaaggcccacggtcagaccgcaggtcacttttcagctcaaccgaccgttagtaaaacgacgatatctcttgactcgggtctcggaatttggcgttcttggactttatggaaagattattcaaagggctatccaacccatgaacaatccatccaagaaacacaacttttcttagggagaaagggctcacactccaaaggatactccacaggacataaccacatgaggctacccaaacctataggatttgcccacatctctctttgtttaggacttgagaaaactcaccacacttggctagacaagcccaccaaatacacctacatacatatgaactaatatggcacatgatcatccacaagctcgcttcatagacccctcttgatagtacggcgtctatctagcaaatccggtctacaccaaacaccaagaccgggaaaagactaagaaaacattcttagctacattatacctttgccttgcgccatccatcttggggtcaagtttgagtcgagatcaacacttgtgaccatttgattcaaccatgtttataccaaggtatttaccatcatttgtcaagactttcttctcatcacaagcttgatttcattcttgccaacatggcgatgtccttggcttggtgaccattaacccatggtgtcatccattagcctcatcatagtgggacctattccttttcacatctcaaaggagaacattagtctcaacaaatcggttgtcatccttcacttgatgaccaaccggttgcatatgaaagatatggatatgtttgttgagtattcattaacatcacaagtgtcatatactcgtatgcaagctcaagtgcaaagatccgatataaataataggtgaacaacatggatctaaaacatgcacaataaatgtataggatttgctccccctaagtatatgcatacaaagaaatataaaagagagacaagtgtatgcataagtaaagaagaaccaatggggtttatcctatacacatagagaaggcatatgtagtaatgatgaagataaacaaaaaaacacataccttcatgatctccatgttctcaatgtaaaggagactaaataagataagactcaagtaaacattagtctcactcttatataacaataacattgaaatcatatatatgaacctatcaaaaagtaggagataagaagtgatatatatcgctttatctccatgaatttcatccttgtcatgattaaggtccatcaccaaagaatgcatatctaccacatctcattatcgggaaataaccttgttgaaaacttatgtaaaagagaggttaatcccataaacatcggtttatcatctatcaccaaagtaacaattacacaaattgtttaatccaagatctttcaatattttctctcttttgtgatagataataatccgatataaacaatacaaagagatgagatgaaagataatttcaaatcaaggtagagatcttataatgaacaaaatatagaataagctccccctcaagatgtgtatacatatggatatgaaggaatgcatatgcacataatcaatcaagatcaatgaggaagctcacactatattttggatctacaagatagaccaagttagaatatgtgaagtttaatacatacctcctatcatttttactttcatatccaaataagactagtcaaagaaagactcataaaaatgttagtctcatataattagatttgttattaatcatcgaaaccaaattaaggcacttgaacttacaccgggcttgttgaggaaaggggaaggggcggcgtcaccacaggacccgcgtgcagccggccgacaatctcctccccacacgcgtcgtggccggctgacgagctcctccttccatgccagcaaggttgtcggcaacgtcgctaccgagcagcagcagccgtcacggctgtcctgccgttcccgccgagctcccgccgctcttccgagatcctgccaccccgccactctcgccgtcctgccgctcccgctgagctcccgctaccccgcctgtcccgccgctcccgccgagctcccgccgccccgccgctcccgctgttctatcgctctcgtcgagctcccgccgctctgtgatcccgccgatgttcctacgcgttgccccgccatcctgctgccgccgagctctctccatctcgctcgccgccgagttcatttatttttattgttttactcactgacatgtgggtcctatttaggtttgttttattttagtgccacgtaagcgccacgtcgatgccacatgggaagtcaaccgccacgtaagtgccacgtaggacaaaaccgcctccgaaaccaccgagagaggtgatttgctctggtttttagagaagaaggaggcgttatacccggttttccggctgagggatgttattcacgcaagcgcaagagatgagagaggtaaaatggacttattccttttgtttatctgagatgaatttcagtgagtgagaaccataacgcacatgacaatcgtagaaacaactcaaatactcaatttgacaatttgttccactatggtgaaaaaaatcagcacggtgatttggtaattagagatcaaacagccggaa

SEQ ID NO: 23671 - DNA, 2981 bp, Oryza sativa
tatgcattttctcaaacaccttgtgtgcatgccggcagcttcttctccgctccaccaacgccgccgagcttcgtcgttcctccatctctcggtaagtcctcgctcctatgtcctctcctagttccgtagaaactagagccccctttaatttcgccaattagcaaccgtagccatgccggtccggccaccgttttgccgccggtgagctcgctgtggacaggccatcccggagcccctcctctccatctagccagcaaaatggaaccctcacacgccatagatgctgacgccctcaccaattcggtcggaaaccctccttatcgccttagcacctagctacccgtgcccggccatggcggccttgcagcgccgctcgcccccgcgccgtcctgcgccatgaccgccggcaggtgtgcgccgtgaccgccggcaggtggacgccagagccttgccgctcccttccctggtcgctgtcgggtcaccctcgcccgggcctagccgcgccgtgctctgctcggccgatggctggaggtagaagacgataaagaaagaacgagagagagagagcagtcgggcgcacttgtcaatggttcataggatttgctttagaaaaataatccagtaggaaagcaaatacaatcctaaaccccacatgtcagtcacttggagttttggataaagtttaggaataaaaataatggattaggaacagtacctttttacaatttctcagatttattcaaatttgaatctttaaactagcgtaactctctcattttaactcggatttgagtgaaacttgaacctaaatttatctaaattcataagctttccaatggtatataattcactatttgataaaatacatttataattattaaataattaatactaagataatgcataatagtcaacttaaaaatgtgctaacaaataaaattagtactttacagtaaggtagatgtaagaatatttgtctttaacatgctttgtcaatgtaacaaccacacaaactaattttaaatgatgtctcaaattaatgtataggaagatactagtactattaaatggttgtataattaaaccccatgacttatagattatttaaataataaagttagccttataattaggtaaatcaaacatgaatacagatagatgagtctttaatttatttatgaggaataggtacagaattgttatgatagaaccacccaaataaggttgagtcggttagcatccaataattactcaaagagtaaaatcacttgccaacccacttaaatcacatatattgtacaatccatttaaaatcatacataataacaataacctacctttagcatatattaaaccaaggagtatatgacaaacatgtatggtggataaatactagttataaatcttgacctcatataattatagttcaactgtaagttaggattgttcattaagggataatctgtaactataatatgattaacctaaacaactctaacatacaaagcatggataattattaaccttttctaatttatcgtgacaagtaaaatattttcataattaaagcaaagcctccatcaataaaataataatacaaatggttccctgcgattaattgcttgatcccaaatccatctaacaacagaacctctggtatgtaaccgtgctatttaatagatgcatatatagccataatccttccatagccatttgatagaataaatcgccgattagccaaatatatatgtatcccataaatgctatgttggttaactcctaaatcgaccacgatgacaatagaaagattaagaagccttagccctagcatgattgaaatccattagcaaacacgaatagtatgagcaaccctaggatcgaccccaacaattatcttttgcttgtgcatatttgcttgttgtttgaatattggtttttctcgcgtattatagaccttgtgtatcggttagtcgtgaggcaacgtctacaacttccaggaggtgaaggttgatcaagattatatcaataataagaattatcctgagcaggcaagtcatcactattccttgaacatgttgatcccaattgcgaaaattattttgtttacaaataaaattgcatgcaatgatgaacatcctacttgtgattatgccatgccttgattattgtttacccttattcccttgtaaccatgattacgtatgagtccctagtcaactatgacaaatgcttagaaatgctactctagaatcatgcattctcatatttatcaaatgctatatgcttgggcaattacctttgggaaggtattgagatgcggcatgtggagacataagcgccacattgccatgatgttgatgacatgatttgtgaaaggagaaataaaattaaacaactgttttcgactggggcggacggaggatttgggtggtatccggaaaaggctagtatcgtccccggtcaattaaggaccgagccatgaagttaagcatgaaactacccccgtacaaccgcacttctcgtatgggtatagacctagcggagtagatagctgagtggaatccatgcatagtggtttcttgatgtgtgaggcaggggctctacggtggggcagccattggtagaaccgcgaggtgggtgtctacagtggtgtcgccatcggtaggactgccatgtgagaatttaaacataattataacttaatgcatgtgtgagtctttccttcccgggtgcgctagaactcctctcactgctagaaaccgtgtacgcctagagtgcatgaggatgtaaagttcatggagcgggtattgccaatgtgaggttatcgaaaagctttgccgtgacgcgtctcatgtgttgggacgggctcatgtgttgggcagtcgcgaagtgcgggtaaagtgtacatccactgcagtatgagtaaaccaaatctattcgaatagccgtgctcgcggttattgagcaccgggacgtgtatt

SEQ ID NO: 23672 - DNA, 5036 bp, Oryza sativa
tcaatcctacttgaaacacgttataaaaatatagtcaaacccacatgtcatccctatccatcttcttcctcttttcccatctccttcgccatcatagtccaacgagctaggtccacttgtcatcacctctctagggcgcccctgtctccttgcagaaacactattcaaacaataccaacgagagagagcaagagatatgagagaaagggtcattcctcaaggcgacaactttgtgagaggatgtcgtagcgaagactcgggaatgatgagatggcagtggactggatgacagaggagcttgccttgaactagctgttgaatagtcccacattggttgtggaagggtaaggatcctaatatataagtgggggagcccttcgcctcaataactagcttttggggtgggaaagaccctttacgatcctacactagctcccctattgagctctctcagtggtaccgagctcgaacaaccaccacggactcctccaagctgcaaggccatttgccacaaccaccatgtaccatagttattaagaccggacaggataatgaactggtcgagctctcggttcacctgtttgatggtccgaccaggttaggccggtccaaccgcggttcgatgtataatatgacgtaaatgtctcgtaccaacataagtgaatagatggagggttggctagcgcgtgctgctctcagccatgtgaccgaaggtcgaatccccactcccgcaccctcttctagcgatttttggtggggtttgctcagtgggcctcgcctcagcccatcaacaaaagccttacccggtctgaccactccagttcaaagcccggtttatataaaaaccgccggttcaattgcacacccgatcttttaagaggaccggacctgtcgaggctgaggttccggtttttcccggtcgggtcctaataactatgccatgtactagtccgagttgcaaggccaccatttgtaggacccccggcaaccaccaccatgggactacttcggagctccgagctgcctctaggagagcgtcatcgctatgggaagagatggtgctgccatataatttccctcctctctcaccatcctacttcccatctagctcatcatgtcagcaccaccttgcagtcatgggagtggaggttgcgaatgtgacgaaggttgttggaggagaggggagaaaaataaaaagggaggaagaagatgaggagtggttaaatggtggatctcatgccatattggacaccacataattccaaggccactgtgtgttgagtaaaggggagtaatttgtctagttttaagagttagtggatgttaaatgtccggtttcatagttgaggaggttagtcaagcttaacgcttttccttatagcctttacacctccatacttaggccccctttgaattggaggaaaaatggagaaaaaacaaaggaattgaaatcctacactattcatgcctttgattcgtaggaacaagaaaaggaaaaacgtaggaaactttcctattcctacaattctagagcaaaaacgtaggaaagttaacatccactctaacctcttggaaaactttccttaagtctatctctctcatttgattcctgcattttttctgcggtctaatcaaacagtcattcctatatttttcccgtgttttgcaatcctctgttttacattgcaatcctaccaaaatccggggttttccaattctccggtttttaattccggcgattcaaaggggcccttagagtgtggatggtaaggggctttatcaaacttgatgtagcaagaacacacccgacctaagagtcgataatcttgtctaacccgatcctgatcgccttcatgagcacaaaataaatgcctatgatgtgcccatcgagaacctaatttccaatgagtttttattgggtattccaaaccattaatagtatatccatgctcacataattaaaccaaactgacatttgaccacaagctagcaaatattaagtcatcaacattccaaaccaaagaatgcaatttacaacattctaaataagagttcccaaatcagcattaagcacaagacggaaacacatatatcaggtcagagcaaggattatccatgggcataaaacaatacccatgattgcccgtcaggatctgtcataccaaggttagaaagctactccgtttacccatttaggttcgatttgaatcgtagaaataaaaaaaaaacatagaaatagaaaaaatataggattctgacatgaatgtaagtataaaacagagaatttgcaaaacacaggaaatacatagaaatgatcgtttgattggatcatatgaaaaacaatggaatcggatgagagagatagactcaaaggaaatttttgaagagctttgagttcttgctaagtttcctctaaaatctctatagtattgtccattacatagaaatttcaaatgattagataagattcaattcttcgatttaaaggtattcatataatttttctttagtattgaaattctccaaaatttatatgtttttcttccaaattaaatggaccttacgattgtttccataactttgagacaagttgctatatgtgtttgctctaatgaaacagcaaaccctacaattaggcgagttgggatcattctgacttttcagcccatcctcccttctgacagctcgattacgcaacgaagaagagcccactcagctttctgatcatttttttgcctgttctactggatgcaggccgagagagagagagagagagacctggtgccactgaacgaagcacagctatagttttgctgctctagctctccctctctctaccgcttgcatagtttcattgcatggctgtctgggtggccgcacatcccaccactgttgctgtgcctaaaccttatcttttccccatataaccagctcacaccgctagagagaaagaaacatacgcatcccaccaacgcgacgagctcagaatctcagaagtcagcagcagcaaagaggcgataagtagccgcggctcaccgttcgttgcccaaaaccacccaaaagcgtagcgacacacgagaagccaccagccaacgtagtacgcgccgagagctgaggccatccacgacacacgaacatgagcacactagtagacgcgctgtgcgctccctgcagcgacaccgcgctcatctacgacaccttcaacgcctccgccgccgcgagcttcctcttcgacaatgccgccgccttctgcgacgctgacatcctcggcgccacggcgacaggggagaaggaggcgacgtcgtcggccgcggccgcggccgcggaagccgccccgccgaggaagaagcggcggcggcgcgcgaagagctgcaagtcgcgggaggagacggagacccagcggatgacgcacatcgccgtggagcgcaaccgccggcgccagatgaacgagtacctcgccatcctccggtcgctcatgccggagccctacgtccagagggtacgtcgtactacgcgcgccggcacacgtctctctcgccctctctgttttggttttttttagcaaaccgacatcgcttcgtgtcaagtgtttctaccctcttttgttctgtatatctgcgttgctcccatttgtcaaagagcaagaaagcgatgtcggagcaaccggcgaggagaacggcgatgagagaatgtttggccgaaagagactcccccgccatggcgccattgtccgccgttactcatggcgtatcgtctctttactgctcaatctcttttcatgaacagaagcatccattctttgcacagaaaccttctgcccattaatgtgtctcccctatcattaattcactcgtacacagagagagttgcctggatgggcctgtcatgtcaaaattaatgcgttcttgatcatttttaaatgttgtgtagggcgaccaggcgtccattgtgggaggcgcaatcgagttcgtgaaggagctcgagcagcagctgcagtcgcttgaggcgcagaagcgaacgctgctccctcaccacaaggcgagatgcgacgacgcaacgccgatgcataacgccagcggcagcaacgtcggggccggcggctgcatggagcccacgacgacaacgagcaactgcagcagcagcgtcaccgaggacgcgccgtccgccgacgcgcccccgttcgcgcagttcttcgcgtacccgcagtacgtgtggtgccactcgccgcgcgactccaccaccaccaccaccgcggcgtctgcgtcggcgtcggcttcggcgtcgtcgtcgtcgccggccacggtggcggcggcgctccagtcggagcaccgctccgggttggccgacatcgaggtgagcctggtcgagacgcacgccagcgtccgtgtcatgtcaccgcggcggccagggcagctgctcaagatgatcgccggcctgcaggccctccggctcaccgtgctgcacctcaacgtcaccacgctggactcccttgtgctctacaccctcagcgtcaaggtacgcctacgcctatcgcctgcgtctgcagccgtgcactgatttcagttcttttttcaacaaaagtgcctcaattttcggccactgcatttcacacgcatttcgcgctgaaacgcgcaccgatgcagtagctagccaggcgctcaaaccgagcgataccaccagcacaaacgtttgtgcgtgtctccatgcatggtttgggaatcatatgaggtcacttcaaccgagttaattaatcggagtaatctgggacgattattagagacggtgtttgattggtatagcgtctgaaaagaaaacgtgtcagatattctcctgcctgcactgcacagcacaggcataggtcatcgcatcaaggacgcagtcgtgcaggcccccaacagtataatgaacagaaacaagagatgagcagagatggagatcgcttcacccatcggctttcgatcaagcatcattgttcgagacgcatcaaaatttctcagaatttgatcgaatccgatggacctgactaggagcctgag

SEQ ID NO: 23673 - DNA, 2749 bp, Oryza sativa
tactccgtaggagtatttcagtaggagtaggcaggtcgggcccctgcagccaaaggacttgtcaagtccaaacggtgagtagcgcacagtactactagtggtctggtagtcctagtaagcactggcctaagctgtgcgtagtgtgacgcttcacgaaaaagctactgcatcagtcagtccagattgtgtaagaaaaacgctgccacggagaatcctttctgctgagctgagccatgctatagatttcgactggcatagagaactgagcagaaaaggctatagctacagtaggcacaagtatagcgctggtgttcagccatgacagtgtgtgacagttccccgatggaatctgtgtgggagtagtgctaatctacggcattttttttgcgacttagtggcagattccttcgctccctaaccggccattgcacatgcacgcaatctcattagttctcgtctaatcctaatcttgtctttgcgtggccgtgtgctgcacaggtggaggaaggatgcagcctgacgacggtggacgacatcgcggcggcggtgcaccacgtgctctgcatcgtcgacgcggaggcggccgcctcggagcatctcctcgcggcggggcaactggccacgacggcgacggcggtggcgaagagagaactcgcgacgtacatgtactgagccgctccaagtgccttacatgtcgtcgtttgtgtggtcgcgtgtactgtatgccgcgctcccgtttttctcccctttttaggctcgtcacgtttttgctgtgtagtggcccggcaggttagatctagttctagttgtactagtagatgcaaaatgctatgtgtccagtagtcccagcctctcgacgagggcgtacttgtctgtttctcgttctgaaaacagaatgttgtattgctgtacctgtacagtatcctgcctcgcctttctgtaataagagcgactagcgagtagcgacattggaaggaacagttcgagattcgtattatccgaacagggccttatgagggtactagcttacaatgggccatgtgagttaccactgcttcatggcaagggcgggctttagcctactcaaagtccatcaaccgtgtgatttgctcgatttgtgggccgtgataaggccgaaggccagcttgctgccaaatctccaaccagccccgccgaccaccaggagcaaatcaacccgtttgacggtttgaaaagtggtctatactgatatggcatgttgatttggtccacctgtgatgaatgaactttgtatggttatatttgtagtaccacatctatatctatacctaatataaatattcggattttttctgtcgtcacatccttttcaccagcgatttttcgtcccgcgttatccgatttcttcccaccgcacacaagtatcacgcacaaaaaataccccacaccgattcctacttcaatttgccacattaagcccacaagcccaaattaagatagatgaggcacttcaatatttaagattggaaacagtaaaattagagaaaaaaaaataaacgaaattgaaggggaaaaaaagcctaaagtaaacaacaaaatcaaaattgaaatccaataaaacacgcatggattcccagctgattcgtctcaaattcacctcatcgggcagccaattcatcacaaattcaatcacaagaaaagagtaaataaaataaaagagagggaaaaaaagatcaaacccaataaaccacccacagattcgcagtcgattcatcacagactcgccttgtcgggcaaccgattcatcacagattcaatcacaacaaaggggaaaatcaaaatcaaaaagaggaaaaaactgcccaaaaaaaaggaggggatggtggagcctcagcgagcccaccaccgccacccgcgaccgctctcgtcgccgtcgtgttcaccgctgcagcactgtcacaccctgaagttctcctcccaagcctaaaatttaatttataaatgaccctaagaaaatgctggtgcaaatcaagagaaaaccctaagaaaataatacaaataataatcgaatctggcatatggaatttttcttgagttctacatgtagaaattcattaacaggattttagtggaattttcagagccctagaaataaatttaaccaattaaaattgagcaagcaatattttaattccagggaaaatccttttcttcctttttctttttctttttccccttttcttttcgggtgggccgccggcccattctccttcctcccctcccctccactgggtcggccgaaggccaaagcccagctaggtcggccgcctccctcctcccacccgggacgccgacaggtgggccccacctgtcgggcccgtctcctacctcgcgcccgcgccgccgcgcccgcaaccgccgtcgcgcccacgcctccgcctcctccgggccacgtcggccacgcccgcgcgtgcgccgcacctcccgcgcccacttccccctctctctcgtccgctcccgcgcccgagatggccgggattcgattttcgaatcccgcctctctctcctctcccactccccgcgttggccggcggaatcttgcccctaccggccacgtccgggactcccctcccctatttaagcttcccgtcgccccctctcgctttttccctatttcgccgaactccctcgtgctccccatcgctcccgcgccgtgaaaccacccgccgccgccgcttccgttactccggtcgccgctagccgccgctag

SEQ ID NO: 23674 - DNA, 11371 bp, Oryza sativa
ctcccgtggctcgccgtcgccgttcgtcgtcgtcttcctccgcgccggccaccctcggtgaggcgtcgtctccccctctactcccctccctctccctcctagtgccgcgccgccgcttcaagtcatgcgccgtcgccttcggctgccgccgccgcctcccgtgccgccggtcgccgtcgccgtcggccgcgtgccgtcgccgctagccctagccggccggccagctttgatgccgagccgagcccggcggccgcctctatcgccaccgcccgatcagctcggggccgatctgggccgtcggtcccgtggaccggcggtggaccacccgcatggtcccggtccacggtggaccggccccccctttgagccgctggccagtgggacccgcctatcggcgccgccccccccttgatgacgtcaaccctgaaagttattgcgcaataaattatttaaggactttttgttatagtaataaacacagtgaatcttctaaaattcataactaattcatccgagctccgtttaagcccattcaagtctcagtaaatcaagaaaaatgtgtagactccattaaaaatggttttgttctctgtttcagtagtcttatagtctatttgcaatgtttgccttgtatgtcgctagattccggttcttccgacgctccggtgtacttcgaaatagtcgccgaggttcctctagcagcagagcaaggcaagtcatgtttgtcacttgatcatgttgatcctatattgcaaatgttctaatgttttctttcaaatactgcatttgttttgcaataacactatgggatgtttacctattgttacagccatgctattttggtaccttgctcctttgttagctcgggttataacatgaatagacgttagactaggagttgcttagccatgcttagttcaactagcacacaatggggaaatctcatttaaaatatagactgtaggttcatatgataatgttggtttagtaccaccgctttggtgttggttaattaaaatgaatcacatggtgggctgtgggtgcatggttttgcttgttgcacccagagcaattaaggaccggttcgcgggaaaccctggaagaatttatcgtgcttaccacaagccagcgtgggcaacggctgggcttgtagtgtagcttttctctagctgacgcatccaggcaagggtgggcgtgatggagtttggatgggccctgcgacggcctatgcggcttccggattcacctaggcacgtgaggggactgcccgtcgcccgctgaggacgggggtgaaacctgaggtgtgatgtgcttggctagagggggttatgcgaagggtcttgtcacgacctctttccggtatgtcgtggtggcatgtcggcgcacggaaacttgtcgtggggctgtgtcttgtgggtacagttgtacacctctgatcagagtaaaactattcgaatagccgtgcccgcggttatgggcggtcaaccagattcaccgtgatttgtctcaccctagtttagtcttttgaaattggatagtataggtggacgattaggcctgtcgcaacatggtatagcgttggacggtggatgattaatattgattaattattacgactgttttcttctttaaatttctgtttataaatgctcgctttatgcaaatgaaccacgctagctctcctttgataattccctgcatcatacccctattccggtatgacttgctgagtacagtggatagtactcagtcttgctctatttttcccaaccccagagtacgagtatgtgtcagatggaggtttctccgaggagtaggcttcgtccgtgccgtcgaggatgcctgtggagtggtgttcccgctgcagttctagtcaaggcttagctcctgttgtctttcgttttttccgctgcatttttgtaagacttttataatgtttgtaagacgtggatctgtatgtcaactttgtcgtttatgtaccccggccggtcctggacggggattttaatgcacattctgcttggaattctattcgggaatttctgggtgtgacaagttggtatcagagccgaccttgatcgtaagccaaatgggaaaaacctaagagccctctgaatccttttcattccatatgttctttgtaattggatttgttccgggaaaattgggatctgttcttgtggttcaagggaaaaatcttggtcgctcgtttaagtgagatttgtcaaaacaagtcagtctagggttttagtaaaattattgagatttattcgtcagtcagttgggatttgatgggtgaaatgcattaggtcccagctcaggaatatgggttgcaaggtatttatgctcttattgttattattagtatgtatctaatttccccatcattttatcgttatgtaagtctgtcttatttattcgccctcatgcaaaatgatctatacataaaatttcgctcttattcgatactcttatttgagtcctttattactttatttaaattggatttgagcatgcattgatcctactcctttgtcttctctagatggccggccacccacccaaccaccacggagaaggcatgattgactttgtggcagagttagcacgtatgacgctggtggtgggctaccccaacgcgccggagtacacgactgttccaccgctcagtggcgagcttccccaccgtgtccgcttggaggtccatggctacgtggggacttgcctcgctaacatggtggttgaggcgtccggaggcacagcagatcacgcctgtcaggaggcagcatacctgatgatggccagactacgggagtgccacaactacatcttccatgacacggcgtatcgatttcaccctcgtcgagccagcggtgatgatgtcagtaccttccgtccaatagccggcgagaacgacaccacctttgatcacatgtgcgccgtgatgagggggatggacaggatgcacttggacctgcacaagacgtccaaggccttgaatgatgggaagctcatgaggatcgtcgttctaaaggacgagatagcgcgcttgaagagggagaatgctcagttaaagggtcttcccgcgccaggaggagtccggatccacactacgccccgcaagtcgacaacggcacccgtgcgcatccagcttgcgcccaggaacccacctccgcccgcagttcccgcagcacctccagttccgcccgcagctccagcagttcccgcagctccagcgccagctccagctcatgttcccgtgtcagctcctgcatccgctctctccttcgcgcctgcaacagccgtcaggggccccgccagtggcaatggaggttggttgccagctactcccagtggcagtcgcgacctcagcagcagcagctccagtggctcagagctgggtagcggcgagacttatctgccaggctccaggagtcgctcagagggacgtggtgacgagcaggaggacgcctttgactccaccgaccgcaggagccgttccgagcattaggctcgttttccattagcttatcgactgtctagcttttgcttgttagtttgtgtgtttaggttgcttgcttggggtcagtcgacggtcgatatcatgtgcctatgatatggctgtctcaataaggatttttgcttgctgtttcaagtgttttaattcagatcagaacaattgcagtttaaatttctatataataaagcttagttcctgagtatctgtttttctccgtttccccgtctactcttcctccagatggtctacaccaggactggcacccgcacgacaggtgagggcagcaacggcgaagaacgcgctgatggtgtgcatcccaacagtgattccggcaatggtccgccaccacttcccaagaatccgacgctagcccaagtaatggcacatcagactcagatgatggcagccatgatgcagcagatgcagcagcagcaccagcagatgcaccagaggatgctgcatgtcacgctctaaagttcccctttccagctttaaaatttgtaaaatgaatcgtccgaagaaattgttctttttaacctagagatgaatccctaattaataaatgcaaataataatcagaatcgacatgtggaatttttcttggattcgacatgtcaaaatatgataacatgatttttagtggaattttcagagccttggaaataattttaaccaattaaaatgagcaaagggcaatattaaatccctggaaaaatcctttcttctttttctttttcttattcaccaagtttcttatcatcttgggcagtcggcccagtatattcgcttcccgcgccggccttccatcggctgggccggcccaagctaattcctccctcctccctaacccctccgggtcaccgacaggtggggcccacctgtcggccccttcttccaccttccgccgccgctccccaagccggcaaccgccgagccgcccacgccgcccgcctgccccgccttccacgccccactccgcgccccgcgcccacgtcgccgcccaccatccccactcctcccactcgcgcgtgcaccccgcaacggagggattcgaattcgaatctctctctctctctctccattccccacgtcggcgagaaatccggccgcctcccggcctcgtccgcccctctcgagcccatataaaccatccctccactcccctccaccttttcctctttccaccgctccctcccgtgccctctatcgctcccgcgccgctacaccggccgccgccgccttttccactcctccgggcaccgctcgccgccgctggagccgccgctgagccaatccgccgccgccattagcttcgccaccgccaaagctaccccggccgccgcatccccatccaatcccgtcgtcggggcccgcttctccctcgtcatggacaccctctttccctctaacctctcacacttcctctcttagcgtgtcccggagctcggccgccgttcgccgtcgccctccggttgctcaccgtcgccgtttgccatcttctcctcccgcgccagccgaaccccggtgagaactccctccccttctcttcctcccgcgcgcgccgccgctccccgcatgcgcgtcgccgcgatgcaccgtcgccgcgatgcaccgtcgcccgcgtcgccggccgccgccgtcttctcgccggccgccgccgtcggtggccgcttgccgccgccgccctcgccataaccggccggccggcttgaagccgagccgagccaggccgccttcctccttcccccaggagccgtcgcccggagggccccgcctgccagtacccctccctcccccttgagccgctgaccagtggggcccgcatgtcggcgccgccccaccccttgctgacgtcagccctgggatgaattattgcgcaataaatacattaaggctttttctttattagtaaaaacacagataatcttctaaaaatcataactaattcatccgagctccgattaagtccattcaagtctcagtaaattcataaaaatgtatagaatccattaaaaatggttttgtttcctgtttcagtagtcttatagcatgttttgcttgtgtgctttgtttgtcgcgtagatttcgcccgtttcgtcgattcgcggtttctcgaagacgttgctctggttccatcagtgcgagagcaaggcaagtcatatattataattgatcatattgtacccaatttacaaatgtcccgcatttctattaaatattgcattgttttacaatatcatgtgggatgggtcgtattactcagctatatgttgtttcccttacgccattgataacttgggtattaaaatgactagatgttggtttaggagatgcttagccatgcttagttcaactagtgcacaaaaggggatcacattaaaacatagactttgattattggcaatagctttggattagtgccaccgcaatggtgttggttaattaaaatacactacatggtgggctgtgggtgcatggttttgctagtcgtgcccatggcgattaaggaccggttcgcgggatgccctggaagaacttatcgtacttaccaaaagccagcgtgggcaacggctgggcttgtagtgtagcttttctctagccgacgtacctaggcgagggtgggcgtgatggagttgggtcggccggggtgtccggttgatcggcttccggattcaccgtggcacgaaaggggggctgcccgttgcctgctggggacgggggcgaaccctaaggtgtggtgcaatcggttagagagggttatgcgaagggtcctgtcacggcctctttccggtatgtcgtggtggcatgtcggcgcacgggaacgtgtcgtggggctgtgtcttgtgggtacagttgtacacctctgatcagagtaaaactattcgaatagacgtgcccgcggttatgggcggtcgaccagattcaccgtgattagtctcacccctagtttagcttaatgaactggtgtagtttaagtggttggttgggcctgttgcaacgtggtgtagcgttggacagtgattggttaatactgcttaattgctactactgttttactgcttttaacttctgcttttaaatgctagctttatgcaaaagaacctttagcccccttggatatatcctgcatcatacctcctcttccggtacgacttgctgagtacagtgggtagtactcagtcttgctcttttcccccacaccagagttgaagttcttctcagttggagatgtctcgaagaggttggtttcatcgctgccgtcaagggttgcctgtggaatggaatcgcccactgcaggagtcaagtcttcaggcttagctcgcttttatcttttttcgctgcatttgtaatcttttatatttttgtaagacgtggatctgtatgtcaacaattgtcgtttgtgtaccctggctggtcctggacaggggtttaatacacattcagcttagaaattctggttcgtgaatttctgggcgtgacactgcagcacgccgaacagcagcaccagcagtttggtccccctccccctcagtccaagttgccagagtttctacgtatcaggccacccactttctctagtaccaccaaccccatggaggcaaatgactggctccatgccatagagaagaagccgaatctcctgcagtgcaatgatcaggagaaggttgctttcgccacacaccagcttcaaggtcctgcgtcagcttggtgggacaatcacatggccacccgcccgccaggcactgaagtcacttgggcggagttctgtcgtagcttcaggaaagcgcaggtgccagacggggtcgtggcacaaaagaagagggaattccgggcactccaccagggcaacaggacagtgacggagtatctccatgattcaatcgcctcgcgtgatatgcaccggaggatgtccgtactgacgccgagaagcaggagaaattcctagcaggtctggatgatgagctaaccaaccagttgatatctggagattacgccgactttgagaggttggttgacaaggcaatccgtcaggaggatcagcgcaacaaaatggaaaggaagaggaaggcggcgcagttccggtccaaccaagggagccaccagcgaccgcgcttcactcccggacagcagggtagacctaccaccctgatcgtccgccagcaccgccctttcaatgccagcaacttccatcagggcgccagtggctgtcagaaccaccatggcggtcagcccaaccgcagtgcagctccgtgcccaccaatggcactagcacagtcagctacgtccgcgcaagctaagaaggagactgggacaaagccagggtcctgcttcaactgtggcgagcttggccacttcgctgacaaatgcccgaagcccaggcgtgccgggccaaggtttgtctaggcttgtgtcaaccacgcgtctgcagaggaggcgcaagcagcaccagaggtcgtactgggtacatttcctgttaactcaatccctgcaatagtactttttgattctggtgcaacgcgttctttcatttcaaagaaatttgtggggatgcatgggttaaggaaagaagagcttaatacaccaatgagggttcataccccgggaaatagttcaacctcggtcagttttagcccttcagtgctaatagaaatccaaagatcaccatttctagccaatctcattcttcttgaatccaaagacctagatgtcattcttgggatggattggctgaccaaattcaagggagtcattgattgtgtgaatcgcacagtcaccttgaccaacgagaagggagaaaccgtagtgtacaaatcactagtctcaccaaagcaaggggtctccttgaatcagattgaggcggaaatcccagtggtcaccgaggagaagaattcgaggaaattggaagagattcccatagtttgcgagtacccagaagtctttcctgaagacctcactaccatgccacccaagcgagagattgaattccggattgatttggcaccgggaaccgcgcccatttacaagaggccgtacaggatggcggccaacgaactagtagaggtcaagaaacaggttgatgagcagctgcagaaagggtacatttgaccaagtacttcgcattggggtgctccggtcatttttgtggagaaaaaggataagacgaagaggatgtgcgttgattatcgcgcactcaacgaggtcacaatcaagaataaatatcctttaccgcggatcgatgatttgtttgatcaactgaagggagctaaggtgttctctaagatagacctgcgatcaggctatcaccaattaagaatccgggaagaggatattccaaagatggctttcaccactcggtacgggctgtatgagtgcacagttatgtctttcggacttaccaatgcacccgcattcttcatgaatctgatgaacaaagtgttcatggaatttctcgataagttcgttgtggtcttcatcaacgacatacttatctattcaaagtctgaaaaagaacatgagcagcatctccgtctggtgctctagaagttgaaggagctccagttatacgccaagttcagcaagtgtgatttttggttgacggaagtcaaatttctaggccatgttattacagctcagggtgtggcaatcgacccatcaaacgtggagtcagttccaaatggaccccaccgaagaccgtgtcgcagatttgaagttttcttggacttgcaggttattaccgccgattcatcgagaacttctccaggatcgcccgacccatgacttagttgcttaagaaagatgagaagtttaaatggacagctgagtgcgataagagctttgaggagttcaagaagaaattagtatccgcaccagttttgattctgcccgaccagatgaaagacttccaagtctattgcgacgcatcccgccacgggcttgggtgtgttctaatgcaggagggcagagtggttgcgtatgcctcgcgacagttgcgtctacacgaagggaattacccaacccatgatctagaattggcagcagtggttcatgctttgaagatctggaggtactatctgattggcaaccgctgtgaagtatatacggaccacaaaagtctgaaatatatcttcacccaaccggacctaaatctccaacaacgaagatggttggaactaatcaaagattatgacatgagcattcactaccacccggggaaagccaatgtggtggcagacgcattaagcaggaagagttactgcactgccctatgcatcgagggcatgtgtgaggaattgcagtaggagtttgagcatctcaacgtgggaattgttgaacacgggttcgtagccgctctggaagcacggcctacgctcgtcgatcaagttagagccgctcaagtgaatgatcctgaaatagcagagctgaaaaagaacatgagtcggaaaggctcgggatttccttgaggatgagcatggcacaaactggatggggggaaagattgtgtgtacctgacgacaaggaactgaaggatatgatactcaccgaggctcatcagacacagtgttccattcacccaggcagcaccaagatgtaccaagacctcaaagaaaagttttggtgggccagcatgaggagagaaatagctgaattcgtcgcactctgcgatgtttgccagcgagtgaaggtagagcatcaaaggccagcaggtttactccaacctcttcaaatcccggaatggaaatgggaggaaattggaatggattgtataacaggactgccccggacatcatcaggtcacgattcaatctgggtagtcgtggatcgactcaccaaggttgctcacttcataccagtgcataccacctatacgggaaagaaattggcagagttgtacctggcaaggatcatgtgtttgcatggggtacccaagaagattgtatctgatcgagagagtcagttcacctcaaaattctggcagaagctgcaggaagaattggggacccgtttaaatttcagcacggcctatcacccgcaaactgatggtcagaccgagtgagtcaatcaaatcttggaagatatgttgagagcttgcgctcttgattttggtggagcttgggacaaaagcttgccatatgcggaattctcgtacaacaacagctaccaagccagtctacagatggtaccgtttgaagctttatactgccggaagtgccgcacaccactcttctgggatcagacaggcgagcgtcaactgttcgggacagaggtattagcggaagcagaagagaaagtcagaaccatcagggaaaggttgaggattgccctgtctcgacagaagagctacacggataaccgccgaagggagctcacttttgaagcaggggattacgtgtatcttcgtgtcactccgctccggggagtacaccgttttcagacgaaaggcaagttggcaccacgcttcgtgggactatacaaaatcttggaacgaaggggggaagttgcttatcagctagaacttccatccaatatgattggcatccacgacgtgttccacgtgtcccaattaaagaagtgcttaagagtacccgaagaacaagctgattcggagcatattgatatccaggaggacctgacatatgtggagaagccggttcgtatacttgataccagcgaaagaagaaccagaaacaaggtcaccaggttttgccgagttcagtggagtcaccattcagaggaggaagcaacctgggaaagggaagatgagttgaaagccgcccatccgcacctcttcgccagctcctccgaatctcagggccgagattccgtttaaggggggtaggtttgccacaccct

SEQ ID NO: 23675 - DNA, 1043 bp, Oryza sativa
ttctccttcctcccctgtcacaccctgaagtttcccccattttcttgctttaaaaattggttaaataaattgcccgaagaaattatcttaattaacctagagctaaatccctagttaataaatgcaattaataatcagaaatagcgtggtggaatttttcttgagttccccatgctccaatgcattaacaagatttttagtggaattttcagagccttggaaataattttaaccaattaaaaatcaccaaagtgcaattttaaatcccaggaaaaatcctttcttctttttctttttcttttccttcttttttctctattgggccgtcggcccactccctcccacgctcggcctccttcctttgggccggcccgttcccctttcccctctctccgggacgctgacaggtggggcccacctgtcaggtcgtccccttcctccagccgctcgccccacgacggcaaccgccgccgaaaccgtccgcgccgccgccttctccgctccacgccgcgcccccactccgcgtccccacgtcgccgccctccccgccattcccgcccgcccgcacgcacgcccgcaaatgggcgggattcaatttgaatcccccccactctctctctctctccccccacgtcgtcggccaaatcggggggtttcccggccatgtccacccctctcgagcccctataaagcttccccgcatctccctctcccttttccccctttcgccgcgctctcccgtgcctcctaccgccgccgcgccgctcgacactagcgccgccgcttgctgccacctccggtcgcgcgccgcagccgctagagccgccgccgcgccaagccgccgccgcctttagcattgccgccgcgtgagccacctcggccgccgctcggtttccgctaaaccccaccggaacccggttctcctcgcacaccggtgccgccgccgcccgtccgcccctcctcatcgccaggtcgttgccgccaccttcatcctccgctccggccgccatactcgccggtgaggatcccccctcctccctctt

SEQ ID NO: 23676 - DNA, 4080 bp, Oryza sativa
tttctttattagtaaaaacacagtttatcttctaaaattcataagtaattcatccgagctccgtttaagtccattcaagtctcagtaaatcaagaaaaatgcaaagaatccattaaaaatggttttgtttcctgtttcagtagtcttataccatgttttgcttgtgtgctttgtttgtcgcgtaggtttcggccgtttcgtcgatccgcggtttctcgaagacgttgctgaggtctcatcagttcgagagcaaggcaagtcatgcaatacgtttgatcatattgtacccaatttaccaatatcccgcatttctattaaatgttgcattcttttacaatgtaatgtgggatgggtcctattcctcagccacatattggttaccttatgccattgataacttgggtatcaaaatgactagatgttggcttaggaaatgcttagccatgcttagttcaactaggacacaaatggggatcacattattacatagactctgactatgggcatagctttagattggtgccaccgcaagggtgtcagttaattaaaatattctgaatggcgggctatgagtgcatggttttgctggtcgcacccatggcagttaaggaccggttcacgggaaaccctgggagacttaccgtgcttaccacaagcgggagtcggtaactgcttgatctgaagtatagctcgaccctttcctaggcaccggtggcgagggtgggcgtgatggagttgggtcggccgaggtgttcggttgtccagttgccggattcaccgcggcgcaagaggggaccgcccactgccttttgaggggtgggggtgaaaccttagcgtggtgtggatggttaggggagggttatgtggagggtcttgtcacgatttccccctttgcagtatcatggtgatacttcggggcatggcgacatgtgtggaatcgtgtcttgtgggtacagttgtacacctctggccagagtaaaactattcgaatagtcgtgcccgcggttatgggcgatcaaccagattcaccgtgattagtctcacccctagtttagcttaatgaactggtgtagttcaggtggttggttgggcctgttgcaacgtggtgtagcgttggacagtgattggttaatattgattaattactacagctgttttactgctttcaaccactgctttgaaatgcctgctttatgcaaaagaacccctagcttccttcggttatatcatgcatcatacctcctcttccggtatgacttgctgagtacagtgggtagtactcagtcttgctctcttttcccccacaccagagttgaagttcttctcagttggagccgtctcagagaggttggtttcgtcgctgccgtcaaggtttgcctgtggagtggagtcgcccgctgctgaagtcaagcttcccggtttagctcgcttttatctttcccgctgcatttgtaatcttttatatttttgtaagacgtgggtctgtatgtcaacaattgtcgtttgtgtaccctggctggtcctggacagggatttaatgcacattcagcttagaaattctggttcgagaatttctgggtgtgacatcccctcccctccgctgggccggccgaaggccaaggcccagctaggccggccgcctccctcctcccacccgggacgccgacaggtgggccccacctgtcgggcccgtctcctacctcgcgcccgcgccgccgcgcccgcaatcgccgccgcgcccacgcctccgcctcctccgggccacgtcggccacacccgcgcgtgcgccgcacctcccacgcccacttccccctctctctcgtccgctcccgtgcccgagatggccgggattcgattttcgaatcccgcctctcctctcccactccccgcgttggccggcggaatctcgcccctaccggccacgtccgggactcccctcccctatttaagcttccccgtcgccccctctcactttttccccatttcgccgaactccctcgtgccccccatcgctcccgcgccgtgcaaccacccgccgccgccgcttccgttactccggttgccgctagccgccgctagggtcgccgccgcaccgcgccgtcaccgccgtcgggttcgcgaggccaaactccacctcgtccgccccttccccgtcgggattcgtcgccggaattcacatcccctcgcgctccggtgagttctacctctaccgccgccttcggccatggatgccggccgccgtggttcatctccctctctctaatctctctctcttccttccttagggcaccccgaagcccgtccgccggttgccgtcgtcctcccgtggctcgccgtcgccgttcgccgtcgtcttcctccgcgccggccaccctcggtgaggcgtcctctcccctctactcccctccctctccctcctagtaccgcgccgccgcttcaagtcatgcgccgtcgccttcggccgccgccgccgcctcccgtgccgccggtcgccgtcgccgctagccctggccggccggccggctttgatgccgagccgagcccggcggccgcctctatcgccaccgcccgatcggctcggggccgatctgggccgtcggtcccgtggactggcggtggaccacccacgtggtcccggtccacggtggaccggccccccctttgagccgctgaccagtgggacccgcctgtcggcgccgcccccctgatgacgtcagccctgggagttattgcgcaataaattatttaaggactttttgttatagtaataaacacagtgaatcttctaaaattcataactaattcatccgagctccgtttaagcccattcaagtctcagtaaatcaagaaaaatgtgtagaatccattaaaaatggttttgttctctgtttcagtagtcttatagtctgtttgcaatgtttgccttgtatgtcgctagattccggttcttccgacgctccgatgtacttcgaaatagtcgccgaggttcctccagcagcagagcaaggcaagtcatgcttgtcacttgatcatgttgatcctatattgcaaatgttctaatgttttctttcaaatactgcatttgttttgcaatatcactatgggatgtttacctattgttacagccatgctattttggtaccttgctcctttgttagctcgggttataacatgaatagacgttagactaggagttgcttagccatgcttagttcaactagcacacaatggggaaatctcatttaaaatatagactgtaggttcatatgataatgttggtttagtaccaccgctttggtgttggttaattaaaatgaatcacatggtgggctgtgggtgcatggttttgcttgtcgcacccatagcaattaaggaccggttcgcgggaaaccctggaagaatttatcgtgcttaccacaagccagcgtgggcaacggctgggcttgtagtgtagcttttctctagctgatgcatccaggcaagggtgggcgtgatggagtttggatgggccctgcgacggcctatgcggcttccggattcacctaggcatgagaggggattgcccgtcgcccgctggggatgggggtgaaacctgaggtgtggtgtgattggctagagagggttatgcgaagggtcctgtcacggcctctttccggtgtgtcgtggtggcatgtcggcgcacgaaaacgtgttgtggggctgtgtcttgtgggtacagttgtacacctctgatcagagtaaaactattcgaatagccatgcccgcggttatgggcggttaaccagattcaccgtgattagtctcaccctagtttagtcttttgaaattggatagtataggtggatggttgggcctgtcgcaacgtggtatagcgttggatggtggatgattaatattgattaattattacgactgttttcttctttaaatttctgtttataaatgctcgctttatgcaaatgaaccaccctagctctcctttgataattccctgcatcatacccctattccggtatgacttgctgagtacagtggatagtactcagtcttgctctatttttcccaaccccagcgtacgag

SEQ ID NO: 23677 - DNA, 2703 bp, Oryza sativa
cccccctcccccctcccccccgattcgcccaccatcttcatctccacctcccgctcaggctcggagagaagcgcccgcagcggcagcagtagaggaggtcgtcgcacggggggaggtgagtgcctaagtggagcgtcgaagcggatcgaggaggaggaggggcgagcttgggaggggaggagaacggacagactgagggagatggggaagagaacataccggttgctctgtgggtggatacgtggattaggaggatgctgctctggtggatggataaggacgacgggttgcaaagcactgtagcaaaagtattgtaccttaaaataatattcagggtaatgtatggagtatggagaacgctgtagcgattgatcgatctggaccattgatgaaaatgcatgcagattgtgtttagttttctttaaacttctaaaaattccgtcacatcaaatatttgatacatgtatagagcattaaatgtgaatgaaaaaaaccaattgcacattttgcatttaattgcgagactaatcttttgaggctaattacgtcatgatttgataatgtggtgctataataaatatttgctataataacggattaattaggtttaatagattcgtctcgcagtttacaggcggaatctgtaatttgttttgttattaatctacgtttgatacttcaagtggtgtgtgtccgtatacttagattgttttttaaaaagaacaaaaacacggccgcagtcgtcaggagcagttgcaattagagctgcacccaatctgaatcctcgcttaagctgcatattgcagctgttaggcattcacagtgcacagatgtcgcgttctgtcccaagcaaccacgttgaagattcatcgccacgcacacgcccgttgttcccaactgaaaaccacggagccaaatgaagctacacgttctttgttagaatttggcaggcatggggcgaagcacggggcaagcgacgcattgggagggggcgtggccccgcgcgacgcccctacacccgtgcaacggcagaagcggcagcatagggagaagaagagaagatggtacggcggtggcctagggcggagaagggaagatgttgacggcggaggaagaggcggcgacagatccagcacctaacctcattgtcatcgtcgttccgtgctgcctcgaagcgtagcagtgacaaatcatccatgtcgccagaactcccgttgcgccgtctgtcatggacgcaccgccgagccctgccgccccccgttcacgcgccgtccgccggtcggaggaggaggagaggtggactcccacccaccgcttgggccacaacaccgccgctccactccactcgctgttggtcgaaggagaggtggactcctgggcaccgcttgggccacgccgctagagctccgctccgctcgttgctggttggaggaggagaggtggattcctgttgccgcttgggccgctctatgctgctcaccgtctgtcgtaggagaaggaggagagatggagccccacccaccaccaatgccgcttaggccgcgttgccgccgctccgctccgcttggccatctcccttccactcgccttgctttctcatgtgagtcgacatatgattttggaaaccagatcgcacgcttgcaacacgagagttgacagcttaagaaagcacgcgtcaccactatgagattgagtaaatatgcaaaagtaatcttatctgtcatgattatcattagttttatgataaacttacctattttaaatatagattttttttgttaatcatacaaatttatgtccatctattcttacgtgaaagtaacctaatgcattcacggtttgttcctcccatggtacaatcgttacgctagcgtgttagaaacatcgttcatatcatacacgtacacgtggaataattgtccaaacaaaaagaaaaccgttgtgattattattgtcatattagaccgcttaaaaaatcattcagttaaacattatccaacgcggcattacccggtgcaacgtacggacattttgctaatgtgtgtatatatatatatatacactaatataaataggaggagttttgccttccaatcctaccggtgaaatcaaatccaacgacccgtgatcatctaccttacaatccaatggctcaaatcactccccaacgtcccacgcggccacgcaacgatccccttttagtttctgcgctctctccctctgaatcccctgatcccccgatcccatcccctttcccttgcgaaccctagcctcttcctctcaagcgccgccgcagtcgtgttgcctcccgatcattcgccgccagatcaccgtctttgctgtcctcttaggtgcagccgctacgcacacccacggtgcgcacttcctttccccggttccccagcccagtgctgtccccctcccttcaccgtgcaaaaccctaagcgccgccaccacaagcaggtaccgttgccgccaggagatcgccctcatgtcacctcgcttcgccagatcatcgacgcaccgcctcgccgtaccggtcggcgtcgactccgcacacgcttcaggtctaccacgataactctttctaggtagtcccagcatattgaaggtagtaccattatgaactttctcatgccatggctaactatcggcctatcattgtagcattatatatatctatatgtgttggggctgcaggaa

SEQ ID NO: 23678 - DNA, 10736 bp, Oryza sativa
tccacctgtgcaaaatttccaaatcctgatggtcaattggttaccatgcactatatatgaatcgatatggaatgatgcatgctttattgttgcagttaatttcaacagagtaaaacggaaggagcgatggattctctacgccttgcaagtgcaatatgaaatgctggggatacgacatttcagattcatgcttcaagtgatcaccatatgctgataagctgagagtatgctcaaatgctcagccagaccttctcttagaggtaattcaatcatggatactttctatttttctctgcaagttcacttgcaatatattagtaagaaaattatatatattgcaaagtataggagccattgtcatttttgttatatatggcttccatcacccccattgattactggccaagacatggtatatgttttttccatgtagattgagagggaaaatatattatgactcatgatgttttaaggtccgaattaacatttcaaattatactgtggcttctgactctgtagatcaaaattattgcagttgcattatgccattagatgatttcagaaattcctgaacattgcataattcactcaattgacttaacgttgcctctgctttagcttgtccatgccatgctttgtttggatagttccaaagatatatttgctattgatcagaatcaaaataaaactcacaaagtttagagcttgtgtgatatatgggagtcctctgtttatatctcttgagtgttcactctgatataatcatgcaaattggagggtatgtgtgtaagcgccagtttgattattgtatttacccaaaaataatgattgttgtatatttgcatattaggttgtgcaatgcatactctttgagatgttgcactgcaactgcacaaatcttgatctttttttgtgcctgtattttcaccaggtttcacttgatgaggaaatgagtttatagatgtgtagagaatctgaaaaagatatttgggaagagatggtaggtgcatttcagacaatggcaaggagccaaggaggtaatttctgttgtgcgttatgaattagaattagcgatctaatctgtactgcacgttttccatttcttgatgagaatgtgatcaaaacgactttattggaaataccaggttcagaggttgcttaacttgatgaacctattggaaagggtgacaaagatttcgacaggtttttacttgttttgagcttaatccatatgggaactgttacagtaaactgaaattcacatttgtaattcacatgtaaaccattgacatgacagtgaaaccactggccattttgctggtatagtgatattagggccatacatgaattatagttcagtctttttttataaactttggtgatgaagttcagatctcttcctgttactgtattgaagctgcaatcatttcaaaaatttcggaactcaattctttttctgatggtagcagtatacatgtcattttgctggttttttttctttttttcttttttgctttaaggggatcagggcaggacagaaagaacactatgaccatgtccccatggcccatgtccatgtacgcatcaagctcccaagtgataatctgattgcctgctctgatcctaggcgccggcggaatcaaccttgacccatcaatgatggtcatcccccattgacgatcacatggtccacagagatcatggtgtcttggacaccaccattatttctgacggtttaagctttgtctccacaattttttatctctgtttttgcttctgatggtttatacttcagagtttggaactgaatgctcatactctagatgaattggtcatgtacttgaaattttgcacatttggtactgaatctgcactcaaagtgggtttcttgatttggttaggtacattgtataagctaggttcgcattttgtacaattgattaaataatatggtttgtctatttgcgtagcttcacgctattctgtctgtaaatctacagagcaatatatttgattgaatttagcttagccttttcgtgcattgcacgtgcattgttactggccatccatggaattaaatgtgttgtagaaactggcaagtgtcaattcagagtgaccatttaggattccatggtgtgcatgctttcttgtggcatactggtcttaggagttcaaatagagttttagtgcatagattaaagtgagataaaagtttatgcctgaatatataatttggtcatcttaattcattttcaggaatgttaatatgtatttatgtttccttttttctcaaaaaataaaacccaccgcagagaatgtatggagcataaatatgttctttctaacagaagttttgagtacttaattttgtgcagctttcttaaactagctagccctagaatgatcctgtttgttgaattggctgtaaagatggagggtatctaggtaaaaccgtaaaagatagacaatttatcaaatgcatcgtctactctgattgtatattcgtaaactattgtcctttctagggagtaatttgggtaaattcagctgagggaataggaaaattctccttttccttcaaattattgtgttttacggcaatgagaaaataagatcaattgtattctcctgtaaggaattaatttgttcttctgtaagaaaagaatgctctgatagttattctctttactacttactgtatcacttctagctgacaatcatttaaatttagatcacaaatgtttgtttacggaagtagcagcagtgcaatgtatgaattttaggtggcaatttcgtaccttttgcgaatatttttttttacctttgctggtcagaaaattgtaattgaacacaaggtttttatagatatcactgaccaaattgtcatcttaggataacctataaaattttgttctccattcgtaattgtttgttagttatatattgtcaacatgtgccttgcacgtgaatgataactagtacttcgataatatatcacattttcaattaattttttacttttcaaacaaatacgagccattagacgtaaaattaaatagtgccaacagtcaatattaaaaggcaaccaagtttggatgaagaaagttattaaaagcaaaggttactgctaaatctccgtattggcaaaaaagggctgtgattcgtgacagactgatagataaagacaacaaacatgcagtgatatgtgcagagcatctggaataggagtgaaatttactccaccaagaatctttggagtttttcaagaacaagaatcaaacctagatgaccatgcaaattcatccagcaaactttttccttgcggttcatccaggtttaagttttatacttgatgtgaatgcttgtatttatggataacttttttagtggtaggcgatgtacccatttacaacgagatgtctgatgattttgtctatctcaagatatatcgaatcagctttttggaagtacttgtatatgtagggtttgcatgtgtattcatatgagtgagtatgtgcgtattaattatgaacacttgcatgtatgctgcggttcgaaaaaaaaacaatcacactctggaaaaccattaatttatttattttccgctgccgggagctcctcaccgtgacggcgtcatgacctgagcgagctcctcctttatctgtgtgcgcctgaccactcttcgagcacctgcgagcaaggcgcctaccagtcaaacactgttcaacttggcgcactgattgttcatgattgatgcagtgatccgggcagtgcgtattgacaggcaaagaacgtgctcccagataaagaattcatgtctaccaatatgatgcaaaatagtccagcagtcagtcgatgacatactatattgaattgcttagttttatactccatttcagttccgaggtgaagaagatgacaactccgatcagatctatcccagaacattgcttggtcgttttacttgcaagtgactcaacgaatgcatcgtgcggggcattttattaggctccgggttccggaattttcgataacgacgaggcaatcaaatgtatagtaatcccttcgtcccaagcaatttagaactggatgcaatatatattaatacaacgaatttagttatagccactgtctatatttattgtattgggatagatgtgtgtaaattcgttgtgttttatctagttctaggtttaggttattatgtattgcgacggagtactttgtaacataaagtcgcaacgcagagaggagttcatgattcggtagagaaacctgcaccgctgcacgcaccacggcaccaaccaatcaaccatggtcggctgcgtccacacctcgagtccccgactaccagccagcgtcaacgattttctaaactattcgcaagaagctggatcactttgcaaaacattgtatcgcaaaaaagggtctttatgggaacgtgatcctaaaaggggtctttatggaaaaatacggagtaaaaatacttaaaacagggatgtttctgcaaaagttccattatatgggccgtgtagcactgagaaaggatgggcttttcttgggcttaatgggctgcacatacttccaccgagaccgactccgtttcctcttcgcgtctccttcctcaccggcgaccatggccgccgccgctgccaccggcacaccgcgatggagctcctcctcttcttcgttcaatgcatttgcgtcaaggtcagtagcatcccctcccattcccttgaacccttgtcttctcctcgaccttcaagtcgcgtagcgccgtaaccagtaaccacccctcctctttgctccaatccaggaccccaccgccatcagagacctgcgctcttgtaatcctgtccctcttgggtctccaacccgctcacctatctccgccaccacgctccagtactgaggtataagttccaatccccccccaaacttgcaagaaaaaactgaatccggattgcttttgcttgcacattgcgatttggagagcgaacaagttatgccatatgttcaatttaaattggatgcatcattctatatggttacaaacttgctacgagttggcagatcgaatgcatgatggaagcttatgattagatctagaaacttgcacgcaccaaccacccttcaatagaaggatttaccctctttctagaaaagtggacaacattgcgtaaattccacatcacaacactataaacaaagggccttgttgtccagatacatatggataagtaagtgccagctctaaccccaaacatgtacacatttctaagcatcaatgcactaaacaaagggctttgatgtcaactttgaatgagccagaactgcccaaagaaaacctgcatcctgccaatacagcagcatatggaggtcatttggagcttaggagtacagaaaaacatcagaagcctgtgagcctgtgactaatgagatcactgggttgagtatacgtttcatggatagacagttgctcatctagctagtactgcttcaacctaaccaaactgcagtctgacatatgaaaaacgcatgttatttgaaaaccacaactgccgtctgacatatgaaaaacgcatgttatttgaagaccaggacgggcactcaaattgttgtacgtaatagaaacctgtatgattgggatgtgttaccaatgtctatacagctggcattctgagtaggatgtcactggtcacctaaactgtgcaaacatctgaagagcctgagatgagatctgggcatggatcaagctgaattggccacggttctcattcaatccccaaattgtgccacaatgacacctaggaagataaaatggtagacgcaaaagcacacaaaaatggaggtggaaaaagaactgaaagtgtcacacttctcacttggagagtctttgatctagtaatgcctaactcactaatccagagaggctgctctggagcagatcccaattgtatagagaggggtggcaacatggaagaaagaaagaaaaaggaaaacttctcaaaccctatacagttatctagtagaaacatgtaggagatctcaccactcaccatgcattgcaggagaaggatttcttcagcatgtgggcatcacgggaagtgatcaaaacaggatgaaatccccatacgcgcatcgcagatgcagccggcacattgatcatttgatctccaccggaagaacacacaaaagtttcttgtcatgtttccctgtcaaaagaaccaccttggttgcctcacattggaagaacggagtcctttcctctgccactcctgctgctgaagcatgatctcccggccggcgccaatctcttcatattcgcgccgtccggcaatgcccggccactgcggccgccgccgtccttgctgtgctccccgtgacaccgtcttgaggaccccgaagagcctgccaggaggccgctctccctggccaccatcagctcgtcttccaggctcgcctgcaggacatcggcaatggacatccggccttcacggtgcgtgtctgacaacgacgacggcgcccttgtgggcggcatcaaggcgccgtcttctctgatctcagctgtgccatttgcatcttccgacctccccggaccatccttcgcctcgtggttgcggccgccgttgccgacggcgacaccggtcaccacgttctgtggctcctcgcgcacatgctccgggttgtcaattgtcaggaccagctcgtggttgtctctcctatcctcccgtggaacgcgggcctccggctccggcgagaccatcccgacggtgacgaacgcgatgttgcagcggcagagcgggcagttggagtgggacttgagccaggtgtcgatgcacgggacgtggaaggcgtggctgcacttgggcagcagccggaggctctcgccttcgcggaactcgccgaggcagacggagcagtccgtgctgtccacgaagccgtcgccgcgcctgtacttgcacactgtgatcttgttgatcagcgtctcgtccatcccgtccgacagcgcgacgctccacggctcctggctcctggaattgtctccgccgtcggcgccgccgccgctgccgcggtgagcgctggagccaaggagtctgttccggagggagctgaaggtgccgcagtacttggatatgatggtgtagtagctgacgaggaggaaggcgctcgcgagcaccccgatgatggcgatgacgagcggcgagaaggttgggccggaggagtcgtcggagctggagccggtgatgtcgaaggccggcggcggtggcgggaagatgaagtagcaccactgcgggcagtacatgctgcagaggccctgggagcaatccctggttggctcatagggcacccatgtaggctgcgaaccgagatttggtgttgtagggggagaagaggccattgccgccatggatacacaagcacagcagcaacactagaggtctaaaggggagagtctaaagggatgaaggtgacaaagaagaaatcccaataaacaaagatgaacaaatctttactgctcaggccatacccagactgccatgttctagcaccggcagaggatcttcatgaatttccggtccaataattgtggcaagagatgagagaagcaagagaaggtaggtggctctgcttggacttcagtacaacccagttctttcgtggccctgggaaatgtgagatgagatgggaagagagcagcagccgtgaagaatcagagatcatgagatgagatgctgccacaccagctgctgctactaagagaaacgagagctaatctccaaagcagagagggagtgtgcttgcttggaaagcaaagcattttgggataggagagcctgaatgcttgatgaggaggagggaggtggcggtggttgggaattggggccttctttgcctttggtgccattgccaccactgctcctgctctctcgtccactaccccttttcttttcatttccctctgccggcgctgttatttcttttcctttgcctcgtttgtcccctttggaatataagaaaataaagtggatgtttggctgggataaagtaataaaaatatggagtgatgctggtacaaaaatgcagtgtgactgtgttccaaaatcccaagactaaacagtgaagggaataagaccattttggaaattgcttagatcgtcgaagaaactcagcaaccaagggtgtgtttagttctttgggtgtaaagtttttgaagtatacggacacacatttgaagtattaaatgtaaactaataacaaaataaattatagattccgcctgtaaactgtgacacgaatttattaagcctaattaattcgtcattagcaaatgtttactgtagcatcacattgtcaaatcatggcgtaattatgctcaaaagattcgtctcgcaatttacatacaaactgtgcaattgtttttttccccacgtttaatgccccatgcacgtgtccaaacatttgatgtgacgttttttgccaaattttttgggatctaaacaaggcccaagactattttagttccaaggtttttttagtccatggtgcactgacgatttcgttcaagttggttgtccactagtcaaaatgaaccgactaaagtgggaacccgagaatacggtctccgtcacgaaaaaaccaacttctgaatatgaacttagacggatacttgtccaaattcgtctttagaagttagttttttttttacggagatttacctcttcatatggcttgcacaataattattctacatcataagatgacatatagagtaatgctctacgtctagtttgaatgtcaatgtagtaaatattaaggggtcggtcattaaaaaaaagtaattttcttgttcctgtgaggtaaaatacatgcgacgaattatctaaaattccaaggtttagaattttccattacctgagagagtatatacggagtatatcttaacatttttgtctcccaatatcagtaggaaaacattaaatttagcttactcccaagagttattttcataaaggaaaggtatgaaagaatgcagtatgtttagtcctcctatcaacgactatatatgcacattagcgcatatctgagaatcttgagtcactctcacatcattcagctaaaatttctctggcttcaagtaagttaaaagacaacggcggccggtctaccaaaccggtcaccactcaccagcttctttctttacatttacttcttcttagacacttaatccttccttctgtcaactcaagtcattaatgtctttgcactggtacaactacacaatagcctggtcacctaatcacacttcctcttgagtaccatatacgaccatcatataccttgcttaattcagacaaagctcgcgactatagattttatttattttctgagtgcagttgataaaatggactgcattgctgtaggttgtattgcattagcactagaggcaactgtttttactcttggtaggaatcgaagtactttcagaataagagaaagaaaaaaaaagaaaaaaccttcgagattttatactggaaggcaggacaaagattcatgagcatatcaagttggcttgcgacgaaaaaataatttaatctgatggaccagatagtgaaggccgatctgttctaataggtgtgattccttttagttttggggcataaatacgtcgttgtcgtacaatggggtcggcattcggccatgtgtgacagcaacaaggtgtgtgcagttgacgatgggaaaaataagtggggaacatgcggtccaagggagctctgcagttccattcatttgaaaggtgaagaccacctaattgctgtcctctttgttggtaaaaatcggaggattaccaaatgactgtcggtgtttttatacgtactgggaataatatcttcagcaacaaacaatatgaatcaagtgaactgacaaagaaaacatatattcaactgcattggagaaatttaaaggggaacagagtaaattcatagcaggtggtttagggctttaggctaatatcatcaaaggtattatcatcatgtggaaacaacgagtgtacaactttgtagtaccacctaaaagttaatctgttggctgctcctccgattccctccatacccttttcttctttgatacctttctacaagccgaatttagttcgaagttgtcaagatttacagagatgccatgttctaatgcgggtgtgaaccatcatgagacaaaataacagaatagagcaactttaactgaactgaggctccgacggaacgaaagtagtatccaagattgatgagtgctatttcctttatattttcttatagacgaattgcgcaagtagaatcacatcacaactttcctatcccctttttgctatttctctatttcttttcatctggatacgtgtaagaaagcagattaatggaagaagatttgttggagaagaaagatgtagttagaattttggaccacaagaacatgaggcatggggtcatcctgtcttccttttctaaaagaatcagtaccactcttaccttgctaattacatagtaaagcaaaaaaaacacttgctgacatgtggatttactgaaagaaaacggcagcagagtagattaacctcatggaattcatcttggtagcaaagcttttctgctttgcattaatctggtccaccctggctcattacagtttgagggagcggccgctttacgttttgtaccagtgaacagtactgcagattt

SEQ ID NO: 23679 - DNA, 4411 bp, Oryza sativa
gtcatagggatactatttagggtttttcttctttagatgtctccaacaatactgtactacggcctatgggctatggccgtggatgaggaatacttctctgatcaattttttttgggtctgtatcaaaccaatgcttcagttccagtgttgctgtccataattcataccctgtccactgattattaagtactctcattagcacgaatctaaatcaagaatatatgaatgtaatgatgcaacagatgatttcgctcttcaatagcatctcaaagttgttgggaactaatttatggcttccaaagaaagaacaaaaacacaatctatggtacatctgatccaaagaaattaatacaactgaaccttgagtgatagactgttttctttcagaagacgatggtgtggaccgatctcaatggtttacaactttacataggatatgtcaatagcatcatggtaccgtaaggatgaaaaatagtgatcggatctacgacatgtggtatagttatatcaaagctttgctggaaaagcatggacgaggggtaactaaaattcagactttcctttgctttgatgagctgtaaaaggatggatccacttgctggacctcactttacatgataaaataaagctgggcactatgtaaagagagaaatgtggagctacatggcacatattatgccaatgcagaaactgctgggctcttctaaattatacactgtttgaaagcgaaatgagatcatgtaaatgatgttaccatgtagcagaagactggtggtgagtgtcagctaggaaatgcagatggtttgtcagaacatagacaatagtagcataaaaagatgtggcagtatgcatgaagcaaaggtccaataattacagtgaattggttgtaactagagaaatagacactgagactggattcgatgcaaacaaaggtaaagctgcaaaaagaagatcacacacacttgagttgggttatcctttcttgggcttatcggtgaagaaactgagttctgaatatcaggttggctacatcatttgcattctgcaagcacggcaatgttcctagcgcgaattacgtgtacttgggagtagtagttaacagtagttacatgggagcgttatttccacaaacactaactacgagaaagttattataccggcaaatggaggcataaatttgttgataagttgataacaaaggagcctatccttcagctgtctagtaaacattatcaggacacgtcaacaatacgctagtagcaaagctgagcaagttgtcaccccggcaaccataagcttaaagtcgttaggaacaaaagctaaaaataagtcctttaactatagagcataatcaagccacatggaagttgtgcttctggtgaagccgggcatattctgctctaaccgacaacgcgaaagaatacctctttggatggcaatatcaaaagttgctcgttgtaggacctcgtgtgtaaggaagataaacgcatgcacgcgtcgcgcagattttgttgttttattggtcaggtgatgctcgcgcttgcgccacatgtttggcaggcaagttcagcgaactgtcgaattctgaaacaatcagggcagctgcccgacggcatccatgatccatccatctgaactaataaatcaggcacacaccaccattggccggagacccggagtcccgtcctcatgccggcatcggaaatgaacgaggagaagcacaaaactcagatcgcaccgtgcgtgaagccttgggagttgggagtcagcggcgcacggcgctcggcgctccacccgcaggaggaggccgtgcgaaggaggtttgcttctcggtgcgcacggccacggagcgtaaaaagtggcgtccgtgccgccgcccgctcacgtgcactcgcgaccccgcgggcggctggcggctggctctgctcggcgtctttgcgccttgtcatactaggccgagtggaccgagtccacctccgagacgcgagcagcaaatggcccacggtttactcgggcccaaccgagaaatcctcggcaaaaatcctaggccgaaaggtgaggccccgtgaaatcaccaaacctgtcacctcaaatcgtcaatcgaaggaataagatcactgtaggttccttaatatgtcgttcagtctgatttttatcctcagtttgaaaaatgggatatgatacatccctcaacttataaaatcatataaacaagatccatcagcagtattgatcatagttttagctgatgggctcctacatggtgacgcctatgtggctcctttgactaggtcttcgtcccacgtggcattgacgtggcgcttacgcgacaattcgattacgacacacgtgggacccacatgttagttacacaaaaaaatggtggggcctatatggcccaacatgtcatctccctactccctcttctctctatatgaggacggagcaaccatctcctcgcaggcctcacgggactccccgcctcctcctgccttgcccccgttgccggcgggggaaaggagcggcgcgcggcaggtcgttgtggagcggcggagggccacatcggagctgaggggcagagcagtggcgggctgcaggtggctcttctcctcccactggccggtgccccgcaccgctccgcccggaaccgcgacttctctcccgcttggctctaccgttcctctcccgcctcgacgaggtggacgaccgcgacgatgtccttcttatccgctcgccccactccgcccgcggcccgtcgccactctgaccacccgctggccgctccgcccctctgctctgctcacgacccgccgccatgcgccgctcctttccccgccggcgataggggcgaggcagggagtccggcgaggccggcaaggaggtggctgatccgcccgcttccgcccctctgctccgggcgtatatagaggagaagagggagtagagagatgacatgtgggtcccacgtgtgttattattttttgtaaccgaattgtcacgtaagcgccacatcaatgccacgtgggatgcagacctagtcaaaggagctacataggcgccacatcaactaaaaccatggtcaacactgccgagggaatttgttcgcatgattttgtaagttgggaatgtgtcatatcggttttccgaactaaggacgaaaatcaaactagacgacaaattgagggacctagagtgaacttattcttcaatcgaatgacaggcccgtatttgggccgaaaggagaggcccggtgacacaactgcctggttgccctaccatagtctattcagtattccgtctgtctgcactctgcaggagttcatcaaaaaaaaaaaaaaaagagccgctaatgttccatcaaaaaggaaatctgttcacgcggtacttgagacatgaatgcatatggctaattggccggcatgcggcatcaattcgaagagacgctttgcagtttgaatggtgagcactgagcacggttgggaagtggatggtcaggaggatacgaagccctcttcaagacggaacagagtacggtgttaatgcagaaactctcaggtcagcctgctcttttaggtacttacggaattgtgctggttccagcatctcttagcgcaaacccgtgatggtggttgattgatttcgagcctaattctgttattctgtggggacctgattgttgtgtttgtctttgccgatatttgtagaagggaactttctgcaacttgcattttgcaatcctggggccttgtttggcttaatcccctgtgtagttgtcttttgtcgaaatcgatgatcaaacgaatcagagaaacaaaagaaaactctaagttagacttgctgggtaaagtctttcactgatttccttgaatgcctcttaaaatgcgagggtttggttccaacaagaagacctcttaggatgcgttctaaagagctcttttgctaggcttcttattcatttattaagagcacgcttaccaaactgctaaactatgaatatcgtgaataaagttttctttaaaaataaaaaaaatgtttttaaatttataatagttattaatactctgtacagattcatagtattaggatatgtcacattcatccaaaatctcttactccctccattccaaaatataaggcacaactacccttaacccaaagaccaagaaacaattattatcatctcctagtttaaatcaccctaataaatataatgcatgcatccaataaattctgatatatatatatatatatatatatatatatatatatatatatatatatatatatatatatatatatatatatatatatatatatatatatatataaaaaaaccgcacccaatccgtggtaaccgcggagaccgagaaaaaccgcacgagaccgcgcagaatttataaaaaattcaaat

SEQ ID NO: 23680 - DNA, 11712 bp, Oryza sativa
  unsure (1)..(11712): unsure at all n locations
tcaagcacatgatgcatgtaattattgagtgaatacccagataatagatcctgcgtccccaggtgccattgtatccttaaggtcaccattggatctagttgcaccgaccttaatggtatcaggctagtttgatgaaggacgaagggaaaagtgagggaagcagtaaagcaccaccctccctaaacattgctggtgcacactgagtcactgactggtcgtggttgactctatactgtggggcaccaggcaagcaacaagattgaaactaactggacggtatttggcagattgggcgatcagcggctatgggcaaagagtttaaggaggggagcatgatccctcatctacatcgtgctttgatggtcgacatgctttttgaactccacatgtgtctccgttgctaagaaagaagaggacactactagaaaaatgtttttttcaggctgccaaaaatgattttttccggcgggggaacgatccatttgtatgccgatgattttcgcagggcgacccagtcacccgcctgtgaaaatcatctcgacgaacaaaaaaaatatcgccaccaccccacccgcgcccctaccaatctccggctgatctagggttaggggaactgccgccgccgccgccgccgccctcccccagcctcactccggccggatctgggagggaggggaactgtcgccaccgccaccaccctcccccggcctccctccggccggatctgggagggaggggaggggaaccgcgccgaccccgccgcctcgctgttgccgtcgtcgacctcgcgcctcgccgtcgccgacccgccgcctccacgcgtttctaccgcccctgttgctggtcgctgagggagctgagggagaggagaggagagctgagaggagaggtgaggtgagacttagaaaaaatcgcggtgccatgtcgtgtctatttatatccatgccaatttccgcaggcggatcacataagaggtccgcttgcaaaagtaaagggtatttttgcatgcttacttttgcaggcgggcgcctgcgaaaaccggacaacgaatttcaaccaggtttgcattttttgtaggcggccatttcgctccgagggtaatgtctgcctgggaaaaaataccccatgtctgcaaaaatgttttttctagtagagggagacattagattttaaaccactagatgataaatttagggattaaaaatgcacttttagactttatcaacctagctgatagccgattgtaattttgacatcaaccagcatattttattctttgtgtttttcttttgaacaatataattaatcaaacaggaactaactatatatccctccaggcagagggtaatatgtatgcattatcgtcacaagacaaaattaagctataaccactaacaagatagggtcatgacctatggcgtactattattcatatctatctacatgatgcatcggctgcgatgatctcatcaattgaacccacccagttatacctcagccaaagggataaaatcgctccaaaaaacttggcaaggaaagccataagccccctgcgttcgcgaaagccataagcccccacccccaacttcttgcaacggaacatgcaagtacgatgcatctctgtcgctttcgttatctcgagcaaacgagacatacacgccgcgagtaatccaaatccaggatgggcaatggcatcgcgcgcgatgcaattgcaatgcacagtcacgattcacttcacccaaaagtcacgcgagaaacctaacccctacgcaaggtgaaagccggcgaatccacggcgactcgcactggccgtccgatgctgaaacggcccaccactcggcgctacgcatcacggtccatccactccagtcccgcagccctggtggcccacagggtcgggcccacgtgacggcgaggtcggtctaatccaacaggtccatgtcacggcggtgactaatcgatcaaagttagggagcaaatgacacaagggagaggattaaaaaactccaatagagagaaaagaaagtcatgggtggcatgggggcgttggatggtgggtggcaacgtcagggtggccatggcacacgctggtggaggcgttttccgtcacaatattccagcctccgatcgacgacagggcacactcgcgcgcacgaaatgctgtcgattgccgaatcgcaccggacggactggttgagcacttgtttgatctgccgggttggacaggaagcgagcagtccccccttgcaagttgcaacgacatatcaagatatcactgcatcgaccgagagcttcggtgagaaaaaaatcgcagcgaggtgcctagtgggaactcagctttgccgcgcgataaatgcgcgacgtcgattgggggggaggaacggcttcttctggacggacgggaacggctgcaccggtgcaaggaaaaaaagcagagttgggcggaggtagccgtcgccgtcgagggcggccgctttcggggacaaatggcgggtcaatcaagttaggcggcgtcgcacggcacggcacggctcagcatcggcgtccacgacggttggccgagggccgagtcgtgccaccgtatatgcccagtgactcaccgctccagcctccagaagataccgaccccctccgcgcggcatctttcacgcgcgcccgagaagtccaaacacgtgccgccctcccgtcctcccgggcgcccgtgtgaccccctcgtgcaccggcatttcaccgagcaaccacctcaccgtatcagcagcggccacggcgagcagcctcttcatgccgcgtctgtgctggggtacacctgcagaatgtcaaagacacaccgctctgcgagtgaattagtgatcgatgagtcactcgaccgaatgcagcattggaagcgatccaaccaaaaacccgtggcgattccggggtaatttggagcagcaactcttttttttttattacatgggtaatataatgcacatatgaatatcccactgtgtgactgtctcctaccccaccacaactcttgtacatctacaatatggaggttactactactgctactatatttttacacggttgcgaaacttagttgccgttaccgagtcgtaagcacccagcagtgcttggacttgactgggtactaactaggagtaactgaactgtaactaaaaccgaaactgaaaagtaacaaacaagctataatatgtatgtgacgtggcttactgctcttgcccttctccggcattacgccggccggcctccgggaagggaagcgccgggctcgccgccattccggggcacacggttattgtgtttggctatgtcatgtgtacagtacactatgttgatcaggcgcggacgcgtcgagactccctagaactcgacgatgaggctgccgaagggggaccggtgcgggacgcccttgcggcgcttgttgccggtgcggtagctggcggaggtcggcggcggggtcaacggcgtgaagctctgcacgacgctgctcttgtcgctgctgccgccgctggtgctcgtgcacgagtcctcggactcgtaccgcgcgtccttgagcgccgccctcttcttcttcttcttgccaccgtcgccgccgccgccgccgccgccgcacccgccgtgcttcttccttgggcggtatccaccggacgtacccacaatctgcagagaaaagaaaataaagacgccattgttggtgtctacgagcatgcgtcgcgccagaattgatggcgttggttggtgcgtgcgtaccttgcatccgagggagcagaagcggaaggagtcgaggaggctgcgctcgcagacctcgcaggtgttggtgacgcccttgccgggcctcggctgggggcgctcgttgaggaacaccacgcgggcgctgttgatgatgtacgtctgcacgccggtgatgtccagcaccttctgtatctccgacacccggatcacgtcgtggtacgacgacctccgtatctgctccatccacgacatggacggacaggcaacgcgtgagtctccacgatatagatcgatcgatcaagaagcacacgcattggattaacagactgacctggatggcgtggtggtcgcggtggtgggagaggcagagggagcagagcgcgccgttcatgcagtcgaggcagtacatgttgcactcgctcttgtgcgcgtcggcgtggatcctgcattgcacgaagaagctcgtcgacagcagcggcttcagccacggcggccaccgctggttctccacctcttcctcctcatacccccttcctccctgcacccccacattcaatccatcacaccccaatcaataaccaagaaacagagcaagagcaatcaatcagtcatcggcagctacttaccatgtcgcctctgttcttcagcgagaaaggggacgcatggtctatcgccattcccagtgcgaagcaatcgagagagagagaagaatgtggatggaagagacgagagaaaagagaggaagaggctcgaagcgaaagaaagcacttctgaatgtatgtagtgtgaagtcttttgtagaccaaggggggcaaaagacgaaaagtatctgcaaacaccggggttaagtaaactaatcggaggaagactcggggagagtatttgtgctcgttcttactcccaccgtctcaaaataagtacagttttacacatttgaccgttcgtcttatttgaaaattttgtatgattagtatttttattgctattagatgataaaacatagtactttatgtgtgactaaatatttttaaatttttcgcaaatttttcaaataagacggatggtctaatgttaggcatggatatccacggctgtacttattttgggacggaggtagtatcaactactcgtacatggcggatccgggccgtctcataagtcacaacccggcaagcacatatgaccgatcgaatggcagagcgtgtttccaaacagtggaatcctagcacagttcgaattgtctcctaccgcaatgtccctttcgcttgaaatttactaatcagagtgttgcattcacttgtgaaccttatcatcaacagcattatgatttactgatttctttttcgttacagtaacgattccgattgcaacttgcgacggggcgagacccaaaatccaccgtaaattgtcgtagagtaaagcagtgctatcagtttggatattttcttttcctacattttggaattatcacttgctagtgaatggatgctttctctaggagattctattgcacttgcgcatatgtttcagcttcccacatgaatggtggggaaaaaacattaggcgcacgtttctacccgaaaagtgaaaaggggaaaagttaccactaactacgccattaccaccacaaatactaatgtgcctgccacctttggcatcccacattagtcttccccaagtggatcaagagggggatcagatgcaaccttagccgtgcgtgcgtacgctgccatacactacgatatctttttggacggagcagagcacatcggcgagaagcctcgacggcctactggaatcaggatgccttttttctggtggcctactgcataatttcatttgccgttttgtaaagccatttcattttgccgttttgaaacctacaaaccggtagaaccatggcatcaataattcggcaggtgatgctacagattttctggcaatcgtagggcgttcggtttgtggtttggtcacccactcctgtaacgccatctgaaccattgtgcgtgctactgcatttcggcaattcctggctggtacttggaactgtgcacacagtcacacaccgaattgtactatatatcgattagattagcatctgagcacacgttttgtggactgttcgtccgaattttttttccaaccccagttcacctccattttcatgtgggaagaatcgtgtgtgggcccatgggatattgatgtgtgagatcatgtgaataatcagtaaccaggttaaagataaagtcagaaatacggcatattgattagtcttgcagcggttatacgtcgcatcgtctccttggagccagtcgtaatctcttagcagataatgacgaacaaattaagatttacatgttagtaagacgattacccgcagtatataatattagctgagtgggtccccaagtcgtagaaacgaacaagcaagcgttgacatgaatttttgtttcagcaatcaggtttcccatttgagttcagccagtctgctgcgatagacacagcggcgtagtacgttgcttcaacagttgaaccatcacgccgcccatgagtccatgacacatggccgtcaggttttctgttaacgattttctgcactcctggattcttggccgtccccttgattcacgggttcaagtaagcatttcgtcgagagatcgcgcataatctgcccaatgcgccaataattcagacgcagattttgacctaattatgttaccttgtacagttggccgaacttattaagacaaataaaatgagcactcctgtttctgaactgttggcagtcacctcaatccactgaatcttagtatagtgatgagcttatagaccacacacccctgatctgctttcagtgggttggcatattggcatctccagttcgggagacacctcaaaagcgagaggccagctctggcacaaaggccgaatttttcaaggcgtgccgcgtgcattgcatctcatctgctcttgatacagccattgccgcacagcgcttgtggctccagttccggagaggtgtttggataacctgactaaattttagccctatcacatcaaacactaatttagattattaaacatagactaattatacagatagaggttaatttgcgaggcgaatctattaaacctaattagtccttgatttgacaatatagtgttacggtaaatatgtactaatcatagattaattaggtttaatagatttgtctctcgaactagcctctatctatgtaattagtattgtaagtattctatatttaatattctaaattagtgacaaaagtcgggtatccaaacaccccccatattcctccggcgctaagtcattccgcaatcatctagagacaagaaaggtcttcgtcctctctctgcgtccaacccgaaggatccacctaaaaagacgagctttcatggctctaccgaattctggcacatggctgcatcagattacgttactactcctattacggacaccccgtgagagaggcaccgtgtcattgcgaagtgaaatgctgctccatttccatccccatttcgttcactagctgatcagaggctcttaacatttcggtatgtggctgtatgtgcagtgcagattctatgatatggtcatcagtttcagtactgtactgtatcgtacaggcaagggcaatcactcgatataaataggcttggaattttcaggcgttgcgtgctgctgcttcccatggcggctgccgagcaacgcggaaacggtcgcgcgaggacgacaaaaccgacgctttgttttaagcctgaaaatcattgggtggtgcaagtttatcacanatattttagtacagagtcgtaatcctagtgccggccgcattgcgttagcgtttcggcctggaggaattaaaaacaacctgggaagtggttttttctatgacatgcgcaccccgctgctgtggatggctgaggcttaaacaggcgaaccgaggtgacgggattcatgattgattgctccagaaattggtattctaccatggagttggcacctggttgacacctggattaggttggtcctgatctttggagtatctattcgttttttccctttttgggttttttaaatttattgtttttccttcctttacaggttgtaagactctttttcaatgttttgtagtgcacatttctttaatggaaatggagggtgtttgccctttgataaaaaaaaattgctgctttcttcgtggttagctgacacaatcacacaacggcgggtttgctttggttgctctcggctgcaggtaggaagaaatgaagcggatgtggtatactgatattctgagctctgccgtttgtttcagaattcatgcaacctgctgtaaacttgtgtgccgggggccttgcaggcttgcaaccacggtagatggaatgatgagtttggtcaatatttttttttcttttacaaagataacatgtcagtgatcaggtgtaaccgtgtaacacgcctaatctaaaaaagaatagagacgatacacctgatcgtgagcgatgttcacccttacggccttaccttcattaatgcctaaaaagattccgaaataagtcattcttcatgccatcggtaggctacaggttccttttatagtcgactagattcattgcagaaccaacaaacaaatctatacgacgagattgctacctggcggtcaatcgccaggggcgatcacgatcagattcggatcccctccctccacatgtttttatttttttttttcaccacattactttcctattttaataaatttatgcacctaaagtttgtacacctcaaatttacacatctaaagtttataaattaaaagtttatatatccgattcaaatttggattcaaatattttttatatatagtatttctatacatctaaagtttatagacccaaagtttataagtcaaaagtttatataccctattcaaatttgaatttgaaatgtatccgattcaaatttgaatttgaattcaaatattttttatatatagtatttctatacatctaaagtttatacacctaaagttcatagacccaaagtttataagtcaaaagtttacatgcccgattcaaatttgaatttgaattcaaatattagtttatagacccaaagtttataagttaaaagtttacatacccgtttcagttttgaatttgaattcaaatatttattgtgtaataagaagagaagaggaggagggagcgacggagcgtatagggaaggggcgggcgggtgatcacccacctattagccttaccctgtcttatatgcccatgaggcatgcccaacgcaggccataccctcggttgctatgtgggccaaagccacaaaaacgatctcatccccccaatggaagcaataccttcagatatacccttttcaaattaaagctgcacaatagattaattgcacaggtgcttcatgctacacaacgcggtgccacagcctaaacctagcctcagagcggcgcctcgcgtgagggtgcgcggagcgatcagagggttcgaacctcctcgcaggcgcgtggtcctcgccactttttggccccgcgtctgacatgtgcgcctaggggtacgctccacgtactcgcgttgggcatgccctgagttctcaaagcctcttttttcagtgttcacctctcgctaaacgctagtcggacggccacctactgactagcgactaggctgattaggtggcgactagacggattaggcgaattagacattttatctatctctttcacacaaaaatactgattctagacatttggtactcggtaaatataggcatttagacaaatatcataaatcatagttaagttcagaaatcatcaagtccatacaacgaattgacactgcacacgaagcattgggtttagtacaaatatatagggatagcgaacacatcagtatagccactgtacatgcacatcacaattcataaaccataactttatagatctgaggggctggagctaagagagaggaagaaaaaattatctagaactggaagaacagaggaggtaaggtggtggaggggagcctgatcccctgatggcctgatctagggttggcgtaggctgcttgagtggtgccgtgcttgactgcttcaatcggtgtgtttgtcaccttccattgatggcaaggatgaaggatgagatggagagcaggagcagcaaaggagggggaagaacgtggagcagcagaggaggagagggaataacgtagcggcgcggtggaaaatcgatgggcgcagcgacggagccgtctctcgtggcggtgtgaaaaaggggtaggcagggattgcgctctctctctaggctctcaaataaggcaacctaaatccccttttataccgagtcggtcccgcgtggcgcttctaaattttatcacgcccaaattttgatttctttcgcctagtcctgcctagacgcactgtcccgttgtctaattgcgcctaggcacagtcctgtccaggccgtccaggccgcctaggactgactagtaccgtctagacggtaaatcgactaattcactgcctagggtgtaaactggacaaattatcgtcgactagcgattaatcaccgtctagacatgctaggcggtcgtttaggcgaacattgcttttttcccatgtttcgccagccctggccatacatatctttttgccggttttttgctgggaataccgcgcacgtttatcattttgctggagtttaaaaaaaaaaacaggcgtcttctctaggcctcttcgacaaagccaaaagcaaatatcgcctcggtactcacacgtcctcaatccggactccacatgcgctcctgcatgctcttccttcgtgaagaaaaacaatcaattagatttctacgagtatcatctatctatctatctatctattatattattaaaacagccttaaaagaagacatcatgttcgctgtagggctataaattctcacattaatcagagaaaaagaaaagaagagtccaattagaaattcaattcaaaaatatctgaaatcggaattaaaataaagcaatattgaaagaagtgtccatataaaaacccaatacgagattaatcaaaattcaaaataaaaataaaataaaatacgaaattaggaaataaaacgagtctaaataggaatataatttaaaaataactgaaattagaaattaaaaataaggaatattgataaaagagtccatataataacccaatacgagattagttaatattcgaaataaaaataaaaataaaatctgaaaatagcaaaaataaaaggagagttcaagtaggaatacaatttaaaatcaactaaaattcagaattaaaaaaagcaatatttaaagaagaatccatataagaacccaatacgagattaattaaaattcagaataaaaaataaaataatatccaaaattagaaaaattaaaagagagtttaagtaggaatacaattttgaaacaactgaaattcaaaaatgaaaaataaaaatattaaaataacactatacggtattaaatattttttaaaaaaaattctgaaattagaaaaagaaaaagaaaaaagatttaaaatagaatacaatttataaataactaaaattggtgataaaaataaagattattaaaaaagagaccatctaaaacacacggtgagataaattaaataacaagcctataaaagagtagagtggtggcggttgattcgacatataaaaactgttagtaatacaccaaatagaatctttagaaatcccgtcaaatgctgccaatatactccttatgacccatctgccgcttaatctttattgtcattagcattttaataattgaacaaaactatcgttggaattcatattttactttcaagatgtcccaccaaccatcggtaggccgtgaagcaaacgggtaaggcggttgccgggacttttaggggctgcaggaat

SEQ ID NO: 23681 - DNA, 9648 bp, Oryza sativa
  unsure (1)..(9648): unsure at all n locations
catctttagtcccggtttttagtggaaccgagactattgtggatttcgggcgaccgaccaaagatggtttctccaccagtgtgtgtactctggttcatttttgtgccagttgtaaacgatgttggttcaaatgttcctgtcgaaaacaagatgaaatttaaagaaaacagtagtactatctatactgtgcctcatcctacatttaaagtgctgtttgtaactactactaattcacatatactaacagtactagcacttggggagtatttttcccctgaagtagctgtcgcatattctagtagctgtccctgaagtatcggtgaaaaaaaaatgagttttggtgataataatctcacaggattggcataaaacacgcaataaatgattgtcttgagccaccgtctttttggatagagcataacctgcatatggcatccaagtggttatttaagggatctgatactatgttgcctgacttgtctatcagtaacactaactttttgcgaccactccagctaatggagccagctaattcgtaaacattatactctcacaaatgctacacctagtgtttgtttgaattctaagtcatcaccgtaactggtatcgtctgagctaattaaatcatatactctaaatgaaaatgagtacacaaaggccttgtagacggcacacttaaccagttccaattcatccagatcctcactggcgtactgttcgctgctaatcagtaccaacctcttaatttcctgagcaataggtgaaaatgattgttacgattcactaaacaagaatgctgaaaacgcccttcttaagctatcattgaaggaggagtacatcgtttgattggaaaggctaagctactgtcgtagatctcgacttctctgaaatgaaccagtggagaggaacaagttgtttccatctttgcaagcatggttcttttcgtcccaactgccaactgaactgcgaaccattttctggggtctcaacatgtgaattctagtttggtctacagtaatgcaggtggggtatttgcgcaataagcatcttgcttgttctttgtacaattgtaatactattggaacatttgcacgatgtacggttgccccacacggagagatggaggatggttgctgccactggaaaaattattattccttccgttcccagaaccctccgtcttaaagacaagggatattagcttttacatggtctccaacattatacttcaaaagcttttctatattttggacaaagaaattactccctccgtttctaaatatttgtcaccgttgattttttagcacatgtttgaccattcgtcttattcaaaaacttttgtaaaatatataaaactatatgtatacatataactatatttaacaatgaattaaatgataagaaaataattaataattacttaaattttttgaataagacgaacggtcaaacatatttaaaaaagtcaacggcgtcaaatatttagaaatggagggagtactcgccaatggacactatttatatttatattacttaaagttttattgactatcttttttaaaaaaataaatacttaaaaataccgtattgttcaagtgtgttgcatcctaaccataattattattatttttatcgtagtctaaccttttttttagaagggtacaactcaggacgcacactaacacacactaggaatgtgcacgtttctaacgcacactaacacacactaggaggaaacatgcagtcccactgaacgcgcgcgcgtgtaccctatacctagtcgggaccaagcgaagtcagtccggggaaacggaaaaaacccctggtgagacacgcgatttgcgatcccaggatcaaacccgcgcgggctactcgctcacctggcgacgctagccaaccgagcaatggcgacgctagccaaccgagcaacgctcggttctccgtagtctaaccatttaaaaggtgtcgcttagctcactcctggtttggacggcccagctctctgaaaaggctgcaggactactcttgcctgtatcgtccgtacatacctcgaggcccaatataggccctttttcttaagcccagtaagcccaattccagaattccaaatcgcagtgctgcgttggaacttggaacttgaagggccgaagggggacgagcgatccagtgcgctgtcacgtgtcacgtgtgtgcttggcgctgacgagctgcgttgttcttgtgcaggtgggcaatttcatgcactacatcagccggttcctggccggcttcgccatcggcttctcgcaggtgtggcagatcagcctcgtcaccctcgccatcgtcccgctcatcgccatcgccggcggcatctacgcctacgtcaccatcggcctcatggcgcgcgtccgcaagtcctacgtcaaggccggcgagatcgccgaggaggtccgtccatcgatcgtgcccctctcaatggacttctcccagcacgaggacgtacgtacacgtactgatgacgccgccgtaggtgtggtgtgcaggtgatcggcaacgtgcggacggtgcaggcgttcgtcggcgaggagaaggcagtgaggacgtaccgggaggcgctgctgaggacgtacaagtacggcaagaggggcggcctcgccaagggtctcggcctcggctccatgcactcggtgctcttcctctcctgggcgctgctcatctggttcaccagcgtcgtcgtccacaagaacatctccaacggcggcgagtccttcaccaccatgctcaacgtcgtcatcgccggcctgtgagtctgcaaccctggcgtgtttgtgtcagcgaatgcacacgcccatggcgcccgtgcataatttggtcgcaatatgtgtcgtgcaggtcgctcgggcaggcggcgcccaacatatcgacgttcctccgggcgaggacagcggcgtacccgatcttccagatgatcgagaggaacaccgtcaacaaggcgagctccaaggccggccgcacgctgccgtcggtcgacggccacatccagttccgcgacgtgcggttcgcgtacccgtcacggccggacgtcgtcatcctcgacaggttcagcctggacttcccggcgggcaagatcgtcgcgctcgtcggcgggagtggctccggcaagagcaccgtggtctcgctcatcgagcggttctacgagcctctcacgggcgcggtactgctcgacggccacgacatcaaggacctcgacgtgaagtggctgcgccagcagattggcctcgtcaaccaggaacccgcgctgttcgccacgagcatccgggagaacatactctacggcaagggggacgccagcatggatgagatcaaccacgcggcgaagctgtcggaggcgatcaccttcatcaaccacctccccgaccggtacgagacgcaggtcggcgagcgcgggatacagctctccggcggacagaagcagcggatcgcgatctcgagggcgatactgaagaacccgtcgatactgctcctcgacgaggcgacgagcgcgctcgacgccgagtccgagaagagcgtgcaggaggcgctggaccgcgtcatggtcggccgcaccaccgtggtgatcgcgcaccggctgtccaccatccggaacgccgacacgatcgccgtcgtggacagcggcaggatcgtcgagaccggcacgcacgagcagctgatggcgaaccctcgcagcgcctacgcctcgctgatccagctgcaggaagcagctcagctccagaacaagcaatctttctccgacagcgccagcctcagccgaccactaaggtatgtgtacgtgaacgtgaacgtgacgacgtcgtgtcaagttccgaccggccaccgcgagctaacgaccatggcttttgcgtgctgctagctccaagtattcgagggagctatcgaggacgagcatgggtgggagcttccgctcagagaaggactcggttagccggtacggcaccgtggaggcgcacgacgaaggagggcacaagagcaagccggtgtcgatgaagaagctctactccatgatacggccggactggttcttcggcgtgtcgggcaccgtcagcgccttcgtcgccggctcgcagatgccgctgttcgcgctcggcgtcacacaggcgctcgtgtcctactacatggggtgggagaccacgaagcgggaggtgcgcaagatcgcggtgctcttctgctgcggggccgtgctcaccgtggtgttccacgcgatcgagcacctcagcttcggcatcatgggggagcggctcacgctgcgcgtccgggagaggatgttcgcggccatcctccggaacgagatcgggtggttcgacgacaccagccacacgagctcgatgctgtcgtcgcggctcgagacggacgccacgctcgtgcgcaccatcgtcgtcgaccgctccaccatcctgctgcagaacatcggcatgatcgtgacgtcgctcatcatcgccttcatcatcaactggcggatcactctcgtcgttctcgccacataccccctcatggtcagcggccacatcagcgaggtaagcacagaatctcgtcagatgatcctggctgattctcgatcaaattcacaatctgtgtgttgtgatgcgacagaaaatgttcatgaaaggctacgggggcaaccttggcaagtcgtatctgaaagccaacatgctggccgcggaggcagtgagcaacatccgaacggtggcggccttctgcgctgaggagaaggtgataaagctctacgccgacgagctgaaggagccagcgaagcagtcattccggcgaggccagggcgccgggctcttctacggagtttcccagttcttcctcttctcttcctacgcgttggctttatggttagtgctacacgaagtttggaacgcggtgaataattcagtccaaatttgtatcagtagtaagatttgaaagctttgatcgggattcaggtatggttcggagctgatgagcaaggagatggccagcttcaagtcggtgatgaagtcattcatggtgctgatcgtgacggcgctggccatgggggagacgctggcgatggcgccggacatcatcaaggggaaccagatggtgtcgtcggtgttcgagatcctggacaggaagaccgacgtcctgatcgacgccggcaacgacgtcaagagagtcgagggcgtgatcgagctgaggggcgtcgagttccggtacccggcgcggcccgaggtggtggtgttcaagggcctcgacctcctcatgaaggccggcaagagcatggcgctcgtcggcatgagcggctccggcaagagcaccgtgctctcgctcatcctccgcttctacgaccccatcgccgggaaagtcttgatcgacggtacgtatcgatctcacagcttccaaaatgaattgctctgcatatctcccgaacggaatccgaattctgaactcgtatggctttgatgcgattctttgcagggaaggacatcaggaaggtgaagctcaagtcgctgaggaagcacatcggcctggtgcagcaagagccggcgctgttcgcgacgaccatctacgacaacatcctctacgggaaagacggcgcgacggaggcggaggtggtcgacgcggcgaagctggcgaacgcgcactccttcatcagcgcgctgccggagggctaccggacgagagtcggggagcgcggcgtgcagcnnnnnnnnnnnnnnnnnnnnnnnnnnnnnnncgcgcgcgccatcgtgaaggacccggccatcctgctcctggacgaggcgacgagcgcgctggacgtggagtcggagcgcgtcgtgcagcaggcgctggaccgggtgatgaggaaccggaccaccgtgatggtggcgcaccggctgtcgacgatcaagaacgccgacgtcatctcggtgctgcaggacggcaagatcatcgagcagggtgctcaccaccagctcatcgagaacaggaacggcgcctaccacaagctcgtcagcttgcagcagcagcaacagcagcaggaccagatgcagaggcattgatcttgatcgatctcctgtgcttctgtatatttgctgtgtgcctccgcttcttcttggttgttaaggagtacagtacatggaatgaaacaaatcgctgcggtaagattcaattatttttccattgtaaaacgaggggttcacgattatgtacaagagaaagtattggatttgtttctctttttctgtacaagttaaataactgaatttagtagatacgcgattacatttacataagcagattcatggcaaatggtatgatatacgactcataatatagcaacatagtacggctctatttcaaaatatagcaatctaatatagaatataacaccttactagaatatcccatagtaggctcatacatttagggatagagatagttgtgatttaagaaacacaaactaacgtgccaggtcgggacagcacgaaagttccaattagaatttgggttttgctagttagctttcggggactgaaaacatttgatttttttggccgtttgatccagcgcgtgctgaaatattttgttatcggatccgaatccacttcccaaacgttgtctgcccgttggcgcagtttccgatttttgaagcggatttgtgactatcgaatcgcctcttgaactctgccaccgatgaggtaaattgatctgatctttatagttgaaggaacatttatatgtcattttacgattgaggaagaaaatcagagtggggctatagttgtgagacacataatagacttctttgttgtttaaatgtgaggtagatccggcccatataaactaccggtgatgttggggtgtactgataatggaataagttcgtctgaggtcccttaactttacaccgaatccgatttttgtccttgaaccctaaaaccagatacaaccagtccctaaactgtcaaaactagtgcaaatgaagtccctgggcggtttgaaaggcggttttagcttacgtggtgcctacgtggctagtttgactcggtcctcgtcccacgtggcattgatgtggtgtttacgtggcaattctatccccaaaaaataataaaaacggtggtcccacatgttagctgcacctaaaaaaattaaaaaggtgggcccacgtgggtcccacatgtcattcacacccccttcttcctcctctctccctagctcaccactcttcatccctctcctcgtcactgccatcggcagagctgcgtggctgcgggccgtgggtgaggcgtggctgaggggcgggaagctcactaccgccaacggtggtgatggccggcgggatcccctcctcatttttgccatccctcttgtccccattcccgcgccgactgccaccgccacacctccccgcatggccgcatctcctcctcctccagtggccaccgccgcacgccgccccttctctccatcagccgccgtaggaggagatacggggagcactgcgtcctattgctgagtggctctcccatggcgaggcgccagacgcatacggtgatgcgctggcggacggggatggcagcacggagggcggtgtcctccttggcgacaacggcggcgagctcggcgcggcggaagtcgctctgagtagtcgacgctgctgcacaggtcccaccacacgcgcgaccggtccatcacccacagcgggggagggagcagcgcgcggtggacggcctcctcctccggcggccaccgctgcacgccaccccttccccccgccagccaccgcccttctccctgccgccactgttggatctcggttgccgacgctgctttgggggggacccgccgctgcccgcgtcgatctgctccactcaccgtcgtcgccgaccccctcttattgccccggcttcctcctccagctcgccgctcttgtcggcggtggccggtctcgccgctccctctacattgcctcgttgctcgccgtgctaccagctcaacctcgccgcttcgctcctccaccccttcaccacttccaccgggcgtcctcaccatcgagaagagagaggagaagggagggggatgaagagagaggagctggggagaaaagaggaagaagaggggggtgtgaatgacatgtgggacccacttgagccccaccttttttatttctttttgggtgtagctgacatgtgggtccaccttttttattacttttccaagatataattgtcacgtagtcgccacgtcagccaaaaccgccttccaaaacgccgagggacattggttgcaccggttttgacagggtagggaccggctgtatctgattttggggtttaaggttgaaaatcggattcggtgtaaagttaagggacttttgatgaacttattctgctgataatcaataactcaagtcggcccacaattcctaaaaatgctgaggatagaaaggagggtgaaaaaggccgagggagatttccaacggaggatgagatgcttcaaaaggaataatggaatatgatgcttatagatgccactacggcaggcagcattagatgatgtatgtactgatgtttccctggttcacgactggattgcaccgctttcattttcgccttacgatagttccctactaattttacctatggcatattcctcacatgatgccgataatatgccacatagttcaacatccttagatattcacttataaaacgacgtcgcctacagggaatttgatctcgatggcaatcccagaattagcctcatccaatgagcttgtctatggactatgagcctaagaggaccaaagacaaaagaaaaaatcatttccttcgcttatttacatagaactatagaagtagcggaaattatgtggccatgaatcagatgggaagctacaacatggttgggcgtttgctcaactttgtctgcattttttttttcagaatttcaattgtggctaccgctagtaaatggcaagatcatgtcatgaactcatgatgcacagtccagttgcccattcaggctgtgtttagttcacaccaaaattgaaaatttggttgaaattggaacgatgtgacggaaaagttgaaagtttgtatgtgtaggaaagttttgatgtgatggaaaagttgaaagtttgaagaattattttagaactaaacacggcctcaatttggcagccaactcccatcgcccattagtacaatcctaacttttttttaattccaaattcaggacaataccttagtcccttctaccaattcgactaattcgcttgacatttttttcaccaagatctataataaaagcagtcccattccccacttaaactacgcgaccgatattcttatccctactttattattatattgttcaatacgttcacggagaattttatgaattttgtcaactcgaagggtcgtcattagtgtttctttactatttattttatttcggaagcaaggggggggaataatgtctagattctaaaggaaattagaagttcaatacctaattaatttaattatctcttccattccatgacaccgagaatacaaatattagagtacctatagctccttccttgtacgactcgttgaaaaacccgttgtcgaacttgattcatcgccctttgtttttcgaaacaaaggtgttaaaaca

SEQ ID NO: 23682 - DNA, 7107 bp, Oryza sativa
aacctccgtttgacggaaaatatagcgagtcggagtgtccaacgatggtctaacgagtttgggtctagggtttgggacgactgatgagggaaggagaaaaggttcctaagcttagagggatggtcataggagatgacggagccataggcttgacaacaagcgatgggctggtgatggcagtagggacaatgcggggcacatggttaggaggtgagggtgaaggcattgggagggaggagccgctggagacaggaaagatgacgacgaaggcactctccgtcgccagcttgagaaggaggaggccaggtgagcaggactcgttggcaccgtcgaggacgaccggcgatgtggtggcgtagaggaggtaggggaatcttcgggcagcggcgcacgagagtgaggaggaatggtagagagttatggttattagggcatcaatcaatggtctgatattcacatgatgtgtgtagaattttctgtcacattgtataggcagtcacgtgctaaaaagggacgtcctttttgcacactgctgatctgctgggtgaaatgagatctaccaaggggacaagagccgtagtgccatacaaaagctggtccactatattaacagaggtagtcaggtttcctcttgtttctgtccaacggtcggtagagttgaggcctgtggtgtctgacggaatggagattagtactactgactaccccctccgtccaaaaaaaagtccaatcctagctacgaacctggacatgtatcctggacacatgcgtgtccaggttcatagccaggatttggttttttttgggacagatatactgagttactactgtaagtaaaagaaggggccttgtttctgctgctagccagcttctccggccaattggttcaggtgatgcttcagtctcatgcgagaggaaccacttaaaatgatacagttctttgctcggagatctccagcctcataaaccaagtgattttcgagcagttcctatcaatttttgtctgcaatctctgcatccatgctcgcaaacagcagccacagaaaccgttacgtttgtctgcttatgccgtgcaaaggaaagaaacaacagccacaacaaagacacagtacacttgctacctgaaacgaaacaagctccgtccaagcaattctttacaggttcacgttccaatataaaagaaattatttacattcagctccattttcgtacacaaacaatagcttccaacaactgccaatcatgcagcaaaggcatcttattttattgcttgcaactactgtacctgattattcgtctgaaatctccctttctgaataaaaaatcacaacacttgccgccacgactaggccaatgccaatccaacagcagttgggataaactgcaagacgaagcaacagcaaagcctttgctcgaagggataatggcaacagattaccctggaaggcaggcttgaccacttgaccgttcgagagtttgaatcagaagttcagatttcagaggcacgctcctgtgatacaaaaccccgtgagcacagacatgttgtagttgcgtgcattcagttgaagcaaacacaaccgagtattcagctacctggcgtgcgttttgtttctgcgtctttaataagagccggtgaagcaaacacaaccgagtattcagctaggggggaaaaatgagcattacgctatcgactatggaggtgaattttacgcgtattcggaggggtaatctagagagaaacttatcacaaacaattggcgtgcgtgctcaaccgctgcctcttgtatgcgagggacatctcggcgaattgttcatgactcaccaaacttttgtgggtggccacgaaaagctccatgccactgaacccaaacgagcggcagagtcacggccggtgtttggtcgcagtataagtgtaaccccaccttgcttcaacagcacgcgtccgcccgaaccgatgaaaggggaatggaaatctgctagggaattgagctaaacactaaacaaaaggaggtttcctttaatattttttctctggttgttgtgcgggaaaaaaatcattttaagtaagaattggatagttttattaaaattagcccaaaaaacttcaaaaatccttgtgtcccaaggcccttttgaaacatatatgttttactcgattaacgcaataaattaatattttgagaaataaattttatagatactcctgaataaatggtctaacatagtactatctccatatcaaaatataagaatttttaaagtttaacacgattattaagaaaatatgtaaaatcaaatggtgattggttgagaaatgatggtaggtggagaaattgaacggcaaagggttatgattggttgagaagaaaatatcggtggagatgttattatattttagaacaaattttaaaggctaatagttattatattttgggacagatggagtagaagaattatcgtacttttagaagcatcgagcaaataatccgcgacaaaaatccaaaaagaaaactgaaaagagcaggggtcaaaaaaaatccatatattattttcctagtacaaaaactaatacaaaaccaaggaggagaagaaacatactgggtgtgtgcttcaagtcaccaaattcttggtggaaaatactgggttcgctgaaactaatactagtaggaagccgattacaaccaaacaaaatctgaatctagttttgctaaaagtcaccagccatacgaaacttgcaaacctcatccaaaaggaagtagagatagaaaacggtttcaccaagaaaactcataaaaaaagaggcggacaggagagagaaaacacagtgttgtgatttgtgaagtccggattaaaagggagactactgtgcctcctccgttttcctcttcttcccttctgcagctctcctcttcttcttcctcccaaacggccagcggcgcgcagcgtcacagattttacaggggaaagagaggaggagatggggagggaggagaggttcccggtgtgggaggcggcactgctcgccggcgtcgcggccgcctttgccacgggtctcgtcggcgtctacctctccatgcctcattcggactacagcttcctcaagctgcccaagaacctccaggagctccaaatcctcacgtaattcgaccgataccgtttctaactgttcagctggtctatgcatatgctgatactgcttgttcgatagaaacttgcttctctttttttttgtctcaaaagtttgcagtttttgtgcgtttttatgttttagaacctacctgtgaagaatcctaatttactagaacttacctgtaggaagaatcctattttttgtgttcaaaacttcaaatagaatgtaagtacgtaaattgcatcgtatatgttccgtacttttgccaaatataaagattttattcatcttcactgttgataccaatttcatcctgttcttccgcttgaactgcgttggtgcgttgctggatttcggaacgtaacggattattcttggataatggacttgtagtagcaaagctgtagtttttttttcctgcttatctgaataataaatccgtccactattgtgtgttttgcgggtgttttgagacagtcttcgttttggtctgtggatttctactgatttagagaggatattttctaaaggaaatttggaaagggtctcagtgattcctttgaacaagttacctttgtctagtagtactacacgaagtgctttgttgtaactgaaaatgaagcatcggtaaaagaaaaaacttttctgacggtgacggtaggaaatttgcaagagttctacagtagggcgtccacttttagtggagtggtagaacatggatttatgacctgattatccatgtccaagtatggcccatacacattgcagcctgtggtccccttaatccattgaaaagcataattaatcgcgtaattttcgcagccggtggagtatgaaatcctttcttctcggtatttactttctgcccagctgtaactgtcgtgcgttttgaacctggccattggtcagatcgagttccatcatgtgtgcctttttggtcactgcacgccataacaatgttttgttgacatctgaactctcttcagctatggccttctgttaggttaaacaccacttgccaaatagtaccattgttcagacttcactattcagataaacagataaacttgtgttcttgaatttgtctgaaactctacacatgttcaaccttacacagttacactgtttgatgtctcagtgggcaatggatgtttcaaattaaactgcttctaatgtttgtgtacgtttaatttgcagggatcatctcgaggactacacgagcgactacaccgtgcaggtgctggtgggctattgtgccgtgtacatcttcatgcagacgttcatgatcccaggaaccatattcatgtccctccttgccggagcactctttggccagcttggtggtgttgcccttgtggtctttgccgccacggctggagcttcttcatgctacttcctgtctaagctgattgggaaaccgttggtcttctcattgtggccggacaaacttgggttctttcagaagcaggtaacttcttaacctgcatcttagtcagctgatatcgcttaggattctccctgtgttctagttcatggcaatgttttttatatgttcgatatgcgacattttgattctttgattcgatatccgtcaagattctgtaactgactgatgctgtttgcttcttcttctcaggttgcaaaaaggagagagaagctgttgaattacatgcttttccttagagtaactccaacattgcccaatactttcatcaatttagcgtcgccgatagtggatgtgccctaccatattttcttcctggcaacctttattggactaatcccagctgcctatgtgactgtcagggtaaatcacctgcttcaaattcacatactattctagtttcttctcatgcatagctcatgctttattctttcttttctgaaatacaggctggaatagctttgggagacttgagctcattgagtgacctatatgataaacaatcaatagcactgttgttcttgattggggttgtttcggtgacaccgacattgttgggcaagaacgagaagcaacaaggcaaagggccagaaatggtagctagcagtagctgatcacttgcacgcgaactccttctcacctccccttctgtgtacatatgaagatcctgcatttggttgcttccatggcctttgtttggatcggtgcaacttatggccggccaaagggcaacagaacatggcaagggcccctctttctttctccacttgtggaaccctttgtgcatggtgctgcgaaagggacacctcactgtcacaacattatgattctggggaacaagatgggccaccagagctaaaatgacccatttgttctgtttaacatcttgtttagatcgaaggaacagctgatcttatcatcattgtatatgcactgctaaccagattcagtttttcatggaaccttgtcttagtgatctgtgaatctgtccatgaaatggtctgtttgggcgcggaagtgaacagccaaattgcatgtcattttcactcgtttgtgctatgccgcgatcataacgattttgagaggcgatcctttgtgagattctgttgccaaatgccatataatggcttcggtaggtgagtggtgcgcgcaggtgcgcgctctcgattgtcgattatgtgtttcgttcttgaattgggacctctccatcgttgcgatggaccacggctgttgggtgacaaactgacggggcaatccgtcagtcgcacacacgctcctagtcctatacacggatgcgtttggtggataattcgctgtagcttggctgaacccatttcccatcgaggacactttgaagaagaacggcaccggcccacacaaaactcctcagtttttagtctcttccctttgccactgtttttcacaaatgaagtgggactccgagtgcatgttccatacatataggtgaggcattccacatcagaaggcagcaaaaatgtacctcactatcaccatctagccggtcatacaggttatgacaagcagataaaatttgttggttctggatataaaacaaaatgcatgctaaactaacatgtacagctggaaaaaaaaaggcttcggcactcggaccatgctaccatttgattggaaccgggatgccgagcttctttttgccaagagggtgactccgaggacagcttccagaatcctgctctgcattgagttggctcaagcagtccacaatgccttttctccgagtggacggcatactccttactaatcgtgttacgttcttatctatgcaagggcccttcgtcgatttagatgctgattcaaccttagccttcttagcttttgatgtgaatttaaggtttccaagcagaggggtctcatcttctgcaaatggcacaagcagaaatgtcagcctcgtcaattttcaaaggataatcagcaaagcaatgtacagtagtaccatgtaagacaatgaacccgataaattagcagaaaagaaaaactaatgtaatcagcattggcagagcacagcaacagtatgtctatcaatgaatttaaaatctctctattagtggtacaccaatgatatgataactagacaataattcagtgtgcagttatagggtagtgcgtaagaacttctgttccgctgcagagaacttggtaacaaaagaaaatggaaccaagatgtaggacttaccgtcaccgaagtcctcaaactcaaacacattaaactcattatcatcagagaagaaacgcttgcgttttggcgaaggagttgagggtctgtccaaattggtaatgtcagcagcactaccaggacacctattagccacacaatcgtgatgagatgatatgcatggcacgatttcatcttttaggtcagccttgttgataccatcaatcgggcatcccttagctggctcctcaaggaaagatgttttgcattgactagtttcatctttctctaatttatcaccagaactgttggttgcttcaccagaggggctgcaggaat

SEQ ID NO: 23683 - DNA, 8627 bp, Oryza sativa
cacatctgctcttaatatatataactactgggcaaagccctggtagtatttttaatttaaaaaaaagtaatagcaagtaacttgtgacacatacatgggagtcattcattagatgccaagtgctcggtgaagaacgaacagaacaaacataatggccatagctaggtgaaccagaatgctcaacaacgccataaagatcatatttcagctccttctgcataaggtgggacaagtaaaacatcaaaacatgcctttggtaaagctattgctaaaaatagagatagtagaaaaactcacattgatgtcaggatcacaatggaatggcttcaaatcaagttctagtgggtacaccacatgtttgtcaatcttttcaacagatctatcaaggctggtgaaacgctttaaatgaatggcaacgacatctggtgatctatcaagcataagttgcttgttcttacaaacttttgcattacaatgttcacagttcagcttgtcctcagcatccccaattcgctccaacttggtaaaagattccaaggcatcaataaggttatcagcctgatcaatctccaggctaagatccaagaagggctcatatgtctccgagcagtgtccacactcacagcaagtcaactagatagacaggatgaattcagttgcaacttttaagtgccaagacaacaagcatgatgacaaagtaaaataccttgctttttagtcggcctccaaaaacctgcttaacaatactttcttcatcaaaagatgagggcttatcctttggcttgggatcagtggtgcacttatccaggttgtccagcaaacaacgtaggaactcatgtgcatcctcctgttgtcctggtctaaaatctgatgataattctgggtaatcttgtcaaggaactccaccactaatttgaagtaccagagacagatacaatagaagatatatatctcagcacaatattcagtgaatattaagatgtattgaaattgaaacagaactgaggaagcatataaatagaagttatgaaatcatataaggggtaaccttgaaattttcaggcataaacacccaatgattgtcaaaaatgcaagtcatattactgagcatgtgtgcacaaatgtggtaaaattaaactgcaaggaaaaatcgagagcaaaggatactccttaaattatctctgaacctcactggccttataacagatccagaccttcggattgattcatcaatatgttctttaagagcacagaatgaacagaaaccatctttatcatctgcaggagaccaacagttttttttttatcatgaaacaaaaatggcatgagataacacatttttcaggtagcaaaacattactgtcagaaactatccatacatgagcatggagcacagtgatcagtggaacgaagcctgagaaaaagtgggactgtatgggtgacacactgaagaattgagtttaggaagcatgtgttccccatattgccaagaccagatccctgcatatgaagaaattttaaaaataacaaaattattgaatatgtcattagcatacgtaagtcttagggttgaagatattgcataaaacataccaccaattgagattgagtgttgcgggaaaaggacaaagaaaattgttggccctccatgttgcaaggttcagcgccgctctgttaaacatttttatcaatccaatttgttcagtttaagaaagattaaaataatggcattagcataactgttttgaacataacagtctctaaaacataactttggctgttaatttggttataaacttataatataattttaagccatggtataagcatagtttctaaaatactgctggagacacattagcagctaatatttacaaagtttgactgcacgaaccccaaaacaattcattttattgtagggagtaataggtgtgattgtgaagccacttacgccggagttgcacagcttgctgtcaagaagggatgatgagtcttgcttagttttcccatcccagatatctatttcatcctgcagcaccaccaacaataatattagggagctctaggcacctggttatcacagtttatgtagaatagttggataagatatttcagttcaaggcttattgtgtgcaccattaaacatataactgggtcacatgcctacaaagggccagagaagatcaaatagatagaaaattacattggagctaggctgctctgtgctgaggggttcagactgcatatttgtatccccatctaacaaatccatgtcattctgaaaaaaaggaacaagaaaaaaaacagccaaaattagcaaatttttagatacaaccgactgtatagggatgtcatggtaatacatagctagctgcaacataaaaatcacttgggcacccaatcttttaatctaaaaaattagattacattaactttttatagtctaagctaacaattgaactcctgcagtccaaaaaattagggctgcacgatatcacacaacaaaacggtgccctacatgcaagtcttcaaattaagatagtaaaatggcaaaatactaagtaattagagtaccaattgtatttttcatgaagaaacataagagcacggagcacaaaatacaacaggcacgtagttccctagggatgatcagggaaacaaaccaccaaggcttatgcttcataccattgattgttattttccatgagatgttgcactaaagtgggttcattacctattaaaggacatgaacataacttgctttcttatctactgtatcagaaatgctctgagtgaaaattaataaacagtacttggtgaaaatcagcattaaggaacccaaacagactgactgggacaatcatattcttagaaaggttagcaaatacctcagactggggctgctcattttcaggccaaggtgcactcagcatgtatttatcatccatcgaatccaagttgctctgcgtatgagaagaagcatattaaattaactatgccaaaagcagagcgacaacaagctaatcgcaaaaaagaatagataagagtatacattgtgttcgttactcttaattgtgggggcacaaaccatatcccaggaatttgaatagctctgcaggcaaaaccaggaaaccgacaaagttaaaaaattagcagccacaaaaaaggcatgtaatgttgtttcaaagagaaatgataacacatgtaatcaaatatttgtacaaggaagtcaggttaacatcttacaacagagcgaatcggctggcacatggagaaaaatggttggtactgctcactttcagcatccccactttcagcaccagtttcaacctaagaactcaattgtcagaaataagccatgtatcgatgatccaaaactacagaccatttccttttgtaacaagtactagcagaaattggacaaaacagaaggtaaaaggcaggtcgaaattaccatcgtttcagtttgttgaactacactgcggaacgttgcacacaaacaaaatgggaaagcagcatgatagtcaccacgatttctgtcgtctactagccatgaatgaatgtcactagtgttgcccaataattatgtactaataaaaagtggtggtgaggcgctactcctacctgctaccagattcccagcacacgaatgccatgtaccctgcttaatattggggtagaaccacagcaataacccaatcgaaacgcaccacaaaactccaaaaccatctaaatcaaacacgtttggctaagatcgcatcctgagttgcaaaaatgagcagtaaacacaagtaatcgccacacgacaagccagcccgccgactaaaaccgcgttctgagtaaacccaaaaaaaaaaaacagcgaccagtcttaccacgcaaggtaccactggcaacggccgtaccagacgaaaccccaccccaagcaccccccccctccccccagaaactgcagaaaaacaagcaagcagaccggaggatctcacctgaacaggggcggcctccgcttcgctcacggccgcggcgccgttctggtccgccatgcgagggcgagggcgcgctagggttttcgctcgcggggaggggcggtaggtggcggtttggtgcgtgctcgcgcgcggctgctgaatcgatggagaggggaaggctttggttggtcgattggttgagatcggagactaatcgcagcagcggcgggggaaagcaaaaaaagtagggcaaatcgttgggtgggaaggaggaggaggaaggagggaaaggaagatttgggaggtgaggagggggcggaaatattttgggtttgaaacggaggcggggcggggtgcgcgttaaaactgacgacgcggcgggtgggagggaggaccggaggagaggagacggggaaaatgtgaaaaaacagaaactgagtagacggaggaaggaggcgggatggggagagtgtggttttcgcgtttcccgcctgtgggggggctagtgggggcctggattttcggcgcgctcccgcgtttccgtttcctgcgtcgcgtgggtcaacacactgcggatgcggcttccctgttccgaatccgatctgtgtcaaccaatcaacggcatgtgtcattttagtggtgggtcccacagtttcatattacagtcctttcgacttctctttagtcaaattattttatgtttccccgagtttattgaaaaatatattactctctcctttctaaattgatcatcctgtaataaaatccaaaacttctcaaattgatcaccatgtaattgcatgggcacgaattttattggaatacaattaatgcagtatgggataatgtgtgcatgttagggtgtaattggtatgggattttaatcgatgcatgcattatgggagaatgtgtgtacggtgtcttgattgatatgatttaaattatccttggtcttagtgtataaacttatatgatgatcaatttaggaacaagagagtagtatttttaaaaaaatataaacatattatcaaaatatattcaatactagatttaacaaaactaatttaagtttagtaggttgctaattttttttataaatttaattaaagttaagaaagtttaactagaaaataagtcaaaacgacgacttgggatatgaagtttagttttcctcttctctattttcgttgttcgagttaatatatcagtacctgtctctcttatggggctaaaggaaggggaaaaatcataatagattaaactcaatgaacattgtttcgtgaaaaaaaaacatgttgtttttaggtggagctcaaggtagctaatctcccatggggctagaagtccgccacgaatccatgatcaaccccgcatgttaagtggagtgttaaggattcgattagatggatatgtcttttaccttaaaagcagagttgttttccttttgttccctcttctaaccgtgcaccacattcgcacgcgtagtgtgcttaggtaaccaccggatgcaagtttttttcactaatattttttatagcctattactacttatatcgatctaacccgacacaagctatgaaacatatttctagtatggttctccaaactcaaataagtttagatctaaaattttctatgctaccttcaaatgaggggtgttctccttccaatccattccctactctcatcacgcaccgcactcgcacgcgtagtatacttaggtaatcattggatggatccaaagtttcatcactaatcttcttatagtcaatcaggcctgatctgttataacatactacctctgtttcataatgtaaatctttctaacattgtccatattcatatagatgttaatgatatataaatgtgggcaatactagaaagtcttacattatgaaatgggggaataccggtgatatgggcccgggggtatcacgtctagagggaggaggccgtcctcaaacccacgtggctctccgcgaggggggatcaagccctgggtggagcggtggctacccccacccagctagagggaggaggccgccctcaaacccacgtggctctccccgaggtgggtcgagcccggggtgttgtggcggctgccccctcccagcttggggtcgagtcgcccccaaacccacgtggctccccgcgaggggggatcaagcccggggtggagcggtggctaccctctcccagctagagggaggaggccgccctcaaacccacgtggctctccccgaggggggtcgagcccgggggttgcggcgactgccccttcccagcttggggttgggccgcccccaaacccacgtggctccccccgaggggggtcaagcccggggtggcgcggcggctgcccccctccaagctagagggaggaggccgccctcgcttggggtcgagctgccccgacccctccatgtatcagcccacgtgtacagggttaggtgggagcgcctaactgccacctaactgcatttaaagcggtctatgcaaccgcgccatgtcgcatttaatgcggcgtgctgcgcatctgaccggttgaataaccgatgggacggcgactgtgtacccccgccctgtcagtgtgtcaggcggtgagcggcgtgctctgtcccgtcccatcataatgatgaggggcttcacagcctcttaccccggtcagagttggtccaaccactctgaactgaccgggttcccgttttctggtgtgaacgagaacccggaagtcctcatccattaaatgacgaatgacaagggcgccctgcatgatttgatgggccccgcgcagcaaccgacgtgcagatagcttctgagctaaggcacaagacatgtaattaatatagagaatattttcccttctccctaggtagcactcgtagcacatgtggtatccccttagagtataaaaggaggaccatgcctagcgaggaagggggatcggacggaggatccctgagccaaagcttgtctaaccatagcttgcataccagagattcagggactttctaagcacagaagaatcatacacacaggagtagggtattacgcttcatagcggcccgaacctgtataaacctcttttgtctcatcgtcttggaggagcctccgagatcaagatcacacacagtttcgctcaccaaattctctaatctcaccagttgcccccggccgaactctcaaaggggggcctcacagcctctcgctaaagagggtcacccctcgacagggagtatgagtgtattactagtatggtataaaaagatgccggttcttcaaactttcaaaattttcgattcaaaagccagctgtaccagtcctaggtgacatttttttaattgaaaatatttgattaagttttgtggcatttcgatccggtatatagaatagcatcattttaccttgcataacgcttcaatacattttgcataacgcttcaatagcatcatattaatccatggcatttgttaggactcatgcgacagtttgctcatagttgcttttgcttgtatattatgatcgttagcatatataaatgaagatgttttcttcttcccattacatgacactcttcgaacagttttcttccttccagtttgaaagagaaaaacatcctgaaagcatcaccagcagcttcataaaattattggagccatcgttttgcggaataagcaaaacgacatatttgcaaataaacaaattgtgaataaaagatttatatactcgttcttagtgatctaaatacaaatgctgaaaaataaacttcaataaaaaacctcgaaagaagctccaactttaagtttgaaaattcaaattttgactgataagtgtaagtataagcgaaaagatgagaccctttcctcctggaagctgtgtttgttttagagggttggaaacccttccctcccgacacacaaaacaaaacgatacattaacacataattaattaagtagcattagctatttttttttgaaaaatatactaatatgattttagaagcaactacaattatgtataatgtttttccgaataacatactattacgagtatcatttagtagtttgatgtgcgtgtgaaagatacgaaaatagaagttagaaagcgccaaacaaatgtggcttcttactcccttcgtccctaaatatttgacgttattgacttttttaaatatgtttgaccgttcgtcttaatcaaaaacttttgtgaaatacgtaaaactatatgtatacatgaaagtatatttaacgatgaatcaaatgataggaaaaagaattaataattacttaaattttttgaataagatgaacggtcaaacatgtttaaaaaagtcaacagcgtcaaatatttagggacagaggaagtatttggtaatctcaggaacttaaggaataaaaaaacttatttaatacgccatccgtcccacgatataaaaagttttagagttaaagtaggtagatgtgaatgatagagagttgtgattagacgagtagtgaaggtaggtggaaaaaataaatggtggatggttgtgattggttggaaagagaatgttgatgaagaagttgttatattttgggataaatcctaagagataaaagttgttatattttggaacggagtgagtatatatctaactctctcaaatgggctgcaggaat

SEQ ID NO: 23684 - DNA, 18901 bp, Oryza sativa
cctgcaccccttttagcaaagttattaaaaaattatatacgtttagtttgttgctaaatttgttaaatatataaaaaatcctgcaaaaattttggcaataataccatcttgctaaaatttaataaggttattttgctacgatctgaaaatgccctactccctcggatcagaagtaaaccgagcaaatacagtgttgagctaattccttcttgcatgttttcatgggcctggttgccaattactagcagcatatactgcagattgcagatttgcagtaggccagaacggcccatgaataattccctgtggaccaggcccattgcatcggagccccacactctttccggtcacgggggtgacgccgcgagacgagcgggcgctcccaatgacacgaaaggacaggtgtccgggtcggatacacgtcatctcctccccctattatccatcaccaaagttgcaaaaaaattcaggggaatagaaaagcataggaaataaagtaaagggaggagaggacaaggaactccttccggctccgatcccacccactccggcggcctctcgctcggcctcgccctcgcctccgatcgattcgcccctcgtcttcctcctcccggatcccccaagccaagcccggggagccgggccgccgccaacgcgcgcggcggacacgaggaagggaaacaggcgacgacgagaagagaggatcagctgggggtgatgaattgttacgctgcatggacggagcaagcgagaagcctccccacaaggtacgcgtccccccgcgattccggttgtattattcccgcgcgcgcgcgagagagagagatcgagtgtttgagcttcagttcgtcagtctatggctggatttggttttggtcgtgccgcttgtatagaaggataagagagctgtgctgcggctgcgcgaaccagttgttttctattattggagtggccgatgacttgtatcttcgttcactgtggccaggaaaaaggtggataggccttcccaataatttgttggttggttctggaccaaaccttttttttctcctggggcattttgatactgtgattgatggctacaaatagtactggagctactgtggtattgctttgcccgcggtctcgctagtggacagcatatgattgtttggctggtggccagatttagtcatggtcaactgtgccgagtggccgaattccgtatggtggatttaggttcatcttcctcgcgcaaatgtttctaggttcttgattaatgcagcagcacaggatcgacatttaacctatggtctgtaatcggtgaattgagccttttagtacaaccctctcactgagggtttgagacgaagactggtgtttaggttcaatctgtggcaccattgtattgtaacggcccgtcaggtctccttgtcgaacaccaccctacaatattataggagtcctgttagctgtttcttttttaacctgaacttttgcagccatttggaaaatgctgatcaatgcattgctgatgtttgtttttgcttaaaccaatttccttaccttgatgtcctttattcatctaagacaaatgctgtgaattgcacaaactaggttctactttcttggcagatgcgttgctttgtctgtactattcttcacagcaaatgttatctactgacgaagtgaaggaattattattcaagcataaaacatctattaatagagtgtggccttgtgggtggttaaagggtgcaaaacaaccaaacaacttattactcagcatgcgatttagtgtatctttatttacaagacatcggggttgctaggcaattcaagcctgtatattgccacttgtatgcttcgctatggtatgaactcaatatgtgttattatatggtttttacaactctgttaatatgcaactcacctgcgctgtgagctatcatttgggcacttaatcttaataagtcatgctaatccaaaataaactcactttaccgcctatgtactcgtgacgtggactaccgtgccattcatattctgaaaagtgtccataatcaattatactatttcttgcacaggtacacttttttttaatacgtcttattcattatattcatttggaatagcaggactattacaaagttctggaggttgattacgatgcatccgatgacaccatcaaattgagttatagaagattagctttggtatgctgttattggacttctttcggggtacgcaaataataatacattaacacactgtaactgataattcatccacagatgtggcatccagacaagcataagggggataatgatgtcacagctaaatttcaggagatcaatgaagcctacacaggtattttccactctccattatgtaggcacagatgatcttattatcctcatttacttcctagagataaatttgggatctcaatatggatgtacttcctagagataaatgttatcgtcattgcctgattcacttttttttatgttccgttttttcagttctaagtgatccagctaagcgccttgaatacgacctttccggatgttatgagttaaatcgatatactttgcgtgtaaggtgtcttctataattggccttccatattcctcttctacacgctttgtgttgatttttcttgctgtctttccctcgcttttaggagtaccttacaaggtttaagggtatgatacttacctgcaatggtcttggcatagaccattcttcaaaatggtaaagcatttcatttgagcctgatgctaaatttgttttgcatattggttaagacttaagacttcatggcatgattcctaatagtagtgtgaacacttcgaatacagtatttatgatttcattttctagggcccggcatttgagggaattggagccccattgatctataggtacatcttatttgtccatgagcttcttcagtactttctttgaggccaattggatgcttagctgtttcttttaacacaactatggatacggcagggcatctctctgttctttgtaacacaacaatggattctgtcgtatactaatgtatttttgctgcaagaaatgcatgcacgcagtttccagatgtagttcttggcttctcaccgaaaaaagagcaacagtttcgtggtgtttaacttgacacaaatacaaattaagcctatcctttctcatgaacgcctgacagaagtagatgacagtaaaacataacctcacatattctgtacatttagtccatgcagtaatatagcatagaagagttctggtgttatcagttttatcacagatctgccatgatgaacatatgctgagattaaaatgtgcttagttcggatcactagttccagtttggtgtttgatctcgaaatctccattcaagtatgtgttactcgtatcaagggagcactggagaaattcttttgatgcatgttttgattatatagctagcaattttagcggtacgccctccattcaggcacatgggacaacgtccttatatctgagttgcagtatatattttgttgctggacatggttggctgcctgttattataaactggtaggattagcacggagggttgaagaactcaggattctttactccgttgttattttgggatggagtacttgtttgccatcagtggaaggaatgcaggatgaagctagaaagagatgcaaaattttttcccaacggaaagttctaccagttgagttttcctggccagtctttccttgctgtgctgaccttgcaatcatcctctctctctctctctctctctctcaagaaaaaaaaaatgcaatcatcaagcggttcctttctgatttaaagttctggcctgtaaagcgagttagcgtgtgacgctggtgtttataccgtaccagcatttggaattttttttatttttattttttttattaaaagttttacaaaaataatttttcattttgaaaattgacagaagtggtcgcctaccgccctctgggagggcgatttttaaaaatcgccatcccagagggcggcgaaagtgacgtggcagacggccgttcgctctcgggcgacggccttcaacgaaatttgcaggcggcccccttgccgccctccgctagggcgattttgtactgtgcggagggccgcctgcaaatgggcggcggggggcctggaattttgcaggcggcccccttgccgccctgggggagggcgattttatactgtgctttatatttttgtataaatataaatagttatcaaatctttttatattgaaaactatacaagattaaaatctccaagacaggtaaaatacaattttattattttttagggcctatttggaatgttaccgtacaaatattttgttagtgccaaaatataagcaagttttggcactaccaaatatttggtaaggtaaaattgtatttgatcatatttggtttgctgccaaaatgtaaaattgtagtgaagaatgttctacataatctcaaatctagattacgtattaccaatgaataggttttaatcgaaatcaaacacaagtactattcaaattaccaaaatattggtagggcatgtttttggtagcaatccaaataggcccttagtcttacgcatacaaaaaatcaccatcataattaaacattgtaatgataagatagataagaagtgccatcgatacacggtacaaatttgtcgatcccgacgaatcaagcatgcggtaacctatcggccccttctaggtcggtcagaatgcattgcattctcgtggtccttcaatcgttgatactctacttgtgtttctgactctgttatcttctggccatgatatgatggagtgacattgtcgatccatcgagtaaatccacccatccttggattgccctgtaaaaatagtaatgttattcagtttgggtagtaattttgtgcaaatcatagcggattttgtaaatggttagacatacaacgaaatcgttgtctacattggggcagacaaaatatctccttcgaaatgtttgttcagcaaaggatgtagccacctgccagcgatctctacacccacactttggacgctcggaccatttaggtaaccctaatggattgttcctccagtctaagcttgcaatttccacccgacgttcgtactccatccaagcatgaatgaactgtatggtcggttcaggttgcgttatcggcccgccacttgaagtaactctgactgtgtcaatctattgtacgaattgacatttccttacatcttcctatgtacatccattttgggatagttaagttaatgatagtactgaggagtgatgaaaagaatagttataattaccacggaatcatcgtcgacaatgtttggacacacgaaacacctttgtcctcgagttcggtgccttacggaccttatgacctgacaacggtcaccacaacgacactccggacgctcacgccacgtggggagtcctaggggatttacgtgccattctaaagcctcagcagcaattcgacgttcatgctcatccttccgccttaggtagtccgatcttgtttcactacgtgggtaagcacgggttccgtcgttttgtgggttctccatgtctacccactcgatgaagttgcacattggacgatatgtctgcgtaagatgttacaattgtgtacgaagaagttagttttttttatccatttgaacttcgaatagatgaagcatatctgatcaaagttcgcgcattggaagaatctcctgccccgagtttgtatcatgagggaagacttgagtatgcatccatccccacaatcgcacaaaggacggtcacaccatggtggaaaccaaccagcaaaaggatcgcttcgctagttgagacgctcaaggaatggcgcttccattttcgtgtgttgtgtgctagtggggaagaagatatgaagaggttgccttcagattgtcaattatatagcgtcgttttcactgcaatatatgtgaactcaatgagatacattattcattagatgtgacaagacgatcacgcgtgggcgtgattcactttatgtcaacaggcagcgccgaaagttgatagtgacaactcgagctgccgcttttcatgtgtactgttgtggactgtgcgcgctactggatctgacactaccgtgaagcgccgaaagtgtgttgtcgtgagcataagttgttctagcacgatatgaatgaaaagaactatgtagacgagacaaacacaagtagtactgcagtagtaatagcaaaagtagtactgctttacaagtttgtaagccaaaagaaacggtcacataaggactgaagaggtagaacactactgacgaggcctcttacccctgtccctcctaccctgcgccctaatgtgcccctgggagtacgtgagtcggtccgggggtacggcacggccaacccgtcctgcctgtacaggtgtgacctctggctgctcctgagagtgtgcctctggagctcctccaagctgagagaagcctagtacgtcgtggtggtgtgcaccgtgcaagtcgtcgtcgtagaactggctagtaggaccagtcctaccggcgtgagacgaagaggccccagtatcgaagatcccggctgcaaatcctactgaacaaggaccatcagtttcatacaggtatttaatagtattaataaaaagtaaagtaccgtgtgggcgagggatcgacgctccgtgagaggaagaggtggcgaacgcccctgcggagctcgcggaagcgccggtcgtgcctgtgaacgcgctcgaaggcagacgaggtcctgcgatgaggaaacgtgccgttaaaacatggtgacatattcgtgcaaaagctgaaacaaaaatgaactaatctctgggctgaactgtaccgtgcgaaaccggtgctgtaggtcgcactgctccgaagctaggggcgctcgaaggcaaacgaggtcctgcgaggatggaacatcaagttacgacggggtgatgttttcgtacaaaaacagaaacaaaacttaagaaacctctgggctgagcagtaccgtgcgaaacaggtaccgtaggtcgaggtcctgctccgacggtaggcgcacgaggccgtggttgtaccggaccagctggaggtacgacgtccacggcgctgcgacaggagaagacgcgcatgaccgcacgcatcttctcctgcatccggtcgaaggtcaccctctgctcaacgtcagtcaagtgcaaacctctgttcaacctcacttggactgcggtgatatcggcactgatatcccgtgcggcatcagcctatgcaagatggaaataaaaaattcagtagttgtcctatattatgcaagataaatgaaataattgtaagaactaatacaaattcgacgtacccccacgaagtagtctcggtcacggtgcgtgggatacgcgtccgtcacagcggcaacgtgcggctctggggcgtctggagtgaaggtcacacgcgcatgagtgcgaggaaggtaccagcgaaggtagtcacggtagttctcctccgtgtgtgggaagagctcgttgatcacctcctctgtagctaacacccagtcgtcaacgtactgctgtacacgtggagcccaaagtgcgcctgctagctgtccccgtcgagtcaacctgtgaagagaggtaaattatatggctcgatgaagtaattatcataaaaatttagaaatgaacaatccgaactcacgagtggtcggcagggaggacggtcggctgcacgttgcccggaaacacctgcctaagtccgaactgtctcatcacatgctgcgggcagtgaggctcaacgaaaatgtcgaacaccatcggcaggatggtgagccagtaagcctggtcgcgtgtgcacaacgacgaaagtcctagcggtgctctcgcagcgacggcctcttctgtgtacggctcccagatgacgtcgctcggctggagacggtcaaactcgaacacgaagtccgggtaacctcgtctcacctggacgtgagcgtaacgacgctgcaataaacatgatcggaattagacatgttatgtgaagaaaaaaaagaagacgactgataaacttataacgcagcgaagttgcactaaccccacgtcgacaccagtaagtccccatcgtgggaccgtcctctggccactgcgcgctgcgaccaaccccgtatggtgcgctgtccaccactggtcgacctatggcaaacctctcggctgtccaaagctgaagcaacatagggcagccagcgatgatcgctcccgcgtcagtcttcgtgcacgcctcacagagggcacggtacgtggctgctagcacggcagaaccccagctccactgcggcacgtcctgtggctgagcatccgcgatcgaccgtgcgtagtggaccagccggaagtccacagcgtgcccgtgggtgctagtgaacatcacccacccgaacaaccacaacaggtacgcctcaagggagcgtcggaccgagttatcatcagcgtcagggtgcagaaggtccgcctacaattaagaatgaaatgttagtacaaaacactctgttgatcgcaaataagcatgtatgataataacaacttatttacttacagtgaactggagcaaccaagccttgctaggcccgactgtagagtacggaggaagggtgttggccggtcctaggtgtggaaggcgcatcacctgctcgaagcgcgcagtgatatcctccttccacccaaaaacaccgtccacgggaccaactggtgctcccgccagcggtagcccgagcaggtacgacacgtgctgcagtgtcggagctatctccccacagggaaggtggaacgtgtgcgtctcaggtctccagcggtctaccagagcggtaaggagtgaccggtctgcatcccaccgcttcgctgggtcacggtcgtccgccgccgcctcaacaagcctacaaagtggtagaaggcctgccgcacgcaacctgtatagagcaaacttcaaacataagtacaacacaaagcaaagttgagttgaaatgtgaacatacgcgtaccaaggaacgtgacgggggtcgacacgcaaccactcgcgcgacgtgcgtggacggaaggtgccgagctgtgcaccctcgactgctgacaggaacgagcggtggttcctgtcaatcccacggttcaacagcgccggtgtgtcgtacgccatacctgcatcaaatagattgatcagaaacatataaataattagttcaacataagtaataaatgttcataagcgaattactaacacatattaaacaagagtacaaacaaataaaagtgtcaccatacggaatatttctgattacaacaataactgcagttacacgatatgagtacttagtccgaacactcatcacgataacattatgatacaacaccgaatagttcgcaatactactagtacaacaatagtcggaggtactcattacaacaacattcaattgaaattacacgatagaagtatttagtccgaacactcatcacatcacaacatcattttatttcctaaatcgatagcattgttacaccatggaatcgcctgctgcgcgacgacgccttggccttgcgcgcctgcttgttgttccttcaccaggtggtcgcctaccatcacttgcctgtccagatggactagcatctgcgccgcttggaacttctgcattcttcgggcatttcttgtaagtatggccgcgcagatcacacttgctgcagcgtaaagtcctcccacctgcttctgactcatccatatcatttctgatgcgtctagtttggcgtcgaccctttttcacccttaacttagatgggtttgcgatgtaaaaaacttgggcactcagcgttgtgtaagatcctgagatcccgaacccatatatctcctcactccatgtatgaaagattgcttctttcctgaaataatttgagacgtacacattggaagatatgccacaatcaccggcagcagcaagaacgtgtgagcaaggaaggtgatgaagcttcggcttcatacaactgcaggtacatccaccatccgccttcaagacacattcctgcacggcttgcttgcgatagataccacgcctgctcctatcaacacacattatttcataccgatgcacttgtgtgccttgagcaacaactctatgtctccgtgcctttttgattttatcttccatgtactttgtcactacgttgccaaacactatgttgttatcggccatggacggaccaattttcttgtatcgatccctaaagtacgcttgcgtgccgtgaaggatgaattcaacaatagcaaccaatggaagtacccgaactcctcgcattacccagttgtacacctctgccaaattggttgtcattatgccataccgagatccatcggtgtcgaacaatagagaccacttctccttaggctcattctcaatccactgtgtgaaatttctgatggacgaccctgacctccttctaaaagtaggttacattctccagatcaaactaaactacatcttacaattaacactactgtctatgtctcaattcatactattatattctatgctctggatctacacatatgtgctgtgtgctacagatatgctaaaatatatggaactaaaactaaaacgcaacatatatactcaaacataacatattagtacaaatgcaaaagatgtatgggagcaaacctgtgatgaagtgagcgaaccagcagggcttcgccgctccccttctgctgccctcccctctctctctttcgttttttttttggattttgagtgaatataatgaaatttcagagaggggggactgggctttataggggggaggcaaaaatcgccctccccagggcggcaagggggccgcctgcaaaattccatgccccctcgccgcccatttgcaggcggccccccgcacagtacaaaatcgccttagcggagggcggcaagggggccgcctgcaaattttgttgacggccatcgcccgagagcgaacggccgtctgccacgtcattttcgccgccctctgggatggcgatttttaaaaatcgccctcccagagggcggtaggcgactacttccgtcaatttttaaaatggaaaattatttttgtaaaacttttaataaaaaaaattaaaaataaaaaaaattcccagcttttgtctcccagctgaaataaatcgcactgttctatttagtcatggcacatgatctgcactagtagaccactagtgggcaatggtacctgctccacgcttggcccatggtttgtagggccttcgatatcgagtggaaacggaaggctgataggatcggacggtgcccgtgggctttttgccgtaccaccacagccttggatgagcaaggcaaatagctaaatactacgggggtggctaatgggcgatcgatcgctcgatccctatccccatatggcctatacactcctctcccccttcctccttcccttctcttcctactacaccataattttttttaaaaaaaacaaagttggaaaaatttatatatagaaatactatatataaaaaatatttgaattcaaattcaaatttgaaacgggtacgtaaacttttgacttataaactttgggtctataaactaatatttgaatttaaattcaaatttaaaacgggtatgtaaactttttgacttatgaactttgggtttataaactttatatgtatagaaatactatatataaaaaatatttgaattcaagttcaaatttgaaccagatataatttaaattcaaatttgaatcaggtatataaacttttgacttataaactttgggtctataaactttaggtgtataaatttactaaaattaaaaagtaatgcggtgaaaaaaaaaagaaaccacgtggaggacgggggataggactttcgaaatactactacctttgctcaacgtgttttctcctctctagtactcctggaaggagggtgtgcgtcgcgtgcacaaaagctgcatcggtccattttgcttgcagggagggatccaggaccagacgcccccggctgcggtcagtggtcactcgatgcatctaccgtggagcgtcagacatctatcgtggttctgtataatgtcgctgacacaatcatgcctttgtaccggattaacgaaaagaaaaaaaaaggagaaaaaataaagaacttaggagtatgagggtcagaagccactgtttccaccgaaacaaaacgcagccgcgtcgcgtcgatcaccccgcaagaatccagccgcggtgaggggagcgtcacttagccacatggacaatcggacacgcttgagatgacggggcgcctaccgatcgggagaggaggtggccggcggccgcgtcgttcgggatccagagggttccaaatctcggacgcttgcgccattgcaggggcgagaccgagccgagcgtgcgtgtcccacaagcgactgattggcgaacagctaccaacagtaacactactgctagcggtggcgatcgagcattcgagccctcgcattcgcgagaaatcacaatcttttcccagagattccacggacaaagcttcacctgttgcttaatgattaccgcatcagtactaacagttaccccgatttagacggggaatttttgaagcctcgacatatagagtagacactagagtagtatgctctactgatcaaacctcacgctaatactgctatttcttccaaggtagtcctactagtacgcttagtaccagactaatactagcgctgtcatgcttaattgctgcaggcaaacaagggatgggcctcacctgtcagtcagtacacggggtttccaccgtcactccaacctgaaagaaaaacaaagcacaaactacacattccgtcaatgtcgaaaaagagataaaaaaagaacgcctggtgcagtgcggatcaaatcagcgaccttaaaattcccaatttgatgtacacaggctacaacgttttcaagcacgctaaaaaggagcaaaagcaacgaagagaacaccactggcaggagcatatgcacacattacgcccaaatcacaggctttggagtttggtctaatttaatcataagattagcacgcgaagccacaaaaaggccaaaaggaaaaatctcctgtaatctcccccgtctagttaattaattaatttagtcctctaaagcagcacacatccctactgatcgctttttccggccatgccgagccatctcactcatcctcgctccggcatgctcgccgacgatctccggtgccggaacgccttgagcgggctcgggaagtgccacccccaccgcgccttcgccgccgcggccgccgcttttgcctccactaccgtcgcggagaccgagctcgacctcgcgagccccatccccccctcctcctcctcgtcctcctccgccgcagcagcaacgccgtccttggccgcgggcttccagaacggcggccacccccagaccctcgccttccgcctccccccgaccgcgccggcagtggctgatgcggtggaggccgccgcgagggaggaggacgcggcgacggaccgtgaccgcgcaatccggtgctcccgctcgatgagggtgtggacccggccgaccgcttcgccggacgccgacgaggaggaggacggggacgcgcacgtgcaggggcagggtcgcacgtgcgcgcagttggggcagaggcggaggagcctgtcgcggaggcagtgcgggcacaccccgccgccggatctcgccaccgggtgcttccggcaccgccactcgtcgccgccgccgccgccgccgacggcgaccgctgccttctcggccttcatccccctcagccccgcgcgtgctgttggttgctgcgtctctccctctcttaactccgctccgcgcttctcagagagagagaggaggcgttactcacaacgtcgctgtagaacggaatggaaatggaatagagcgagacggaggccataatgaaggcgccaccaccggagcttactactaacggcttgtggtttcgcgagcgcaccaaaccggcacgtactcccgagttatttacgagtgtgccatccgtagagctggcggctagcagctgaggaatatgaaaaagatcttctgcgaacaccgcactcgtacaaaacaatgtactcccataaaaaaccctactttgaggtactccctccggattcggatcctctgcagtaatgtagagggtcactatagctacactaatatgtgaggggaacagtgttctaatgcacaccacagtcacgatttactgtagctacaggggatgaatgtactgtagcacctctggttagtgctgtagcagatttactgtagcatctcatctgatccatccatcttctatcggacgcttcacagtactcctaatgccgggcactgtagctacctctgaaatttctcctctacagtagaggatccgaattgactccctccgtctcacgatataagagcaagtataatagtaggctataagccggctaaatgctgagatggaggagaaaagagaggagagagaggacaagcaggctataaacttacagccggcttgaacataagaactaataaactctgtgagaaagacaagtgggccctgtattaatcgtaaagagctaactattatatgagtaggctaagagaaggctacaaagaaccttatagccaacaggttggctatattattatctttgctctaagagattttgagtttttgcttccaacgtttgaccacttgtcttatttaattttttttgcaaatataaaaaacgaaaagttgtgcttaaaatactgtggataataaagtaagtcacaaataaaataaataataattttaaaaaaaattaaataagacgagtgatcaaacattgtaagcaaaaacacaaaattccttatattatgggacggagggagtatgacatgcttggagtaatactatgaattcgaagatttatgaaaattatatatgatgaattcgaagatttataaagtgtactactaatatgcaaatccattcacagtgtcgctggacgcagagaatcctggccaccgcgctgagagataaggctgccggcgcacgtgcggggtgggaatgaggcgtgtcggggtcagttacatgggccccgcatgtcggtcttttgtgacgggaccgaggctgtttgttcttttttctctttctccattctccatgcccgcccgtgtggtggactggtggacggacgactcgcggctttgcgaggcgcgcacgcgcggacctggcctcaccgcgccggtttttgcctggttgcagccgtacgggacgacgaggcatcgtgtccgtcgtacacggacgtacacgccgttgctagtcgcgtactactcgcgtggattgactagcgggcgtggcgcggtgtccactaccgcctggccctcggttgtggttgtacttgcacgtgtggctgacaacctccacggtgtggtgtagcgtgcgcgcgtcgttggctctgcgtctggggctttcgctagacgtcggccactcgtgcaaaccgtgcacgtttgcgacgagcgcgtgtacacgtacggtgcgcggttgcgtttcgaccagatattccatcgttccgcatcgtacatggaacatggaaaacgacgagagcaatttggctatcgacggcaacgggaacgggcacggacaaaattttgccatgttatttaattacagacccgggggaggaagcgcattgtttttctcccccataggaaggtaaaaaatgcaccgcctgcttcgacacctgtagtatatatttttcaccgtattgccaagttcgcaaggagtagaagcaaacatctttcgttctcagataatggcctatatatcgacttgctcttcagtgctggatcttgcctccaaaactatccagtttgctccgaaagggaataatcccaaatcttctcccgcaacacagtacaccggtacaccaccaaagagagtgtacactgtcgttgatgcggagggttcagtccaaaacgtcggcagagcggaagccacaaaatcttccctgcaatccgtcgtgccagaagcgcagattcagacttcacaaagaacaagaatgcgtccccaattaagccactcatcctttgtcacgactcaggagtcacgacaatttaagtaggaaaacggattcccttgttgacagcacatgagccactaggtcgatcaattcacatcatcagcaacgacactcattctatccttggaaaggaattctgccagttcaaagagacaagcatgcaaatccttaacatgttgcaggtaggcacagcaccagcaactaccaactaattaatcagccaaccaaacacaggcaaccaccggtggaggggtaggcacagtagcgcgcaggtgtcagcccatgggctgacgccgcggtatcatctgctattgtagagagcggcggcgtaggcacggtccccgcggtaatcctcgacgagggtaggtgcccggtgcaccgcgcggcacatggcgacagcgctatattcaaatccgcctagacggcgcagcgtccaggcgtcccggccgcggccggtcggcgtcaaatatccacgcgacggcgacggggatcgactagtcgaatccccggctggccggctccccatcattcccgatagttaatcaatcccctaatctccgcgtcacgttgctgcgtgttactaggtggtttaattagccggttaactaccgggggattccataattaggtagcgattagacaatcctttaattgttatcctctcgacattcctaacggtggctgatcatccttgatcaagttgcagacaaagaggccacaggccagggacaatctagcatattgggctggtataccctggatagcgaacgggaaaatttatcgacgagattctctgccgctgctaatccatgcctatgagcttcaagcacggatcgacgaaactgaagatgccgtattttacaagacgattttctgttgccaccgtggtctccagagttcaggtccctgtacagcaatagttccaaacacaggtccctgttaccctatacaacaatcgtcccaaacacatgccatttcgcgtgggtgttttgttacactagttaggtgtcggtgcgttgcaacggacaaaaacatatatcaattttaaattacaccacgtgaaattatgttaataatcattgcgtgcaattttgttgtaacaaaaaccttaatataaaatgaacaattttatatcacttttggtttcttctgtctggggatttatatttacctcttttagttctcggagcgcggaagattgttctaaaggaaggaactacaaccaggaaatagtgaaattaatcataatttgaaacacaatattttcacgttgccattcaacaaaatcagcagtgctgctctaatcgaaccttcacattctaggagtacacgcacgcttttccaattaacatttactccctccgtcctaaaataaaatataagaagttttagagttgaatatgattattaagaaagtaggtagaagtaagtggtggagggttgtaattggatgagtagtggaggtaggtgggaaaagtgaatagtgaaggtttgtaattgtttgggaagagaaagttgatggagaagttatgatattttggaacaggtcacgtttgtttaacggtagttccgagttcctcaaaaatttgaggatggaaaacttttagtaaagtggcatatacaggctcataagaaacatacctagcttttttttttgtcttcttataactagaaaaaataaagtgtatgacacccatagtagaaaaataaagtgctggacctccgtgtcgacgagttcgattgctgaaccggaaagactatatgtcttaaatagttgccttggtggtgaggttgatgtgctttcatgccatcggccagggatcgatccctatgcaccgcaccattttctccttttaggcattaaattgcaattgggccacaacaatccaagtgggccttacaaggccagcccatctgcctcttgaaccgccggttcaaaatagcccgcgtcaccggttttcgttcatccggtttgtaccggttcaactgcatgtgtggtctttgagttaaaccgaaccgatgagggtgctggttctggcttttttccggttcaaccgccggtctggttcggtttttttactaagatgacacctacacggcggtaggaattggattgctatctgctatgatcaccacctgtgaaagaaatgtagtgtaaaccacttagcgaaatggttcataggtgaacttaacaacacattcaacagaagtgcacatgtgaaagtgaaacatctaacgcatgagtaaaaatttcagacattatacagtatagtattttaagcacaataaatattttaaaacaatatgtgactttccatgttgtatcaatagtagcggcatcagaaataaaacacctaagagcataatgagcaggagatgcttccaggttgaagcactccctttcctaaaccacatattagatccttcccaatcctggtaatcatggacgaacataaaatcaaaattccataacgacagcgcctcatcaacccagaaatctccatgataatttgcacttggaagatgatagtattatggcaatccacaatatcagcacttgaaccataatatgaaaaaaaatattttaagtgcagtgttatcctgtgctatactgcacttaaatatggaaaaagaaatagcagaaccaaccaaccaacaaatccatatattttcttgtttgctatcgtcttcctgctcaatctagagatctcattttcagttttgacaagtaaaactaaaaaaaaacatatcatgtaatgttacgtgaacaa

SEQ ID NO: 23685 - DNA, 1935 bp, Oryza sativa
cagtagcgcatcatcgtcaacggagttgggcagcgcgagggggtggcggttagtggaatcggcagccggtgatggtgaggggatggatggtgtcggtggtggcggctgacgaatttgaaggtcgggtcggcgagggtggatagaggaggcagcgacgcataggcggagcagatcgaggcgacagtggtccggcggcggagaacggtggcgatgtggggtgccggtggcgcttgaggcagagtggatagcagcgcatcattgatggaggaggttgcgacgcgtgggctgaggtggtctggtgacggagtacaataacggcgaggaggagatcgggcgtggagcggagacgcacgacgaggcggagatcaggggttgagcggaggagacgtcctcccctcgatctgacaacgatggcgttgagagggcttccttgatccgacgacggtgacgctcgatccgatgatgcatgggcacggagaaggggagttggcgacatgcattgcaagccactgcaaaatgcgggtggtggggagctcggaatttggggagggggacgcgtggtgagagcgagtacaagagcaggctataagtcagttgtaaacacatgcggaagagagaagaaaagagatagaaggaaaacaggctgcagatttgtagccagctgcagcgtggaatccaatacgttgtgtgtgtatgagaggtgggaccatatattaatggtgtagtatatacttatatgtaactattgtataaatgagctattagattggctacagataaattggagttggtacttggctatactattaaacttgctctgagtgagaggtgagcggggcggtgcggttgtaacgccccgcaatgattagaggaaaaagaaaaggagagaaagaaaaggagcaagctagctagcagcccacaacagcaagcagcaggccggctagcccagcccaacagcagcccacaacaacagcagcagagtagtagtagcagcgcagcaggcagagcagcggctcgctacagtaccttcgcggtactgtagcaagtttaataccactcgctagtttgagaaggcagagagcagcttataaaggaggatagcccggggactgtgaactccgattccggaacgattgtgattgtgcaggtctatcagggtcggcttcaccatcatcattatagatttttttaagtagtaaatatacacagggtatctatctatctatccaagtgaaaagtgaatcctgctttgatcatataataagccacgtcatatgttgaataatgaccgtccgatgcaacacaaattcaatatgtaccgttagatatagtcatgctctgtaaaaaagatgggtcaacaatagccttccaagaatcaccgtcaaatccacatctcgctagaaacacctggagcaaagagtgaggtcttgactcttgacgagcacttcccgagaaaaaaatatgaattactccctccgtcccataatataagggattttaagtttttgcttgcactcatcttatttaaaaaattttggaattattatttatttttttttgacttactttatcatctaaagtactttaagcacaaaatttcatttttttatatttgcacaaattttttaataagacgagtggtcaaatagtgcagacaaacactcaaaatcccttatattatgggacggagggagtagctaggaaattagaaaaacatattccctccagacacaatcaatcatcctattatcaaaatgtcgatatggggtacccgtaaaccggatatagagggtattggggtacgctggtacgaggatctacgtagtacgacatcaagcaaataaaagacaatgattatactggttcaggtcccttgataggtaatagccctaatccagttgatataggattatatggtggaagtcacagattaca

SEQ ID NO: 23686 - DNA, 566 bp, Oryza sativa
agctcaagaagatcattcaggattcaaaagaattggtgatggagtcagatattcgaagcaggatgcaagcgttgaaggaccaacttgttgaggcaataaatcatgtacacaaggtcactgaagtccatgtgtttgtagctatatgccgaggtttttgggaccgaatgggacaggtatgaatagaagtacccttcatatttttctctttgtcatacatgttactaatcaacctggttttaggatgtcttgagtttcctggagaatcgcaaagaaaacagagcctggtacaaaggcgcacgtgttgcagtatctgtaagtttatgctcctacagtccccatgtcaccctgcttgccagtgacggcctatttatttagttctccattgttgatgctcctcctttctgctatgattaaataaacatgcaacattgcaggtgctggatgatacatttgcatcccagatgcagcagctgctgggtaattcgatccaacagaaggagctggaaccacctagatccatcatggaagttcggtcgatcctctgcaaagatgcaccccgacagaag

SEQ ID NO: 23687 - DNA, 8339 bp, Oryza sativa
accaaatttctttggggcaatacaatccttaagtggagccaaaacatccccgtactgtttttcaagagactctatcactgctttctcaatatccgcaatagccttttattgtaaagcaaggaaatagcacatgttaagttggatttctttgctgtgcaacagttcaataaaggtcccatgaatgatacaaacttacattctcaagaacaaatatgtattctggccatcggcaaatgataacctcgtactctgtcaatgtattcttcagcaaatcatacatctcgtccacaaaaggtgtggtcatatgctgagtcctaactcctgaccatttaacctgatataattggagaaggtgatgcataatgagatacaattacaaaatatattgactgaaaacctgggtggacaaactattttagtagctgccagggcacagtacctacatataacctctccaatgttacacaaatggagaataaaagcaaagataaatactggattaacactgaggcaacacagtaccaatagcaaatggtatttgtcatatgaagaacctgtgctaaccaaacatatcatagatcaacaatgaacaggagcaaaagaaagagcagaacctaccttatccatcctgcaattttccagcaacgtcctgcgcttgtcttcgatccataagacaatgtacaaatgaaatagctcttttgcgtcaacaccggctttaattgggctgtgcagaaattcaaattcagtcttgcctagacaaggcatgagaaagaagagaacctagcaaacacataagaattcttttttaccatatattccagctagcaaggtccttctgaaagtcagcagttgcaatcaccaaatcagcaacaggtgatgaagggccagttggagggcatgccacaagaaaagcacgcagtctatttgagagttccacactatagatggacgcagctaaattggggaggtcaacaaaactgtagaagcagagggacaaacataaaattgaaatgattgatagaaaaaaatagaaacaatagcaaaagcaatataatcagtagaatagtcaacgcgtctaaatactctacaatgaaactatgcatacaaagtaagtaatgaataacagtacatggtaatatactagcctagaacagatgttgcaatacaatcacaatacctgggaagtatgtgctggttatgaatttcaatgtctgtaaagatttcattacgtagattacagcataatgatttcatcttctggtaagctgttgtaaaggtcaccagatccactcttatgccttcggaatttcctgctacatattcatcagtctcaagcatgtatcgtcttgatcgtttcctggcagcagcctggacatatttttgaataaatcaagctacagagttctggctatagaagataaatatcgagatataaaacagttgaagaatgacctggaaataaccgcataatctgagttgagcctctggagataatacatcatggagaagactgtaaagctttatagctggttctagagcacaagcagccaaaccagttggaggtctaaaatcttccactaaacccgacggcaaagattcattcagagacttgtaattctcaaataccatcgctaaagtttgctcaatttgctcctcaacttcacctaatatgcggttctgatgatacaattccagtgaagcagcacagttaagatgttaatgttacgtaagcaatttcagaaagaaaaaacaaaataagccaataaagcataatataatttattccacgtaactagattaatttgcctgttatctctacaacataagaagagttggtgatggtgttggtgtgctctatggtgatcttctatagattgatacatgtatacaattgtgtaccatttgtaagatttaaaataattccataccgtatatgtgcttacatatagatagtcggttgatacaaatttctttagttttacatctgaagataattattctagcatttcttttaatattagaacatataaaatacacattcatttgtaaacagttagcatataggtgcagtactgctattgcacacaaggataacataacatcaacacaaacaagggtacacccagtgctgaaagctcccacacattattgggtgtaaggaagggaatttcttggataatatactatatagcattaacattaaatcatggcatttgctatcagatgtgcaacagaacttgctgttccaggggaaatatctgaagaaaagaacagtacctcttgatggctcaatgcagcagtgccttgggtcttcattagtacgggtaacaaaaggtcatgaaccagattgagccaatcagcagtaggggttgcaacatccatgatataagagagatacctgaacaaggagtcaagggctagcactcagcaatagcaaaggaaaggaaatgagggaagatgacagatatttgaaaaaaaattatgatatgatagaaaaatttaaaggttctaatcaactgctagaacagccttgtgagtcagacttaaataatctcatcaggtattgtaaatatttcttgcatctagacagatcaagaaaagggaacatatggcaagacttaagcaagttaagtcacaacgtcatgccaacaactatatgctaaggctgagttctttccccaactttcccaactcacctccctcgttttacgcgcgcacgcttttcaaactgctaaacggtgtgttttttgccaaaaaaaaatctatatgaaagttgttttaaaaaaccatattaatccatttttcaagtttttttagctaatacttaattaatcatgcattaaacagtcgcttcgttttgcgtgcatgggagggagggttcccaacccatgctcacgaacgcagcctaagtaaaagtgatggttattggtcctatagtaatagccaaatacctcagctttgtgtaggcatctgaaacgccatagtacaatgcaaattctgtcaacaaccatttccaggaaccatgcaagatgagattccgttgttgaatgtgctgtgctttcattgcaacttccaaaacaatatcataagccacagtttctgcaacagagccatactgcaaagaaaatcacggccatgaaaattaaatagatgtcaattagtcaagtatcccttccactcaatagagcacatttttaatctcaaaatggataggccatttcgaatcaggcagctacgaaagaaaggtatacttttaaatcatgtttatatgacttagatcctgataaacagactaccctgttcagacaaattcaaatctacaatgtaaaatcactcttgtttcatgttattccatcagaatgaagatttaggaaacatttcctttgctgacatgctggaattcatagtaacataaataaaagaaaacttcagtcgaatcatgatatgtctggcaagaacaaagtctacagtctaaatacatgataaaggctgttttacactcttttttttaagtgacaaccatgacaggaaaatataagtaagttgatcaatgattgatatactgttgtttccatgttatacaggaaacaatcaaatggtaaaaaatgccatccatgaaaatcatccgtgtcatttaaggtgttcagtaaatcgacagctagcaaaaggagtgtgggggagaaatgagcaataggttacagtgctgcaattaacaggtatcaaataaattaaattcacatgaatacataacatcctaagatgataagacctgaatttgcagaacactgaatcagtaccttcgtgttgttctcatctgcagcagttgtgtagtgtatgtatagctgtatgcggcctacgagttcatgctcaggttcccggtatattgaccaccaacgaagcttgtcagtctacacaagaaagttgagaaatactgtaaggaacaaggattttgaagaagtcatagattgtacaataaccatttagagcaagtatgaaaatctacaataacttctatttaaagaacttaaacagagagtagcaagttggtttggaaaatcatacagattcctctgccattgtagcaacttgagcaacaacacgtccacagggctttccttttgaatcagaaacatcaatgatcaaatcatctccaaggctatccgggaagctgaaatatttacataaaaatattcagcctcactaatctcataatattcagatttccaggcaaaacaatgatatatgtgctcaaagaaaggtcttgctacatacaagacatgtgtttcaccagatcctggctgcatcggtacaacatcatcttcaggtgtacttttaagcctcaattggcaagagtaagtctctgaggcaaaaaggacatgatggattcagttagggaactcaatgttaaaagagaagtgatccatatataccttgcggtgtttcataggatgagctgttgcgcagggtagtcacgccaacttttagcacaccagatacctgcttgatgtactgagcacttgcttgcatgtacgctaagctatgttttgaaaaggaactgttagcaggtagctgtggtaaagtttggatccttcgaaccgactcccatccagaggagagtgtggattgtacatttgacaaacggtaccgaactgaatttagtttcaccatcggcaatgatgagaaattgcaaccagatggtacatctacagacatccggactttccgcactgcaattggaaatattaactaagttagcactatcatcttggcattcctttgcatgcaacaatgacaatgcaaatcaatattctggtaatggtagctatgaagatgtggatataagtagttttcataaacagtaggggaaaatagccagtgttgggtttccataccttgaaccttcatcttgccaattgttttcttgggtttggatgcaactccatcgctaacaagctcagatgtccgttttgccatgagctcttcttctgattgtagaagcacattttgcaggctaaaaaataaacaagaatatcaacttaagattgtattactgtttatgcactaaggatggagtgaaacaaatatttaagcactatcagcatgaatgtgcattagcagtttagcacatggataacaaatgtttaggttatgtttacaagaggctagatccaaacactttctatcagttttgacttctaaagtatccattttaaaaaaaggaaagtacaataacaatttactcaagatccataaatatttccaactgtagcaaatcaatggacaggaacaaccacagcagtcaagtaaaactagaatgaatagataaattttgtatctgaggaatttatttaaagatttttcaaagtacaagaattggcaattgcagacagaaacttaaagcactgttcacctcaggttcagaataggcaggtataaagccagcaaacatagacagctacagtagttaatggcattttacatactgtcatattttatgagcagaaagcattgttcatgcataaaaaataactcaccaaaatgtatttcgcagaagtgtgcattcattttccagaaaaacaggagcttccatgcaacctctagcccatgcatgaaggcacaagcgaacacaagcatcataagcaagaacagaataccagggcccttgcaaacttggataatttttttaagaaatgtgttagtagtgagcatagtacaccagaacaaattatgacttgcttactacacatacctggcatgaaacgtggggactcgaagaggaattgaactagatggtttgctgctgtgcccaggatttaaagtgctcctacataaccgaacaattttacagaaataaatgcaaacataacaaaaaaaaacttctcaagaagtatttaacaaataacatgtattacaaaagctacctttcacttttctcaggcaagttaggttccaagccatcatcattatattcctcttttttgacagtcgaaccatcgcatacgtttgcatcaacattttgagaaacttggcttatttcctgatcataagcatgtattggcggtgcactgggtacatcagatagtccatcctgcacataaaaatcaatcatcacaattacacaacttaaaagtaacaatgtcatcgtgcgacatgttcaatcaacacatcacatattgttccctgaaaacttatcaatataaaaattctcaatatatatgatttcctttggctagtttggatcatttatagaaaacttgacaacaaaacattccccagaaaactgcattttaaaaacggttttgcatacaagattacagtacctgctcagcgcacatgcttttctcaagaggaagcaaatgttccagatttatgacagataatcctaggagagggtttctctttagaatccagaagcaaaaattgtttttttaatcatccagaccataatcaaagtgaactaaattacaattctgcttcagaaaatattcatggaaccccaccaaaaaaaagaaaaagaaaatattcatggaaggggggaaatatttttttttctcagagaactatggagttgtggaggacatactatcgaacaaaattctgagatatagaatgcaacaaacagtatcaggtaatctagattctggacagatgattcctcaaaacaagaaaactgtttcatttttaagtttaggtgctaattttttttagcagctggttgcttggtgcgggttcacatactactgaccataaacattttcagctttatgcaatacaggcttttctttcctaactcaaccgaaaggtgagtgcttgtacatggtaccgcagaatgaagtaaaatggaaatgacaagtaatgctattgctttcacagaaataagatactgaagctgaggataagaaaatgaatatgctttacaggtaagcgcagaaacgtaccatttgagaagatttcacattgtcttgagcagggacatgggcagaatacttatcctgttgatatgttcttgagtttaaaggtgcagtgcggctgtaattctctgcagctgccatccgggttttcggaactgcattgttcgcttctcttcgcgctgggccgttatgagagtactcagatgcatacccacccctcgaggccacacctttgctccgtgtctccacctgactggagaactccgagctcccagctgagtccgagtactcctcctcctcaacatatctaccgacctgtgcctggggccgccgtacctgctgctgcttcgtccttggcagtgcagtgtctctcgacgagctcagatccgagtaatcgctcgagtagtaactcggcatcccgggaaccgtagcataccggtactggggcacggccgtgcgcctgagaatgtcctcgcggcggggcgacgagtccacggagtatctgccgctgcacacctcgacctcctcggtgtccgacgactcctccatgtcggatcccgaggcgacgctgccgtcgtcggtgcgcagcggcggcgccgccgcgcgaggcaggtgcccgctccggaacttctccggcggcggcatgccgaggccgcccccggcgccgcgcaccgcgcggagcgcgtcgatgcggtcgtggctgtgcaccgccccgccatggccctgccacattttgcatcaaccaacaccaccacgcagaaaaaaaaaagcacgcgtcagtgacgaaaacccaacgcgacaccgagcaaaccagctagggctcgggaggagcacggcgagctcgaactctcacctcacgaacccacttgagggcgtctcgatctagcccctccgtgaacatcatcagcgcatgcgagttccaactgaaacggacgaacaaattcagcagaaaaaaatcatcaacaaaatttcaagccactcacaccaaatgcatgcgatccaaacacccacaaaccaccggggaaaaaaaatccacacaacgcagattcaagcacgacgagcaaattccaacgattaggaaccaaatccagcagagaaatcccacttaccttgcacccgagccggagcgcggattcggcgctggaactgagagcgacacgaccgctctggtttgaattaattcgaaaaaaaatccacgcaaacaattccacccagcggctagcggaggcgacagcgaccggagcccggaagagagcccgagtaggtggtagggaagaggggaagaggagaaggaaagggacaacgaagagtttaggcttgggtcagtgtgggagaagaaaggaaaacccactgtaaattttcgaattaacggaaaaaaggcagggtaatttacatgttagccctcgtctggttcctcgtttggtaaga

SEQ ID NO: 23688 - DNA, 9931 bp, Oryza sativa
gtaaaacaaaggattgtaaaacacaagaaaaacataggaatggtcgtttgattggagcgcaggaaaaatgcaggaatcggatgagagagatagactaaaaggaaattttccaagaggttggagctcttgctaaattttctccaaaatctacatacaatgtgccgtttcatatgaattttataggatttggaaagcttcgatcctttgaatcaaagggccaaataggaaaatttcctataggatttgaatcctatgaaatttctatataaatcctttgattcaaagaggccctaacagtaacacacaactaggcccttgctggctgctaatgatggtagggattgccattttgttcctgcctgagctgaaacatagctgttgattgtttgtaacgtgaatttttcatgcatttgttaatctataattccgcaaagcgatcatgtgttaatgcaaccccagcattttcatccactaataaagtaataaacagatggttaaattcaactgaagttgttccgcgtgaacttctctactccaaaattcaggtactagaagcaattcatgcatcgagtatgaacataaaacgctaacctgtacaaaacaatatcaagaacgctccaccgacactaccgatccacccgaccccagcatttccttggctcctcgtcatctgcaggtcgtcgtcgtcatgagcttttcaccgatgtcgaaattgtacgtaggtgtcttccaagcttgagccaattacgtacctttttggcttttgcagcgtggccgatcgcgcggaaaggggagcggtttggtcgggttggacgagaaatcgacggggcaccccggcccgcccgactgatgagatttcacacggaaagcgttgcgcgcgagcgcgagagctgcaccccacccaacacgtaaaggttgcgtccggatcataacggtgaacgttcaggggcaaacctggaaacacagtattaggccattcccaatgcaatgactagatgatgtgtatagtattaaataagctgccacctataataaaaaatgatatgacaactgaataaatgaggaaagagaagaaaactatgtctcaagacatggtttctacacgatatcaaaacatcatgtgagataaataacattaaatttaagtatgaaatagtgatgtttgcattagaatagttgtgtctagtagtagtttcttaatgatatggagtttatagaaactatacgtttagattgggaatggccttacgtaggagtactcgttaatgttcctcgtttactgagcagtgtgaaactgcacgtggacctgaagcattttctccttcgtttactcgatctgcttccttcgacactacggaatgtcagtcagctctgatatgtcgattgtagtgagctgtttttttttgttaatagcaagtggtagtgcaaagcgtttcttctcccgtgtaacacggcaaaatgccatgttgccatgggacctgaggcttatttgcttagcagtgcgggatttgctgaaacgaaaccgattcccgttttgcgtggatggatgcttcacgccggctggatccgagtttcggcgtggatcacttttggtgtgagctaatattattttcgacgtgtgtagagctaaacccaactttatttcgaaccgggggcggaataatagcggaatgtgatcgtgccgtgtaatgattccaattgtcgagtaagcatcgttcgtgcactttgctaatgtcctctcatcgagtattttacatggaaaattcctttgtagagtagtactactgtacttgtagctgcccaagtgacgagggagttggtgagattttcgtcccaggtggatggtgaattggtgatctgtgtcagttcatcctatgggccgagacaaacaaaatggatttcaaagcccatccaaaacacgaatacgttgtacatgggcctgggcctcaagtgcaaccacaggcgaagccacgtcgggcgtgtcaaattgtggtccattactcgaccagaaaatcccccccaaaaaaatcagaaaaatctactactagaaccttcctggcttcgtcgaagcccacgaaatccaactaccgccagccatctcacgggacgggagaatcgccggaatcggcgcgattctccgggcacgaatcgggccgagaaatcccgggtgcgcgctgcgtcgaagcggcgcggcgagaggggaggggaatgtggtgggagtgggaggaggacggcgaggaggcggcgcggccgggggaggaggtccccgtcgacttcgacttcatctccctcctctgcaagcccaaggtgggaatcgccacgcccacgcctcgtctcgtctcttctccttcgatttctccgccgcgatcttttttttttctgtggcacgtttgttcatgacctgagttaaccctcacgggcgtttggattgcgatagatgattgctgtttttgtgttggggggagcggatcttgtagatggaatgccgcccgctggttgcgattgtgctgtttccttttacccaattgggaattggctcagggaccccgattcgtgaatgcaggattactacaagattctggaagtgggatatgatgcgtcggaagaggcgatcaggtcgagctatatacgtcttgcactggtcagtgtttgctctaacacggtgctgatttgtgcttcacattcttgaatcgtcctgtgaattatctcgtcaagtaaagtttggcctaattccacttttgtgcttcacattcttgaattgtcctatgaattatctcgtcaagtctagggattccacttttgtgatggtttacaccaatgcctgcctaatgatgtccactctcttcattcagaagtggcaccctgacaagaagcagggcgaagaaaatgcaacctccagatttcaggagattaatgaagcataccaaggtgagcaatgaagttgtttaattgatctgatacgtctatgtctatgttaacttcaatgtgaaaatagtatgtgccgtactgcagtttacctttgtttttttggtctcttgctaacataataagttgccagcagcaaatcaaaatagatattaatgttcggttgcatgcagatttatctgtattagtgaatttcataactattactcctgagatgcctagacatggaacaattgatgtcatctatgtccaagagaccaagatgttattcttgaatttaaatacaaggaattgctaccacaagactaaaggatgtttggctgttctttcaattgtttaggtgccaatgattcgtgtgtttcctcatttacaatggattagtagttactaggaatctgggttgtgcttaattaaacaatccaatttctctcggcattcagttggagatagcttcctcgtattcttgtcaagtagattgtcaaatcttctggagactaatgcacttcgaacaggagaaattgctcattgcttaacacaaaaatgctcagataatctatagtcaggctagctctgtgattgaatcattgctaagaaattatgtgaaacatgatcttagttcgttgtcacacttgagccacatttatggtgcaccttgaacatcttggatacattcacgtagctttataaatttatatgcattggtgttactatctgtgctcactgacagggcatcttttcgtaactaatctttcccattgtaaagagtgttcttcagtttgatatatcaggtctcattcatgataccataactgtttttcacagtgctcagtaatccagccaaaaggcgagagtatgacaagaaaggcattctttatgttcaagatcataatgtagtggtaagtccccgccctcctacccccacccaacacacacacacacactgaaagaaaatctatgttgcacaagacacttctgatttttcataactctttcaggactatctgaaccggcacaaaggtttaatccttacttgcaatggccttggcataaggcattcagtatggtgatcttactcaggggtactacagtctgcatccatctgctgtctttggatggtgtgtgtcattgtaaaatctcatgtaatctgcaaaatgtagcacggtcatgcggacctgccacttttgggaggaaatgatgacgctgagttcatcctggtatcctacaacatagatgattcttatttggtgatcagttgttgtagattgcacgaagcaagagttctaagttacacatacatgtcgcccctttgtgtaacatactaacataccatatgaaatgccagcacgcacttcaaaatatcttgttagttactgatgttattgagcgcagctgaatggcagggggaaaataactcggttaaagacttacctggcaagttttatattgcctttaaaggggaaatataagtacttcacataacggtatctgcatttcgcactgatgcaactacagatgtagcgatttgccagagataggatttaggatttgtgatttgtctaaaaagttctctatgctacttgcttagtatatatacaatatatttcttccaatgtttttcaaactacagtgttttgacaaatggaaagtggtcggaagggaattagggaaaatatcagctgatctgttggtgacactgcttctcccactcaattttcaatgtgtcaaaactcaatagttctttacaacaaaagggacggacagttatgtgctgaagcaatttaccaaatatgaaggtcgacccatttgatatattattatgtatccaaggtacacagcttcacagttggcggcactttcagtatggagtatatacatcggatcaagtggtaaaaaaaccagaaagacttgagcaagctccgctctaacaaacaaaaatctatggatgtctgatcatatttgaagcgaaagaaacgtggcttacatacacaacttttttccctttcagtaatagaaaaaagaagacctaataataagttggctgcgaagcctaacatacaccataggatcattcatcgtgagctcaaataatcctctctttcagatcttcgaatttcgcaaacagtttgtccctgctttcctgcatatatgataaaatgatcttaggatcacacaacaggaatgactggcgcttgctttgtagggagttgaaaatgtaccttgaagaggaggtaccgtgaagtgaaccaaattgagtaaccagttcctatgagttcaagaacttttggaacctgcaatgagatgatcaagcggtttaggaagtacagtgtaaactcttcaagtaataagtacgacaaaactatatcaaccctactactgctgacaactagaactacatttttcagatactggacaactaggactacatttttcagataatggacaactaggcgtatataccaggagcggtttgaagacagattttaactattttcgatacatacaaatttgtaaacaatgtcatatctacatatttggtgaaaaatgtcatatctacataccaagggaatggaatcgattgcagaaacaactgaagatagaacccataggacaaccaaagcaccggatccatagaggacaagagttggtgtcacttggatgtccagctgaaatgaacgattaaaaaatttgtgtgagcaacagtactaaatgcagtacagcaaaggcgtttcaatgcctcatcccgtatagcaaacacaagaacaggcaagctgaatatatggaaatggatgcaggaaagatgagattatggtgatacatacactcgcttctgagttaacagaaatagaaggaaaaaaaacaatgtggtacgctatacatgaaacaatcaaacttcaatccatagcaagaaaactatggcatatggcatttgtttctgtctatcatgtgttggggtttagagctctgtctctgcaaacctcatgctaggtcctaatcacccagctcacaaactctcacattttggtacacgagtcggtgactgaactcaattttacattttgagatctatcaagtatgcatttgtcattggattcttcaccatacttctgtatgcaatattcttcaactcgtctctcctctcaatcatttgacagcaacaggtaattgggcattgatatgtcagaattggcgatcaattcagaaacatcaacaggtacaacgaggcaataccttgctgaggatgtcatccaagccgccgtcctcctcggctgcccccgacgacaccggcgccgccgccacggtctccagagacccgccattagagaccgccgcgacctcctcgctcttctcctccgccggcggcggatcgggcttgtcctccgtgacgacgacggtggacgccgacgccgacgcgggctcctccgatggcaccgggtccggcgccgccgcgctcgcgcaccgccatcctggcgacaaccatcaccaacagcaaaaccgtcagaaagataatcaatcaatcaatcaaaaaaaatcgtggcgcgttcgggcacctcgagtcgggaggtggcggttgctgcggcggagggtggcggcggcggcgacggcgggaggagcagcgcggcggtggtggaaggaggaggcgaagcataagggggcggtggcgcgcgcggaggcgacggtggagacgaagagctccattttttttttctcttcctcggctttctgtggaggcccgagaaggctgggggtttgaggtttttgtgagctgggaggaggatgagggtggtggtgggctagtggctcagtgagactgtgcgagtgagctgtgcactactactacttgtgctgatgctgtccgaatttttcttttctttttctttttcttctcttttttcacacaccctgattttttgtttgtgcttttggagggtgacatgtggcgctttctcttttgctcgctccttttctctgagtaccacctgtgtgtgtggtgtggtttcgcattctttggatggatctactttcattttcattcttctttttctggtacaattatactccctgtaactgtagtcctgtaccatgcaatttaactgtagcataattcgtattctagaagattttggcctgttaaaatacaaacaaattgatagtgtccgtagtacatgtggagtagtatgtgctgcccatttagatcgagttgtctgggtacttccacgccaccattttttccaagtccataaaatattttctatttattttagtacggcagattttcattcgctagccaaccatagaactgacacattacataggcactttctctttttcctgggataatacattaacatttggggtaacattttctagtggaccaaaaattttgtcggctggtaacacggcctttgagaaggcccagtactgcaggtataccattccgtccggtctccagcccgcttccttacgttgtacttagtaggataatttgggctggcacagtaagtaggcctagcattttcaccgaccacgcgcgtgggcctggctgggtggtgacaatgtgtgtcatgtggagcccaaattggcagattaaactcgtgttagcaagcgaaattaatgggcccacttgtcagtctcatttattctcgttaaacaaacaggcaaacattccgagccgttaataccgtagcctcgttactcgttactcactccgtccaaaaaaaaataaatctaaaatatagaatgtgacatatcctagtagaacgaatctggacatatgtatgtccagatttattgtactaggaagtactatgttggttttttatgagacggagggagtagccattacccgtgcagacaagcatggctccgttcgagcaggagagattgctgggagattgaggagaaaacatctacttttctacgcgcacacttcccaaactactaaacgatgcgtttttggcaaaaaaaaattcttttgaaaagttgttttaaaaaatcatattaatctatttttaaaacttacaatagttaatactcaattaataatacactaatggctcacctcaccttattttgcgtatcttctcaatcccctctttcctatcctctcaggattcaacccagttatcatcatcaccagtattaatagtttccagcccaaggaattattttgtttcggactagaagtctcagacacgatggtatttgcttcggattggctaaggatttggtgcatatttatcggcccagcccaaattcttatcgggcctagcccatccggtagccgccataaccccaccggccaccgtggtcagcttctcttatcgcgttgcccaaataattacacgaatcgaaccaaaccctagcttttcctcttcgattcccgatcccccacccagcgactcgccggaaccctagccctagatcccgcgcggcttgccgccgtgctagccatggcgtccctcaaggagctcctcccgacgcccaaggcggcggcgtcgacgttctacgaccacagcagcgacccgtggttcaaggagcggtatggcggggagtcggcgcaatccgacgcggcggcggcggcggcgaagccttcgggccccgccaagcccgtgccgccgtacgggaagcgtggcgggttcgtgccgcggcggccggaggacttcggggacggcggcgccttcccggagatccacgtcgcgcagtacccgctcggcatgggccggcgcgacgagaagggcggctcgaagatcctcgcgctcaccgtcgacgccaagggcagcgtcgccttcgacgccgtcgtgaagcagggtgagaacgcctctaagatcgtttactcaaagcacagcgacctcgtgcccaagattgccacggctgattccgaggcaaccgcggacgacgaggagtaccagaaacagatcgaagaaaccactgaacgaactaaagctgccttggagaaggttgtcaatgttcggctctccgccgcacagcccaagaatgtgccgacgcatgattcagagtcaaagtttatcaagtataagccatcgcagcaatcggcagccttcaattcaggtgccaaggagaggattattaggatgtcagagatggctcaggatcctcttgagccaccgaaattcaagcataagcgagtgccccgcgcttctggatcaccgcctgtcccagtgatgcactcgccaccacggccagtgacagtgaaggaccagcaagattggaagattccaccatgcatttcaaattggaaaaatccaaagggttacaccataccactcgacaagaggttggcagctgatggaagggggctgcaggaggttcaaattaatgataactttgcaaagctctctgaagcactgtatgtggcggagcagaaggccagggaggcagtacagatgcgatccaaggtgcagagggagctgcagctgaaggagaaggagaggaaggagcaagagctaagggcacttgcacagaaggcgcgcatggagaggactggtgccccacctgcacctacaggggttcctgctggtggtggtagaggtgctgttgatgacagggaggaagatatggatttggagcagcctcgtgagcaacgaagggagagtagagaagaaagggaagcaaggattgagcgtgacaggattcgtgaggagaggagacgtgagagggagagagagaggaggctggaggccagggatgctgcaatgggcaagaagagtaagctcactagagacagggatcgtgatgtcagtgagaagattgccctgggcatggcaagcactggcggtgctaaaggtggggaagtcatgtatgaccagaggttgttcaaccaggataaaggaatggactctgggtttgctacagatgatcagtataacatctactccaagggtctcttcacagcgcagccaacgctatccacactttacaggcctaagaaggacggtgattctgatgtgtatggcgatgcagatgaacaactggggctgcaggaatt

SEQ ID NO: 23689 - DNA, 1607 bp, Oryza sativa
tggagtttgataaacaggaggagaatgatcccttcggtcttgatcagttcttgactgaagtgaagaaggggaagaaagctgttgagaagattggaagcggaggagccatgagggcaagtggtggatcctcaatgagagatgattacgagggtggaggatctgggaggtcccgcattaactttgaaagaggtcgttgaggtattagatctgcatgttttgttcagaagtttctccatgcattccaaatgttatctggagggtattctgttgagaatatcaacttcttgatgagaggacttgatgtctgagttgtcttaatgcaacgtctacttccaaggggcatcttaaggagtgtacctgtttagatcctgtgattatgcttgttgtttatctatttgtggatggatctgtaagcttaacttatcatcattccatatcccttatattttgtggtgctttatgaagtctcgatgtgtctggctgaccttacattttctggtactgtaccaagtctttaagatgtatctgcctatctggctgaaatactgagacacgggatacatataaattccgtgttctgttttttcacaagttctaattatttcatgctaccatgattgttggctggatggatttctgggtattgccaatatcggtatgttgttttggggatattcatgttttgtgcaaatagtgaattcttcgaaaattttttgtcggtaagcattttctgttgcaagactttgccggagcattccctttgcttgcagttgatgtggtttctgtagtaccaactttcggattaaataacttctcttttgtgattattactggtaagatcatggcataattttaaaacactatccatcctaaaataaataaacttaatacatgatatgatatatcttagtattagaatctgaacagatacacactttcagtttgttttgtcttttcctttagttatgtagattcagccatagtgttgtgtttttcttcaggtatgcagattcagctataggaaattaggaacacagtgaagaggaaagttttcattagcacgttttcttgtgtgaagcgcaaataacaggattttggtgttctttgattttggccaaaatcttcatggcatggatggaattttctcaaagctgaaaaccgtaattttctgacgggctgagcaaattacgctggctgataactccggcctgcttaatgcctaggcccaaacgaagcagccgagcaaccttgaggttccatcggcacccctgttcggctacaaaaagcacctcactttcttccttgctcatatctgagcccaagatcctgatgctactcttcccagtgacaaagagaacctcggtctctgacgaatttttttcatttttaatttttttcttttaatatttacagaaataatccatcggcgcaaaaaattacaaaaatagacccctgccgccctccactagggcggcaagctgacgtggcaaacgggggagggacgggcggtgacggcagacgggagagggagggttttttttgcacgaaaacccttgccgccctctggcccccatgcaaaaaagacagcccgagcctagcactttttg

SEQ ID NO: 23690 - DNA, 4719 bp, Oryza sativa
atccacatgagcctcgttgaaagatggtatagtactaaagatattggtggactttggcacatgtatgatgagagcatttatggtttgattgatatatactagcttgtggcatgggtgtttatcatgggtaggctgcttgtctcattccatgattaatatcattgtagatgctaaatggaagatagtgacattgtcacttatacatctgtggttatgtttcatgtagagcgcttgaatttcacatggaacagttcaatgaaaggtgtggaactcttgcaaaatttatcctatactcactaataaatttcctgcaattaaaataagcccttaacatcactgtgttaataaactcttctaatttttttttaaaaaaacatatgcattatcagacttccttaataaaatggatgctaggtagcctcttgatgagatcttttaaaggcatgtcacatttgttttgatattcattctggcttttgttttgaaatatagttgaagaaatgacaatttatccagtttgtggcttaaaccaaggggaataatatctcagagactcaaatctgcattattttgttttaatttgaggcacacaaagtttttcctactccccaactgattggctggtttggagttggaagaaaaggggtggatagcatatttgacaagaaaatgcggctagttcatgcatgcaatcttcaggttacatccaaggctgacttgcaagatactaatgaagatagattaacagttggcaaacactacacaacgaagtgacccttgacttaacgctagcggcggatgcttccacgaagtttctgcataacagttcatgttttctcaggcccagactgactgatcactgatatatcctagtatatcatctcaatgttacaagtaacaaccacattttttttcaatcactttttttttttgcatccaacagaagagaccagagttgtgtatgactcatccaatgcaacggcaaaagaaagctgttaggcctaagatgttttaggtacacagatgctgcacaaaaaaacgtgctcatgaccgcacgttgcctgcacagccaagtgtccaacgtgcatgtgagcaaggcatcagctgctcactgtcacggtccagagcacgttacacaggctctgaaacctaacaaaacaatgcaatcaccaaacttccttcgtctcctaccttactactcttccccttctaaactatagcaatttcccttcttaactatagcaaccaaatactttatagaacatattataatatagatttgtagtagtaagatgtgtcagaactatcctataacaatctaatactggatagaatatattataattcagattcatagtactaatatgtatcaggactatttgaatatgtagtattactaagacgtgtcatatctaatattaggctgctatattttaagagagagataatactagcatcctaggttggcaggtaggcgcacaccgtttttttggcaaaacttcgtgacaagttcctaatcctacacaaaagaagtggttcctttggctgctcggtttgctgtacaatatacctctccccatgaaatcacaaacaaaaccagacaaatgcaatttaagagcttaaccttcccgacaacatcttaatggtagacactgggttacaccataaacaatggttagcgtcatactcccagaaaacactcaaagaaacctgagatctacaaagctctggatctactactacctcacaagaccatctctatcaagatgggccatcacatcaccccctgatgcagctcatgatgcagggagaaaggcggcttaaactcgagcctgaaaaaacaaatgcaagatgcactgaccctgggaagcaaatcacatggttgccagcctctcaagagatctaaagtgtaggtttaaatgaccatgataaaaaagacaccctgtttttttgttaattattggggacaacttagggttctgggacactacacaacagtagtggttagcacgcagatggaagatgatgcgcaacaggcggtacatgcgacaatgggattcctcacatgaggctggctggccatgagtaactgatagctttctcttcacttgcgagtagtagttgctagcttgctctcagtgtctcattgagctgggtgctttgaggcttcactccctccaggatcctgaaagatgcagaggaaaagggaaggataaaaagcaaataggaatcaggcagttgatgtcatgaaagatctaaatggaacaaggacgacttctgagatcaaatcattagtagggcctgtccttatgatgacaatgcacagcctagggcatttattattgtagtagcagcagcaattgagcagtcatggtcaaagtaacatgatcatggcaatggaacagtgataggctgaatggctgatagagacaggcaacaaattaatgcattaaatttcaattcctccaatagcttcttgattcataacagcgacgtgaccaagtaaaaggggggtaaaatggactacaaaaataactcaagagagaaccccaaaaaaatgaaaaaggaaacaattatcatagttgagttttgagatctaaaacataaggcaacggatgatggaatattggagcattgccattccttcgtctgagcagatcaaaagatggctaatctaaccctgctgattggaatcagttcctactcttcatctaacagtaaaatggtaggcatcagtcgagtcacagcaaggaaaagaaggatccccatcaggcatcaggtagctcactcgacgaacttctcctcagcaacaatacatacatcaagaagagcctcatatgcctcattgtcagcaaagaaaagaacaatttggagatccgcataatcgaagttccccacgacatttgaaaatcatctgcgggaagcttctgtgtctgattctgatagactgatcagggttcaggaatacaatagcaatgataaggtttaatagaacaaacttgttttgtgagtacaacaaacttcttcctgtagcagtactacaagatgttgacaaatgaaggtgcatcattccttgctcctgccagtgatcgatacaagtacagtttatcaacagtctccatctccccttcatcatcaagatgatccttcatcacttcaaccaccaagtcaggcatttgctgagctacatctctacaacccctcatggttagcctgcatgaattcatccataagaacctcatgttgtaaaaatagctcaggccagagagcaatcccttatcactaaaaggactatctctgacctcaagcttttgcaacctagtgcatccttcaaacacagattggagagacatgtcactatttccagcgaaggcaacagacagtgtctttattagtttcccatattttccaatgtatgcaaacgccttatcagtgagcagaccagagactgaaagtctagtgagcttcttgcagttcatcacaattgccccaaaaccatcatccatgggctccccagtgatccgatcagggcggtgtcgccccataatacaaagacggaatgttaccaggtcagaacagttcttggacatagcaattactgctgcatttgtcatgcgctggcaaaagtagagaattgattcaagcttccggcacccttccgagattgcctgaagaccaacatctgaaaccgatccctcagaatcctcagtggcatcgaaaggaaaaactcgcagctcacgaagatctgagcatgtctcagccacagcccgaaggccttcatcacccactgtatctagaacctagaataagaaattcgaacaaaaacatctaagttgacgtacatacatcaatatttattctcattcacaaaagataaatctatatttatgcattgggaatgagaaggctgacaagataattacccagaaagtgcgaagacggacgcagttgcgaataatcggtgtgagctcctcagcagttaggtttgcaaagctaaaattaagggaagtgagattagcgcagactgggtggattgctgggaggtattctggattgacatcccggaaacctgacaaacaaatcagagacctagatgccgcaaaagatgtagcaagctcagtaacagacagagcaccaccagggcctggctcagaacggaatgcaccagtaccaaggtgtgtgagctggggagcccttgccattagacggcgcaattgctctactgtcacatggtgattcattcgcaaccggcgcatagctggtgagcgtgcaacaagcgcctccagggcctcaaagttgaatgggacactaacacaatcaaacacaagtgactccagcgacgtgttggactccgggaacttggagatccaatccactagctcatcctcctcctcgtcaatatagtcttcaatcagatccagcacacggagatgcctaaaaatgaattgtgcaaaaccatgagataccgcatttcagtgacataaacctattttaattgaggaaaagcagaagagacaccaatttttaatgtgaaatgtctcactctatcccactttgggatggtcatgcttatttactagaactgctccacacccagaccaaacaagaaaaggaaaaactttgcagtagtaactcggagacttgccactccaagattcgattgtgacactaacaagtgtcggacacttagtgattagatcgtcaagaacaataaagatc

SEQ ID NO: 23691 - DNA, 17508 bp, Oryza sativa
accttctgacctcattattaaaactagttactgacttactgctttagaattctcctggtcaactttttacttatatcctggctcggattcaagttcccattacactcctgcttacagcctagatagggataacatacctgaattagttactcaaacccagtagaaactgtccatcctgatttttttttctaagaaagaaacttctcccatttcagtaatgaaatgatagtagttctacaagcattccaggttcctccatcctgatatttaataagcttatgtatatagacgttccaaacataatatggaaaacatacagcccttagcatatgatgtttattagtatcaccgctctggtattcttactttttcaggaatcaagatttattatgatcattcagtgagcttgtaataatattgctaatcaacactctttctgtgatatctataacaaataaatggcatcacatgtgttttatcagagaccaataatgagtgggaaacaaaaaggaaaatcactacattggatcagctgcatacttatcattaaacaggttaggtcataaatgaaatgtacattaagctgatggcatctctgacaggcagtgaactgatgtttggggtggttggatatcctttttgttacgaattcactttgaggttgcttcccataatgattgaaaagctatgtattagtttgatttccacggctatcagagacgatttttcatggtgaaactgggatcatatccttcctgcagaactaaggaaatcataaggtctacatgtgagggttgccacttgccaaacaaatgctaccaggaaatgcaggtaagataagaacaattgattgaaatatttttgtttgcttcgccaatttagccattattatgctgattgcacgaaacaaacacactgcaaagtgttggagctaccaaaaatgtaactaattgtgcttttctatgttgaaggtacataagagtgatgttgtgttgctattagctacatgcaagtttctattcaagtatgcaaccagcagtcaaagcatttcacagatgcaacttactcctagacaaattggtaaaataacactgaacctatataggacccaggaaatattttaatacatttgcaagtgacaaccaattgctgcaataataaaccaataattagctaacctcatataaactcctgatcatctgcactaacaagaaatctcgaaatattcatttccttctcagacctatgctcttcttcttctgtgtgattgcaaaacgcctagacattgcaacattgtaaaatctcctcatatgctctgacaaccgatgtatcgcgccaaggttgcctacagctgatagccgcaacatgatagcatcaaacttcttgtacgaaagtttcatgccacggtttattacctcatctagaagagcggtcgcatcttccgttcttccagaatcaaacagcccatcaatcattgtttcgtaggtatcaacagcgcgatggcatcctctcttgtccatctcgatccaaatattgattgccctatctggctctctcatctcaaagaacatcaccatcagcatattatatgtatgaacactaggctcacaatgcgcctctatcatcctttcacagagttcaagcgcgtcatcagccttttgaagaccacaaagcaccttcagaaagcaattgtaagtgacaatgtcagggggaaagccagcctttgccatctcatctaaaacacaataagcagcatccagtttatccaccaacaacatgccttcaatcaagtctttatatgtcgacacatcaggcatacagccgcactttctcatttctgaaatcagttcaaagcactcctccatctgaccagcctttgctagcgccgcaatcataatcgagtatgtcttagccgtgggcgatgaaattgtagacccctctgttctcatgaactcaaacaaatcccttgcctctgagaccaaaccagcactgcaaaatgagtcaatggcagcattgtaagtgaagttctcaggggtgtgcttcatctgaatcatttcctcgagcaccttcatggccctcttggggtcccttgcccggcaccacccgaagaacaggatactgtatgtctcggcattccccagcagcttcctcttcacgcggctgaacaccacctccgcctcccggaccatcccgcacttgcagaaggcgtccagcagcacgttcagagcgtcggtctccggcggcgtgcgcatccgcacccgccgcttcttagccagcttcctgagatgcgtgaggtgcttctccgtgtatgcgcgcaggatacccagcaagtcgtcgaccggcacggaccttgtgcggcggcgcttcatgtggtcgagcacgtcgcagaggacgccgaactggcgggccttgtaccgcgtgccggagaggatgtcgatgacgtcgttgtacgtcgcggcctcgtgctcgtagccgtcctggtgagacgcccagacgaagaaccggaaggccagcttctcgtcgtaacggaggcgatgcagcacgtcggcgacgagcggggtggtcagctcggcgcccagcgcgtcaagggccgcctccgtgccctcgctggaacccgccgcggtctcaatcacggcgtcgtagatcctatccgagagagccgcgaaccgctcgtcctggaggtttgtggggaggacgacgtgcgtggtggagcagagccgtcgagcctggagggtcgggagatgcagctgccgcggcggtggcggcaccgaagtggggtttagccgtggggaggagcggttagcggagtgcgcggccgcgagcgaggaaaggggtgcgaccgcgagaaggcggcggaggtggcggagccggagggcgaggtggcggcagttcatgtggccgtggagcgtcagaacggcggcgcgccgcggccggcggcggtggggggactcgcgttgcggcggaggtgcgcctgagaaatcgcgtggccaacggaccgatgactgggccgtccgaatggcccatcaaaattggatagctgatccaatcggaggtctggcctgttcagatcccgttcagttcagcacttcagctacttctataataacgttataacacactaactcctaaatcttaacatgcaaatatatcaaatcatcatctactaacaagctgacacattatcatccactgacaatcattatatttaaacattatacaaacatactatactatctataatttgaaatttataaaattttagagcttttaaaataaaagcacgttaaatcatcatctttcataattcacataatatttcaatatatgttttcattattttttataatatcctatgtatctaaatagatcatccttacttggttaatgttatttctctcttatcttattaagtcatattgcatcatttttttagtgcttaaacgattaatctactatccaaattatatctctaattttcttctctcattaagccatatcgtcacaattgtttttagcttttagatgattaatctacggttcaaaccatttcactacttttcttctctcataaaatcatatcaccttacttttacatttgaaccatctttctatataccatttacattaaaattatcataaatcatgttaacttacataatcttatattatctagctattttacatattatttttacttatctattatattattaaaggaatagaaaaaggagcctccacgttcgctctcatggcctagaaattctcacattaatcggagaaaaataaaaggcagagtccatatagaaatacaattaggaaatagttgaaattaggaattaaaaataaggaatattagaagaggagactagagtccatatataaatacaatcggagaaaaataaaaggcagagtccatatagaaatacaattaggaaatagttgaaattaggaattaaaaataaggaatattagaagaggagactagagtccatatataaatacaattaggaaataactgaaatttggaattaaaaataaagaatattagaagtagagtatagagtccatatagaaatacaattaggaaataactgaaattcggaattaaaaaaaagaatattagaagtagagtatagagtccatatagaaatacaattaggaaataatagaaattcagaattaaaaataaggaatatttgaagtagagtatagagtccatatagaaataaattaagaaaaaatagaaatacagaattaaaaaacaaggaatattagaagtagagtatagagtccacataggaatttaaaactaactaaaattcggaaaaaacataataaaattaaaaagtggagtttagagtccgtataaaaatacaatttacaaaaaactaaaattcgtgattaagaaaaacatgggaagaaaagcttaaagtcaatataggaatacaacttagaagtaaatgaaattcgaaattaaaaattaaagaatattgaaagatgagtttagagtccacatagaaatacaattagaaataacaaaaatttagaaataaaactaaatattattggaagaagagcctagagtctatatataaatacaatttacagataattcggaattaaaaaaagaaatattaaaagatgagtctagagtccatataggaatatatataattcacaaataactaaaattttatgttaaaaataattaataactaacacgttgtcacgcccagaaattcactagtaatttccgaactaatttgtgcatagaaccctcgtccaggaatcagctgaggtacacaaactgacaatttaatatacagaatcatcaataatagtgttacatacttacaaaagaaaagaaaactgcagcggaatataaaatctagcgaagctccggctccactcccacaggcagctcaactggggtataagccaaacgtcttctccttctggatcctttttcttcaactgaggttgattgattattgcaagaatgagcatatgacatactcaacaagccacacagcaaatatgcaagtgcacaaggataccaaaggatggcataatataggctcatttgcaaaagcagcatttagcaaaacatttaagagaagtaaaacagtggagtaattaatcagaaattttaatcaacactgaacagcacacccatgctgcacaggcccaaccatcctgaacaaccatacccggctgtacagatctaactccaaaccaggagctaagcaaattattaccaggtataacatccataattattgtgagaggtgtgagactaatcacgaaaaacattgctcaacccgcccatgaccgcgggcacggctattcgaatagttttactctggccagaggtgtaccactgtatccacaagacacagcctcatcaacatgtctaccatgcgtcgcgatactggaaagtacccgaatagaggctgtgacaataccctttgcacaacacaactcaccacagtgcaccattcctggatcataatcaccccctctataaatataaccagaggcatgaactccccagcgacccccacggacttctcgccgcttctcagtctggtgccccgcaatgaatcatgctatacagaaggtaaagccgttgcccatgctggcttgtggttggtacggttaatgtttcacaacagtagctcgtgaactggtccttaattgtcatgagcacgaccttcaaaaccatgtgctcacaacccaccattgtcaagttttagttatcaattaattatcataacacgattaaacatcgtgagctaccattaaatataatcataagtgatagtgtaacattagttatcctaattatgtgataatgtttctaagcatggctaagcaattatatatatatatatagcatttagctgaaccaaaccaatatataaggttcaagctaatcaatttgttacccaaggtatcaaggaataaagtaatcaatgcaaattggccataacaaaggaataggttcacaccacccggtgacattcgaaaataaatgcacagttgaaataaatagggaatttaaatatatgatcaacatgctcaaaggattgtgtttaggatctgtgtgacttgtcttgcaataatcggtcttcaattaatcttcttgaatacttccggcgcactcacgaaccttcgcaacgacggaaacgacaagctaacacgcaaaacgaagaaaaagactaataaaaaccaaataaacagtacatataaagtaaacaaacatgtagatcatgattttagatgaatttagcaacttgaaccactcaaaaccgagttacgatgatttagttatgaatttccgaagatttaatctattagaaaaacaggaaaaagaaaaaaaaacgatgatgacgtcatgatgatgacctcatcaatggccgaaccaagatggcgacctcgccggagattggatggtcggctgcgactttggaggacaagaacacgtagaggacgacgagacgaacccaacggtactcaccctcgaaccaaacgacgaacgacgacggccggcgacgacggcggggtggagcacgtggcggcggcgctacgaggcacgggagaccacgggagagggggcaaacgaaagaggaggactagggggtcctatttatagccttggattgaagagatcggactcctcccgcaagaaatcgatccgggaaatcaaaaactcggttttggagataaactcgaaaacgagttcgattcggataagatactcaacgattagctcctatttttgggggtaaagatagaggaggataagagaaatatttcccctcaactaattttagaaaaacacaaggggaaaggtcagatttggaggagaaaaaccgagccaaatcggtctcagttcggctgctagaggtagaagataaacagtgtcgagggaggcaaattagacttttcgtcttgggctggctgaaaacaaagcaaagaaagaaagagaagggggaagctcggctgggccgacttgggctgcacggccgtgcagacaaaagagggagatgggctggaaagggcccaagactaggaagaggattattattacttttccaattaaattaatcaatgaaatgatctttggattgttaaaaatacttcctatgctcaaataattccaagaaaaatcttgaacatacttggacacccaaagtatttaacaatattaaaaccagaccatttaatgattaatttaatatgtgggtaattactgaaatgctctttgtatgattaaaaaattaagaattgagctccgaaaaatctgagaaaatttcagagagtgtaattaatcatggagaatttaatcaaaattaaatccatccatgctttatatttagaaaattttatttcccacatttaacttcacttgtaaattaatgaacatttaatataaattctaataataatttattaaataatttataaatcctgaaacaaaaatcaggatgtgacacacgtatataaaatacaatatgaatattacacattagtagtttcgtaaagttattgaaaaatttaaaattatgttgttattttaatatatttgaataatatattgagaaaacatatatgctattatatgagagaaaatataatgatactagccgcgcagattgcgcgggccaccatactagttattattgtactacactcccacaacaacgcgtgggtttcacctagttaaatccacgcccatactcatcggacacggtgcccatgggccatgggtagcggacccagagcaggattgccattcctaatcggatcgttatagattattactatttgcttctcgcctctataaaagtatgttcccttaaaatacttatttaaaattatttgtttggtttgtttctttcaaatatttaatttatctcaattaagtagataatttttgacatatcataatctgatgaatagtttgtttcgaatgggctatgtaaattttgttaggagtatatgccactccaaatgttgtcacttgaagaataacatttataaacttgaaattgaaaaggcacatttctaaaatgtctcttctctggtgctgtttgccaccctgtgaccagattgccctgtagtctgttttgtccatcgtcgttgtatacctgacaggcgacagctatagtagttgacgttgtttccatgcattttggttgtcccattaaactcgttgtaacttttccccatttttcagcacggtttgcacgtacaaagtcaagaaaaaaaagttcatatcgttgtcatctacataaagcaatgattatccctgaaaaaaaaacatgtgaaagtatctgaatcgcttaccgtctagaagggaactaaaggtaaagtcgttcttaattgagccgactaggttgaatttgatcttgaaaattcttttctaagaattttgatgttaaccttgggcagacaaaacagtacatcaaaactattgcacatattatttgccaaaaaatagagagttattttccttttctttcagtccaggaagggataagatttcagttagttcagattgtacgaaaatactccattccaaggaggctgcattagtacttctgctatgtagtaataggcttcagtttattcagatgtattggcaaatcttacatattgatcgatcatcgatatgaattgtaaagttaaattcttaccctcggcgtccagtcgatggagatggtttaccagtcatattgacagagcctgcgcccggccgaaacggcgggtgttaatgcctaacatttcatttatgcattcgtctcctgcacaaaccacagtgtaagagctaggatgaatataattatctatccaattaaagacacaaaatgatactgcgtgcgattgttcaggcatcttttattctactgatttgctcatgtacaataatatacattcacatctaagggtgcgttctttcaaaggagattggggagagattggagatattgtcactcgttttccgcgcgcacgcttcccaaactactaaatggtgtattttttgcaaaaaatttctatatgaaagttgttttaaaaaatcatattagtccatttttgaaatttaaaatagttaatactcaattaatcatgcactaatgactcacctcgttttacgtatctttccaatcttctcaatcccctctccctcaaacacagcctaagtttctagttccaaaaaaaaaaaagcatctaagtttcttcaacctagtatgtatattatttcgcctttgctattctgcagtcacctgattgatcaataggtgctcccataatatttgggcatatcggcgttgataatatacctagtacagagtacagaatacagtcccaccgacaaaaaaagaccatttctttctttcatgtgggaaaatgcatgacgtcaagttcaactgttcaagtttctcactcaaaacttctgttcgttttctatgttcgaacttgcctggtagctgccttctccacgtccacagccgccgccgccgccgagctggccacagtgcaaccagggtactgtgcagtcccatgagcagaaccgtcgtcggcaacatcgacggcggccacgcgcttccctttcaccttcgtcaccgacgacgacgaggatgatgacacttccacctgggtgctatccggcgttctcctcgacgacggggagaggaaagacagctttcctgacaaagaatttgagagaaaagatgaccatctgcccgaccgcgaaaaccgggggctgcaccgagcgcccatgccgaccccttccccgagtctcctcccgcggcgcacgctctgctcccccgccgcgaccatctccctgtgtacgtgctccggcagccgcagcgtgtaccgctctaggtcgccgtcgagccggacggcgagggagtggccagtggagtgcgaccggggaagcttcgccgccgacgtctttggccgcagccccgaccgtgaccgcatcgcgcggagctgggtgcctatcgcctgaagctctagctcctccttcctccgctcctcgtcgtcctcctcggtgaccacgtcgatcaccacggctgctgggtgcgccccgtcttcttgccgtatcacaactatttcactggaggtgctgttcggatcggcggcggcggcggccgggatgatcacctcttcggtggtgtccttgttagggtcgagattgcggcggcagacggggcaggtcacgtggctggcgagccactggccgatgcagtccgggtggaaggcgtggctgcacttgggcaggaacctgagcatctcgtcgtcctcgaactcgctgaggcacaccgcgcactccagcgcggcgccggcgaccttccccacccgcagcgccttcgcctcggcgtacttcatggtggggaacatccggaccaccgacgagtcgagcccgcgcggccgccgctgccgcctcgagacgaagctgttggcagggaggatcatggaacggctcccgccgacgccgccgccctccgtcgcggggtcgtaaccggtgcagtggcggaggtagatggtggagatcgcgatgaacaggaaaaccccgacgacggcggccagcagcacgatcatcgtcgtgctgacgtgcacctgctgcccggacacgtcgccgtaggcatacccctgctgccccgccggctgcgctccggccgtcgacgacgacgccgcgagcgcgcacgcgaggagcgccgcgagcagcgcgtgctggtgctggtgcgcgtgcatcctagctcggcaacttggcatgcagatagcgcgcgtggtcggcggcgggaggcgagggcgccttggctagtcgtcttccctgcgcatgcagcgtgcggagtcgtactaaatagtaaagggccgtgtaggagtggtcaagtcgaggtgagctgtgacctgtgaggaggacgatcgacgagaacgtcgcgatagcgtggcgcgcgccgggtctcgcgggaggatgtggattccgctgtccggccaggtggatacgctgtttggcaggtttgactgtacgatcgaaccgtccaggtgttcagaagcagtgtggtgactgggcatgccagttggatttggaccttggactcctctgatttcagctacgtgtctacctgtcaggtctgtaacggacccagaaacggttaacagttaaaccactaaaaaaagcaagtccacatgtagcttgaatcaacggttacaggctcggaaacaaaggtgaatctagctcgtaattaattaggtattaattaatataagcttaaaaataaatttattttttatataaaacatactccgtttagccgtccagtaaacctattaacaaacaaaaaggagttgcccaaagcaatagccgctttgaaaggaacaggtactaagggcagtcccaacctatggtgtccataagtagtgtctatggtgccatgtcaataagacatcacaatagaaactatactctacaacccatactttcttaaattagaccattaataaatacatcatctttcttctctaccaatcatatttattctttatctattatgaagacaatattctctcccaatgcaaaacttgataattctctcccaatgcaaaacttgatagtgtctagtgcataggttctcgtgttgaagttgtgtcttgcatgagacccagtttcttcctctcttcactctctctcaattaatatagtgccacataaactaaaagtcctacatggcaatgtagttaatgccatagacaccatcctagatggagggctgggactgccctaagagatgttgcaaatgattcattctagtgtataacggaaggattaatcaatgcgtacaaatatatctatgaaaatgaaataaatagttgtgctaaataaaatccaatcttttatagatattaggataatcctaacctttcatttatttattaattaaaagctataaccaagctattaatattatacattccgcagcccatatgtctgcatcgcaaaagcattaacggttgctaacataactcgaatgataagacatttttagaagcaaattgtattgctaaatttccatccatgattagaagtatagccatcatctctaaataatggcatgttgcatcatttcttggtcctcctcacaccttcaaaatccaatcgcacttttaaatctaacctcgtgtaaaattgtgcaacaaacagcctcattggggcctttcaacttataggcagttgccaaattttaaattttaaaactcaacttttaagttgattttaaggttttttcaattgtaatttgtttctaacattggttttaaaatcattaatgacacgtatataaaattttatccatgaattcatttttatgttgctgataaaatattatgttttataatcaacataaattcgcgtgccagttgagtgacgcatttgtgggttccaccctcttattcattgatcaggtgtacggtatctttatatgtttttcatgcgttttgcaacttgataaccattgcccataacgtatatgcatgatatgcatcgattgtacagctatgaacatcaatgagacaatgaccgtacgtgcaagtacaagcagggagccagggatcagctccggcgatgcttttattactctccctatcccatattataaatgatttttaagggatatgacacatcgacagaacattgtaaagttctttgatatataagagaagaaatgagggaattatattttttcccgagccatgaaaacaaaagtgggttgctccaagcttatatggccttccagttgcagcaataaagctaaccttcgtttccgtaaaaccagtacagtataaagaccctatttagattctaacttttttttcaaacttttaactttttcgtcacatcgaacttttctacgcatacaaactttcaatttttccgtcacatcgtttcaatttttttaaacttttaattttagtgtggaagtaaacacagccaaaggcgagcgaaagaattccttgaaacggacttcaaaacaattgacttccttcgcttcgctcaccccaattcccacggagcaacgacgacgcctgtcacgtcacctgaggcgacaggccaaaccgacgatctcccaacgaacgactctgatcgagagctgacccgatcgtcgcgtggcacgtcggcgtgcgccacccccgggcaaagtggcggcccacgtacatacgtagtacagctctagcttggccgtgcgcggcgcggtccacgcgctatccagctgctctactcgtcagtgtggctggccaagtggccgcccgcatgccaagccgacacccgcaggagacggcacaggacaccacgccacaccacacttgcgcggccgcgagagcgacccgtaaggcatagataggctccgctcgccacgactacggcctgggccactgggcgagagggacgccggcgccacgggcgccaagctagtcggagtaggacgcgggaggctatcgcgcgcttggccgattccatcgtggggtccgggtgctcgtcgcgtcgcgtcgcgcgcgcggctcccgcggatgcgggggcagccactcgttcggcgtgcggtggcgcaacgcaacgtgcggtggatatggacgccaggtgcgctgtttgaggggtgcaaggcaccggagccggcgcggcgcgggcgtagatgccaaaaccggcaaactgttcgacccttgtgttatttacgtatgcgcgtcgatctggagagttctggaggattcacgccattcgcgagctgtgggtgatttttcttttagcaagcggcaaaatatggatcatcttccgttagcacgttttctaactaatacacacacaagtgttccctaaaataccatatcactttttaaattttttatagcaattaatatcgattaatcatacaccaattatttaactcgttttacgtgccgtcaatctatttaggcgaaatattaagtcggacgcaccggggtttcatgcatggggattgaatcggaggtttggtcctgcgcgtttggtgtggaaaaacaaatctgtcaggatcgatgtgcatgtcgtagaatttcgcaggttagcttattactaattgcgatgaagaattctacgtgctcgttgatcgtcttcggttgctaacccagatgcaacgtacggcactagctagctgctagttagagagtataataaacacgggtttaatttttgttacatgcatgacgaacgtaatgaggtttcaaacgaggaaactacacgccagggcacccacaaagacgtgatggcacgcttttgtggggcaccgtgtgcgaaagcatgaattctagaatcgtttggcatgtttgtttttttgctctcaaacgccaacgaaaatgaacgcagaatccaaggtcacaggaggacattcttcctagtctaccactccgatattatattgttcgtaagtgtagcttttagaattttgacagttaacttatgaaaatgttatatttgtttacaaattagaaaaaaagtacgaattaccccccccacacacaaaaacagacatattaaacctcaaactattaaaaccggacaaattaccctccaactcaatctggagcggttttaatcctacgtgacatacacgtgacaccgacgtggaaatccaatcagcaaaaaataaaataaagaaaatataggacccacaagtcattctattattgtgtgttgtggcgttggaacttaagacgcgagcagctacgcgcacagcgggcgcgactccgatcagcggcaattggcgacgggcgtggctgggcgagcggcagtgggagcggcagggaaggggaatcggtcggtggcgacaggagcggttgggcgagcagtggcaggagcaagcagggagaggaggaggaggagcccgtggtggcaacggtggcccaccgcgcgtccccgtgcgcccacgacaaggaggagcccgcggtggtggcggtggtccaccgcgcgcccacgacgaggaggaggagcccgccgcccaccgcgcatccccgcacgcccgatcgacctccgcctccatcgctggccaccaccgtcctcggcgctcctccgccacccctaactggctccgccccccgcgcgccgccatcctcagctcgccaccgccggtggggattgaggtgaggggagggcagagatagagaggaatgggaaagagagataaaaactgacatgtggggcccaccttttttttataaaagaaagctgactggactgccacgtaggataaaaaccaccgctgattgagtcaagggggttatttttttggtttgcatagttgggggtgaaaaatgtctggttttatggtttagaggtgtaattcgatcggccgttatagttccgggggcggggggatttgtactttttccttacaaatttctttcatatgtttcttgttttgctgtttctgctaatatcagtgaaaggtattgataccggattgtattggtcctattggagagatggagacagaactttgaacatttcgtttccgctccatttcagtgcatgtcactgccaccgcctcatacgttaggcttccatttccatccttgttcgccaatcgttcaggactttcaagtttctttcctcccttccgttcctgtatacggaagtccgaatggacaaaactcaaaagtctacccagctgtgggccgtgggtaagaggcttcctctgttctgcgccacagagcctcacgcatcggcccaaccagcttcgagctgtgggccgccattgcctcatacagtcatactccacgttgcttgtttcagccggagaaatgtctcgattgctaccgcgagtttgtacatgtgcatgccgtgaggaacctcatcggtgcacgtagaaacaaaaccaaaaggtatcaactttttatcgttccggccacactttacatctccgtacgatgctgccatctgacgctacccacgctacctttcaccagaatcaccagcggcatctcctctcaccaatcacttgcccaccctgcctacacattcccggatacccctctccccgcacggtgagctgcaagcttggaaccacaatgtctggcacggcacctgcatcactctgcaggtttctgaaagagctagcaccggcaccagcccaccagcggctaccaaccaacagtgccatccaacagcggcgagctcgatcggcagcatcagagattttccggatgccgccatggacgccggtgtccgcacgcggcctatatgctcgccgccaccaccgtgggtgccggactgaatgccaccagccgagcgatcgatcgatcgataaagcgcagctcgtgttgcgtccgggagagcagacaggtgcctgcaggtctctccaactctgctttgtacgaatcgagaagtagcaggaggagcagtacactagtacttgcatcgggagcgttttgtcctggttcgagcgttgataaagtgattgttcttttccgagtgaactgtttcaagcatgggctgggcacaccgtcgtgttcgtgtcaggtcggtcgtttgagacgagagaatcaggggatgggaacaagaggcggctaacggcgatcggttgatcttcttctctggtaggaggagcactgatgatggtggcacggcaccgtgcaattagtcaacaggatcattggcggctagcattcatggttgaacttgatgcgtcctttcacaagaagcacgacatatactgagcatctaatcggtctcctcatcttcttctgaacttcatatcaaaaagttcctaacctcacccggtatttagtgagaactgttgcttcttctttctgaatcatggaattcttgcatcggaaaatctatcgatctcgtggctcccccactgatgagacgctgcgtagatgaggcagcagctttcgaccgtggggcaccgagctagctggcgactcctatttaaacctctactataactggcggattgtacacctaattgtcatttcctgtggcgattacaacttgtttatttggactgactagtcattgtccattacgtgggggtacacccccaatcaattcgttaagcatttctttttctcgcaaaaaagggtgcaagactacagggaccctgatcaagagcacataactacatactacttccctgcactcccactctgactctcaaagtctattctactgtttgtatgcattacctttttcaacaaggacaaggaagatggaatcaaagaataaccaatgcgtactgcaccagataattagcccacaaaaggatgattagttgatccctaattaagctaaagctatgctaatccaagcaagctaccatacgcgaacgtggcatcgggcgacaggccggacacgaggatacgtgtggtttgcctcccctggactcgccatgtatataccccatattcccttcttcttccccgtgccgtggcaggttgggtcgttgtccccatagcacatccatgatattc

SEQ ID NO: 23692 - DNA, 1079 bp, Oryza sativa
attcctgcagccctgattgttcgtgacggcttgtatagtatagtaatggtggtcgagctagtgaaaggcaaagctacatgccactatgctagagattctggcgaagttcatggagtatgttttcgggctgattccaaaatgttttgataggtgctcagcgtcatatatttctcctgccttaatggttgagctaattattactctcttatattataagctttgattttattcctaaacaaatttaaaaagtttataaccaaaattatagaaaggcataattacattttcaacacaatgtactatcagaatatattcaatattacatttagtgaaactaatttggtttgattttattcctaaacaaatttaaaaagtttataaccaaaattatagaaaggcataattacattttcaacacaaaatgtactatcacaatatattcaacattacatttagtgaaactaatttggtgttatagatgtatatttttttttgtaaatttgatcaaatctaaaaaagttttgagtttggctaggaaacaaagtgagcacataccaagaaaaataaacagagcaactaaaaatattgatttctgtaacttttcgccgtttgaaagccaaggctttgatgcaaaaccacctagtttaatttaaagttagtttaaatattcaaaatttggctgcatcagtacgaaataaactattttggataagtttggaatgaactgccaattagaggcgtcaccggttgagcatcaccagttcaccaccacacggccttctgcttacctgaacatatcatgccagtatgccacattgccactgccgtctcagtcaaagtaatgcaacaaggtaacggcatgaaacttgttataacaaagagacgacgaattcagcaaaagtaatacgaaaatgtacggcccgaaacttattatcgtgtccatagacgatggtgtaacgttacttggtcaataacatagaacattccagcggtagcacgcagcagtgttgtgacgttacaattatttcagtactcatggaattttagatccatccggaattacatgatgcgtttactgg

SEQ ID NO: 23693 - DNA, 21061 bp, Oryza sativa
caagtttatacagcaacagaaatacagtattgcagttcgaatatgccttacaccagtttatatagcaaccagaataaatcaaggatacatgagagtgtgtcatcataacgagaagacacaactggcaagttatgatcaaactaaatgcaacataaacagtgaaggcaacagtgcacctttctagctatatcataaatctgattagataatctcaactgtacaattgaaaaaaaatcacaaacagcagtgatctcatgttcttattcatcattagtcaatgcgaggaactactttcgtgaaataaaatgaaattggcaatcgggataactagatgattaatcccttgatgagataacaactttttttttgtttccaccatgtaaccacagaatctaggaacatatgcaccgattaccaactggcagaatcattgtgtatgaattgaatagttatttgagatgagattacctttgatcaccgaccctggcctatattgaaactgaatggctcctggcctgcgtcctttgtgctgagagaaacaaaggacacaacatcagatgaaatttctatcttgtctgaatatttttgggggaaaataactttatccaaaattacctccaagaattttgatttgtgaggtctaacgataaattttctacccataaacaacaaatacacagcattggctgaaccaacgccacgcgacgcgccatccaagttacaacagaacaagaaaagaaaaaggatagtttttgtacctccaaaacttcttagcgagatcattatctttccctgcagaaaagaaagcagcatggcaaggaaaccaagttaggcttaactactccaaaacagaaactcagaaatctatccacaaaccggacagaggtaaactagcagctgcgatttgaatctaaaccatctatccaaaagacaatcctggcatcaaacatgagatccaacaagaaatggatctgggaacgaaccaccttgttcttaccgctcaggttgattcagctaagcacacgcacggatccaagaaaagaaaaagcatgaaaggaaatgttctgggggagatagggagggaggaaagcggcgaaccgaagccggtgcagtggacggtgaccttctggcccttgacgggcttgggaccggtgccggctttcaggatcgtcttctcgaagcccatcctctcttcttcttcttcttcctctccgcttgcctctcctcccttcttctcgattggactctcctcggcggcggcgctctgtgctagtatgatcagtggtggattggtggtgccgtgcggctcgcccttatagagcgctagtagattccttttttattacaccaccaatccactacttttttttattacacgactttctggtggtgtaattgttccggcgtctcctgggccgttggatggagagacgatcttttcagtcctacggtccagcttcaatggttttcttcttttttttcgcaataaaattgcatccgacctctacgtatataggttgcgcacaaccataaaaacatgggaaaccgctcaaaaaataaaaacatgggaaagaaactggaataacataaacataacggtaaacataacggaaaatactatgcgtacgatattttgttacattcctataacgatctcgaaaaatatattttgtgtcgtcctatgaaaaacctattaaaagaaccatacaatattagtcgtgaggctacaaatgccgtattaagctgctgaccggccattgactaagggggtgatgggttggttgtctcactttaccataccacactttagtcatatcacgattatttagtcatgtgattgtttcacttcacaattatgcacactttcttactcttaagacctacccgcactttcaaatttgtaactaaacatatcacacatgcgggcgagaaatttgtaatattgggactgcaaacacgagagcttcgctgttttgacactccgagtggatgacaaatgggtccatctgtgtctataaaatgtgagcctagtgttattatagcaaaggttaatgtttgcaatgtcataattgtaaatcccccctgcgggctataaccaactatttcttagacatattacttgtctaaccttagttatgtcaaagttaggtatcaaccaaacaacccataatcttcctaataacaacatatgatgcctctcatgtaatctctcttgcttgatcgtcataacaaaagaagaaatgataattgcttatgagaaaacaaaatgtgtgttatagaatactctctccatcccataatataacaatttagtactatataatatagtgatgtatccgattcgtagtactatgatgtatcctatccagtaatagatggcaatattaataaatgatgtgcttaacctaagaaagaagtaacaaggcttgaatatgggatttttaacctcgctaaaaaaatcttgttcaaaacacactagcacgtccaacaccaatatatcgttatggtggtagaacaagtatcaacaccaatatattggtttggatcgctagtttttctttgaattttttctctaaaattaactgcaccatggtacaatacaaatatacaatgatcaatgcatgattaataacttctattgtgtaaacgcagacgctcataatacaaacacattaaaaaaacttttattgtagatgtacgcttataatgcaaacacattaaaaacacttttattgtactcttttcatactatgaatctaaactaggatatatcttatacaatcaaaatttcttatattattagacgagggagtatatgctaatctaacgatttataatattgctgattttcccgagctgttacaactccaccagaccagatactgtcgcaaaccatccatccccagtcccccactgtgcccccgaccggaccgctcgcttcccaccggaccgttccgaagccacccaacctagcgcggtaccgcccccataaacacggggacacacccggcgcgccgccgctcatcgccatccacccgcaccctcccaattcttcccacgaaaacctcccaaattccgtagccgatctctcccccccaccggcggccgccgccgatggagacctaacgccggatcgatctctcccaccggcccgaggcgggtgaggcagggcgcgtcgcctccatggagaccgagcggatccgtcacctcctcctcctcacgctccgcgcgccgcacgcccgcctcgccctcgtgggtggcaaccacaccgccgcccgcttctgcacccgctaatccccccctccctcgccggaagactcatcatcctcttcgtcttcgccaccgtctctgtgcggtatagctctctctctcgctcgctcgctcagatgccggacggctgcgtggtgatccggctcccggacccgcgcgtcctccgcgtgatcgcgcgctcggtgctcctcgccgtcgcgctgctctccctggcctggctccgcgatgccgaggcccccgccggggacgcgctccaggtggggctcctgctccgcgacctccgccgcgagggcctgctcgcccccggcgcgcgcgccgtcttcctcggcgccgccgatggagactgccaccaccaccctcccgccctcgacggcgacgacatgcgacgcatcacgccgcgggagttgctgacgacgggggacctgtccgtcgacttcgtgctggatttcggctacttcgacaaggacggcgacagggttggcctcgtcgacagggtgctcaaggatggcggcatctttgccgccccaattggctcggcgagcgagttccgcttgccgccgaactaccgcgtggtttacatccgtcggttcaccgagactttcgtcgggatcaagaagattgcccgcgtcggcggcgacaatgggattgccggcgccagaacagggatggcagcgacgactcctgctctgaaggaaggagttcttgcgttttctgctcaaacagctgacactgccctcgctgaactcaagaacttcaggaggaagctcttactgcctcacatcactggagcatcagcggctcacgcgcatcaagcgtggctaaaattgcgtcatcgtccagtgattgcagttgatttcccagcaatgtggaatgtgaataagctgcagccagcacatcctctcgtccttcaggataaggctgttcatggagcgcaacagcagcagctcaacaggagcgtgagactgaacccatctacaggatattgaaacgaagcctgaattggaacagggaaaaagctcaactgaagaagagcattcttgtccattgcaaatccaggggggtgatgctctctgcctgccaaaagaaatggttggtttgcttttttctgaagttctttatttaagttgtctgtcgtgcgtgatgattgagtttgatggtgtgctactgcttaccagtatgtgtgtatgcttcgttcgatagtctccaatttgttgttttgtattcagtggtgactggtgatctactgatctccaattgcactactgtatggtatccgtttggaatgagcattgttcgtcttgatcacctatccttgttatcacgcttgtgcttcagcatgtgcatctctgaataatgcaatcgtagcagttcggcatctggttataagatgcagtactgactactgagaagtcagaactgctgttttttactcttgcatattcaattctttgcaaatttccacgcgtataagattatgatatgaaacaaggctggaaattggaatagtttactttggacatctcaaggaacataaaagtatgacaggattcatacaaaagggaactcacttctgccaagtttgtgatgtttagcacagaacaaatacaagaatatacaaaacaatgtgctacatggcacatttatttctacaattgaacaatcaatacatatttccttgctcaaatgcacgcgacaactatcatccgtaaataccaccatgtgacaaaaagatgcacaacaaactagtctccaaatgtgaaatatgcagtaccattacggatgatagcgcagtagcaacctcagaggcttgacttaaagtgcagcaaagaatactgatcgaagatggctcaagtgcctttgattacaacaactggacagaccacattgttgatgcagtagttgctcacacttcctaagaacattctgtagaacaaaaccaactcagaatttcaatcagaaaccaaaacaagacgattcatatttgatatagaaaaaaaaggggaataaataagctgacaatcaaacaaaatcaagcaagaagtacttaaaaatcttcatgacctagatacatgaacactagatcaactgcactccataaaataggagtcagttgcgccgagcatttgaagattgtatgggtataggtatggcgagcaggccagccccccttggattttaggttcttaactaccgaagtgaagaaaagctggatcaagaaaaggaggggcactactagccctctgccccatgcatctaaccaatgtctgccttagtgtactcttagagcatcgccaagagactagccagatggctctccaagttaaaatttggctaagttgggcaaaaaatctactccaacagactagtcaaatggctctccaagccatccggctggctaaattccccacctcactagccaaagttggcaagccatccggtgtgggttccacccgtctcctctctctccccctttccccatcccgtccgtccgccactccctccctacctgccgcgaaatctgcccagctactgtcgtccatggtcgccgccgccgaatttccgtcctacgtctccgtgccgccgtccgacctgcaccgccacctcggcaagctgctcaccagtggggacggcacggacgtcactctcgaggccggcggcgagacgtacaaggcgcacaggtccgtgctcgccgcccgctcgtccgtgctcaaggcggagctcctcggcccgatggcgcagccgcggagcaccgccgccgccacgccaacgcgcatcaacgacatcgaggcgccggtgttcagggcgatgctgcacttcatatacaccgaccacctgagctcgaccatggcgaccgacggcttcgagcatctcaccacaagctgccctgccattctcaaggagctcatgtccaagcttgttgttcactgaacactgaatattcagcagaagcatattaagtaggatggtgtcaattcagagctagtgtgtgattctactctggagtgtcaaatagctagacctatgtataattatcgtcatctggttcgatctggtgctaatcccgtgtataattattatctgtcatctaggctagtttagatggtgtgatgcatcatgctcctcctctctatgtttgttttggtttgtggttgtatccagcatggacagagcagtatcggtcaaatgtatggtgatagcctgcaactgtcctcggctccgcctcctcctcaaccgggcacccgtcgtcggcaccgctgcccgccatccaccgtgctgccgccacatggggggcttggcgccgtccggagcacgacgccgcttctgccagggccgccgacgctggggagacggctcccggtgtgcctccaccgctgacgacttcacggagcccggcgaccccgaggcacgccatggtcatcctcacagcgccaccgtcgtcgtcctcacagcgccgccgtcatcgtcctcctagtgtcgcccgtcctagcgccgccgtcatcgccttccctcgccgtcgccgtcgactcgcacgggagaaagaggaagaagggggagaggaggaagaagcagtgattgacatgtagggaccctgtgtcatagactgaaaatagaggggtagatggagaggccgttggagtaaataactagtttggctagccaaatcagatgaaaagttggctatatgggtgtttggagagttcgatttggagaggtcgttggagatgctcttatggccatcatctacttaggctgcagaagtagggttggctactgtgagaaacttccatgtcgaagcataaccaagtccaaactagtagcaaaattaaatgacccaatgcaagctaatggttccactccctgctcactgaatgcttcacttgtgttgtcagtattcacttttatgaaaaaaaatgctggtgccacttgacaaacaacgagattgcttagctgtcttacagggtttgtgtcaggttccagaaatcatctcttgattaggctaggaataagaataggagtatcaaataagcaagacacatagaacgattcgcaaatactacagaatgttttatttttccagtttcaaagctcagatttgcacataaatcttgcgttaaaagcttataaacaggtcaagaactgaacttggagttggagcaaaacaagtgaacagataactattataaaattactgttgcccaaaaaaccaactttcccaacaggcccctgcctgatgatggcaatatggtttcagtaactagaatttcccagatagcttatcccccccccccggcccccctaaccattgtgtcatgtgcatcttccaatggcctgaaaattccctgatgtgtagcctagccccaccagcagtactgaatactgattccccatatattgcagaatgtgatacaatttactatggaattgccctctcaaaaaaaaaaactacggaattgcaggtctgttccctattaagtggacagaatcaaaccacgccaagttagctaaccagtgcagagagagtgcttattatccattacctcttgagggggccaaaagcacggcaccccatgacgagcagatcggccttgagatttgccgtcacctcgcagatcttctccttaggatccccaacgaccacatccgtcttcacctccacctgcaagaagatcatcccaatcatcaaacgagaaggctagaaatcaaaatcgtcgagcaattgtcagcacaaatgtggttccccttacattcttctcggagcaaatcttgagcgcgtgatccaggatagcctgcgtgatccgccgctggtgcgcctcgatcgcctgcgtgaacgccggcacctccacctcgcctgatcagccgcgcgtcacattcaggaagccatcaaacccagctcgaccaaacaaatttcgcaagaaccacagctcacagccacaggaccaagtgtccgtcctgatttccgcgaagacgagtgcgagagattgcttactcgggccgccgaaggggatgggtccggggttgagcccggcggcgatgctcggcggcggctggacgtggagcacgacgagcgcgccgtcggggcggaggcggaggttgtcgagcgcccaccgcagcgcgttcatgctctcctcgctcccgtccaccgccaccaccacgctggccaggttgccggtcgccatggcgagctccctcagctccggcccgagctcgcctcctcgcgcagtcaggggtcgcggaggcgcggcgatggttgcgtcgcgtgcttgcttcttctcctctcgtgctcagctcgatcaaacgagatgactacgcagccttccgctgagctgtgcaagtgactccttgactctctctctcttgtcatgtcacatggccgtctgatgcgctttgggttgggaagcttggatccgtcggatcaacggatcgagagatcgcacggctcagatgacctgctccagtcgcttaccaccgggctgctttcttcaagcatgaaccgcgctgatcaactgactggttgtctattaaggtgtgttttagggataggagattgataaaattgggaagatacgtaaaacgaggtaagccattagcgaatgattaattgagtataaactaatataaatttcaaaaatggattaatatgattttttaaaacaactttcctatagaaaaattttgcaaaaaacgcatcgtttagtaatttgggaagcgtgtgctcagaaaacaatgtactttctaactcaatgtatctagaacgaatgcagcctaagtggagtactccctccgtcccaaaataagtgtagttttgcactattcacgttcgacgtttgaccgttcgtcttatttaaaatttttttatgattagtatttttattgctattagatgataaaatatgaatagtattttatgtgtgactaaatatttttcaaatttttcacaaattttttaaataagacggacggtcaaacgttgggcacggatatccacggctgcacttattttgggacggaggtagtagtaatttggttgggtggaagtagtattactgatatgacagcagcgctgagattactgcaaggtaggaagagcaagtttaatagcatagtcgactactaactccaaatcatctataaccaatgtaatagtaaactcatacaataattgcttactatactattaatatgtggttccacatgtcatacacacattacgtcttgaagtctgtgctgcaattggctatagatctatagcccgttgctcttctattccttcttctatcttcttaaaatatatttatagctgtcttatagcctactattgtacctgctctaagagcaagtataatagtagactgtaagtcggctaaatgctgaggtgaagaagagaagagaggagaagcgagctgtaaacttatagctggtttggacacaagaactaaaaaattaaaaaattatgtgagatagacaagtgggtcctgtattaattgtaaatagctaactattatatgtgtgggtaaaaaaaaagctataaactactttataattaataagttggctgtattattatccttgctgtaacagcgttgcacatgaagtgatggtgcagtgattcagtgcaggtggatgtggtttgacccgccattgatccatcggttattcggttgttcctcccggcacgacagggttcacagttgttaaaccccggaaaagtcttcgtcgcattacagcctgctctgaatctccatcttgtaaattacttccttcgtaaaaagaaaaaaaatatattcctagcatctcaaaataaaattagtggatatgtagaagaactaaaatatccttaatcatgaaaaaaattagtaagagtaatatgtataggtaaagaatattatagggataaaacttctcattttacgtgctgagggtaggggtggacaaaaagcttgggctcgtgagctcggctcaggcttggctcgggctcgcatagctcggctcggctcgaaagccaaacgagtcgagcctaagcctccttcctaactcgtttccgaaacgagccaagcccgagctggctcacgagccgctcgtgagctcgcttggctcactgcaatagggtcatatgcaaaaattttgcaccttttctaactatttatttgttaaaaatgataactttaattgtcatattatatatttatgtgttgtgatgacatattaaagaaaaattatcacattattacacattctatgtggtaaaatgttgttcgatttctcttagatttgcttgagatttactcgatgccaggctcgcgagccagctcagcccataaacgagccgagccgagcttcccttgcaccaagctttcacgagctaagccaggctcagctcggctcgtttccacccctagctgaggataggtaggatggtagaagttagtttttgtgggataaaatttaaactctagaaattgagtttttttacgatggagggattaaacgctgttttaaagcgttcgtttctcatgaaaagggtggatgaaattttggatactcgtggcacgcttttcaatatgctaaacggtgcgtttcgtgcgaaaactttttatataaaagttgttctaaaatatatgattaatccatttttcaagtttgtaataattaaaactcaattaattacacgttattaccacctggttttacgtgaaacacttaatttttatcttcatctccatcttcagaagattcaaataccaactgaatttcttgcaaggtcaataaccagacatgattctgacaaggaacggtgtttcggcaggctcgtagcctcctgccagcatgaacggatgaaccgaacttcttgacattggcaatggcaaagcgtgcttcgaggttagagcgtctctcatctggggacgagttttgccttcacacaggcatgcgagagcacagcgcactacagactacagtctgcatatctgcacaaggcttgtagcatctagcagttcatcctttttttttttacgtcttgcgaagttctagagcagaaaaaaattataatgttactaccctggaggatcgtaaccaagaaaaagaaaaaaatataccaccacccacacgacgacatcgccatcacacaaggccaggagaaggctaacaccggaccggctgccgctaagcgtgaccgaccgccactaggccaacaaagggacacagacgaggtcgccacctaggggatgccaaaacgacgtcttcaagaagagaagcgacagagaaaccgccgccgtcatccgtcaggactcaaaagagccaagacagggctttcgcccggcaatcaccctttaggggtgagacagcacgacaacgccctcaggaggggggataaccatcgttgtctgtccgaccaaggccggactgggttttcacccgtcgctcaccacttgcgaatccacgcgtgacgcaccgatgctccaccaccacacaagctttgtcgacatgtgggacccctgcaccggtgtcccccgccggccagtcttcattcgccaaagaccgcaccacacccaccggcagctcctcctcacacctaggtcgcctcctccaccgccggccgcgccactctgcgccaagccggcctcctccaccggacgcgcctcgcgctaatccggtctccctccatcggtcgcgcctcccgcgccaagccggcctctatctctgccgctcgcgcctctcgcgccgagccggcctccactgtcatcggctgcgcttctctgcgccaagccggtctccgacccctccaccaaacgatgccgcgccggccagatgtagtcgtctcccacgccctcagctagccgtttgaggtagccatgcctccagtgactgcagacacggtcgccaccaccgcagccgctgctgcctaacgcccagccacctcgccgtcgccatcctcgcctcgcagccgactccttccccgccgccgacgtcgccaccgcctccacaaacggccgccgtcgtcgctgccaccgacgccagcccccgcatccacaacctgccgctgtgtcgtcgcccttcaccaacatgcggctggccgccgcccgatgccatgtgcaccactgccgccatcaccagccgacaccgcagccgccaactgccgcaaccgccgccgtcatcgccaactgccaccactgccattgccacaccgccgccgtcgtcgccgcacagccgccgcctgtaggatcgagatgtcgactagagggggggtgaataggcgatttaaaactaaatgacacctaatcaaaactaacctaagttgctaggcttggtgagggtcaactctaactaagcaactaagttatgttttgcaaacctaaagtgatagtggctcaattatatctctaggaaaagtaaatcacactcctatgtcaatgtttagcaatcctagggtgatatgatttcaagtatgtctctagaaatgtaaattgcacaaatgtaaatgcgacaatcaaattagacaaggggacaagagatttttcaccgaggttcggaaactcgccggtttcctactccccgttgaggcgagcccaactcgaccactcaaccacgaagccaccgcacgcccccttcatcaaggggtgggcaaggcgggagccgacccacggagaggactacccaagcctcgatcactagggtagttcttcctttactccgaaggtggtgaacaccaaaccactcacaaaccggcgccgggcctcctccacaatcttctcggagaagtcaccgggcaacttctccacaagccgtctaggaggcggcaacctacaagagtaacaagcaatgacccagcgtggagatgatcaatcaagtgccacactagctctacaaatggaagcgatgcacttgactcttggctaatcaaccctctaacacactagatagatgaacacaaagctcaagtgggtgtgagagaggtgcaagggatgtatgcaattgaattgggtgccaagagagtccccttgttgctggtggggaagtatttatactcccacccaccaaaactagccgttgggggcgaaatcccccaactttgtgctctgccggtctgaccggaggtatgtagccggtcagatcgtgctactctgcaacggctagaaaactagccgttgaagtgctgtcagagggctccatcggcctggccggtcagaccagtgttgagtgggcggtcagaccggcctcggctcggtcagaccgccatcggctcggtctgaccgactacggctccgtcggctctgtatcggccaccccgagcagcaccatcccggcctccaggggccggtctgaccgcgcatgtaccgccggtcagaccggccttatgcgccggtcagaccgccttcttgcggccggtcagaccggccaaggcacgccggtcagaccgccattatgtggccggtctgaccgcccctggtcaggccgagcccagtgaaatcccaagtgattgtgtgtgtgtgatgaaaagcgagcacacgtctaaatgcataatgacctaatgtggcaatttaatcatctctttactaggtcattacccctcttaatagtacggcgaaactagaaaataaactagcaaatttgacgccctacacctcgatcaattctaaattaaagcactagttttaccgtcttgtttttctttgctttgcgtcgtcaattttaatccatcgatagtcatccacgcgcacacatgatgtggacctaacttaaaatattatctcaatagcaacggtttgtccacaattagcgcttgtcattaattaccaaaattaacaacgggggcctagatgcttcaccgccaactgccgccggccaccctccaaatccggccgagaggcgcggatctgggggacaccgcgccgccgccgccgggcaccgcgtcatcgccaccacaagcccacacgggaccaccaccaccaccttcgcgcccgctgccggttccgtccccgccaccatcgccatccctgccgccatcagccgccgccgcccggcgccgcacgcccctgccttcgacgtcgccatccccgccgccgtcctccccgccgccagtcgccgccccgccagatccggccagagcggcctggatctggcggtcaccgccatcccgcttggtggctcccctgcccgcccggtgagaggtcggcgaggggccctgccgccgccgtccttgcggccggccggcggccgctcgagcagcagcgaggcagaggggatggggggagggagaggagcggccgggtcgtcacctcctgtgccgcccaaggggaggacgacgcgaggtagtcttctcttctgacgtggaacatagttcatccaaatttgatcctccatatacctatatggatgattatccaaaagagattcctcctttatattcctcctcactccaacaaatcatctatattacatcctctatatcatatccccctatattttattagtatctttcaactaccatatatttatattatttttcttttttcacctttctttttcttctctcttctcccgtcctctcgagctctcttctctttctctcttctccagcgatagagcaacgcgagcggaggggcgaggggcgccacgagcgatcgggggcggagggcggcgcgggcgacggggcggagggcagagggcggcgcgggcggagggcggcaggggcggagggccgcgtggaggagcggcgagcggcgggagcggaggggcggcgtgagcagcagagcgacgggagcggctggatttggccagagataggggcggaacggagttcgccgatgacgacggcatggcgtgcagcggtgcgcatcctctctaacttcgctcctccatgccttgatccggattggggcgggagaaccagatgggtgcggcggttgcaggatggcgttaggagagagaaacttcaaatataccgattctttctccggaatagcgcatgcgccatctttggaggccctgatggcgcatctgatggagccggattttctcctcccatgagctatatttcggatggaagatgggatagaggatctactgggatgctctaaaggcgatagtgcctcatattatctggcttatcttcctcctgtctatttcagatcgagttctgagtccaacaacatctcggcttggttacttcctactacttaattaatcgtgctaatgatagttctcgttttctgcgtcattgaaaatctctgcttacatcatccgccttaaaatgaatttatttttgagaatgaatttaaagaaccgcgtttgtccagaacttttactataagttgttattttgaggaggaagtgcttacctctggtctaaaataaattaaatttttacacatctcatacatatcaataaatatttttactttatcaaatctcaatacaattatctctcactttttctatctgtaatgcatttgtctcttacttctacaaacaacatataaataagaaaataataaaaataatacgaaaggagtacctcacaaacgaacgaagaaccagcctgtctttgttttgcagcacgtacgcgagtacagtaccacgtagcacaccaaaacaagactgctcgtagtacctgtactgtactgtacaccaaaacaggccacgagcagcagcagtgcccccgtaccgctagctaagctgtgtcgccgagccttgagccgctaggcgctagctgcatctgcatccagggtacgagtacagtggacacagctccgctgcacctaggcgcctgcccgtggcacggggtacgtcgttgtactgcacggtgcacgctgctgttcgctcccgtgcggcgcgtttcgccgggacaaggacacagacggctgtcttccgcgcgcgagggcccgtacgtcccggcgcgttacgccgttaattacgctgttatacgacgcatcgatcaagcggcagcagttgcgtgcatccacgcagcatcggttggatccgtggatcgcggctggctcggcgtccgcgggcgagagatcgtgtttgccgccggtgggcgaaaatcttcgtagccttttggatgccgcgagggctgacgtttccgcttgcggatagcgtgcgggttgggggcctggggtctcagctgtcgacacgcctgtttcctgacaccgcgtgacctgtttatgcacagtgaacttttgcgcgtttttgggcatggatcttgatgggttcatggtcggagttcggctcatagtcatggcccccaataagggaagctatagcctagcggcagagctgggcttgagcaaaccgcaaaaaggcgcgtatggcatttcgtcgcgattcccctgcatgcagggcttcgccgtacggccgcaacatgtcgaaggcattccaatttttttctttaaaattttaatttttccgtcacatcgaatatttagacatacgtataaagcatcaaatataaatgaaaaaaaccaattgtataatccgactttaaattgcgagacgaatcttttgagcctaattacaccatgatttgataatgttatcctacagtaaacatttgctaataacggattaattaggcttaatagaatcgtctcgcagtttccagacggaatctataatgtattttattattagtctgtttaatactttaaatacgtgtccatatataaaaaaaattttagcacgtgaactaaacacaaccaaagcatgagaaagcctgcactggggcaggagtgggctgtcgtgccattgactgctggagactaataaattattgaatttgctaaataatctattttttataatagatttatttttcgtcgctcttattagtcacagagtaaatttatttttcatcaatcattacattggagaagtttatgaaaatgagaggtaaatacatttagagtagatagagtagaaaaataatcgtattgtaatttgataaagttgagagcattttaattttcttattgatatgcgttgatagatgagaaatgaaattattttagaaaggaggaaacaacacactagaaagtcagaggatattgttgacccgttgaattcaggttaagatttatatctaggcggtggacacatacagatggggtgatagcaaccgagccacggagtcaaccatgagcagtggatcagtgttgccaacaggagcagacgaagcgactattcgatggtagcttgtggtgtggagtcacacgagatggggaaaacggtaaggcaggtacacccagctaccatgggcgtggggaggatgaggggtgaggggaatgagtccaatttgacggagggggctatgcatgaatcttaaagaggatataccaaaagtcacacgatatggagttcgattggttgtctaggtactctgtaacttaatattgatcttaaatataatagttgacctagattggtagccaaaaatagctactccatccgctccaaaatataaacatttttacacggatatctacaccatttgaacatggtgttatggaccataacatatgattgctcattgtctctatatcttattgaatataaccgctattgctcgttccagcatttgtccataaagacatgtaacttacagtaaattcttttaagggtttatttaataggcgtcattataaatatgcatattcagataaatgtcaatataattcgtctattcgaagtcatgccatacaaattttacaaaattaaaaccatgccatcaccgtcatgtttttcatcttcttccccatctgtgtgtgggactcactcgtcagattcatctttttcctctatcctcctctcttctattttccccatctctatccacctcttatcagctttctccacacattgcatcgagagcaagagcaagggcaaggatgtatcgagatcgatttgacctccaccccttctcccccctctgctcctcctagatggcgacgtcttttccaaatccctcacctttatttcctccttgcctcctcctcattcgccctctctcccgagtctaaaccctaaccctagcgcagccacttcccatggccaccgagtaccgcacacccgaccgcctcctatccgccgttgcccagcgaggagcatgcgtaaaatccgcccaagctggtgcttgttgttgccgcgacccatgacggcatccgattctagtattacatgcttgccggcgttatcgagcacacaacgatgttccccgtcgacaccctcaagatgaacatgcaggtcggtgccccaccctgttactcggtcctgtcattggaggccgccttgtctggctaagtagtggacacatgttagccaacatgaacaatagatgacaatatggatgacgccgtgtgcattggtttgagtccaagcatggaaggtggtgtgatgtgaaagttaatttgtcatccctcggtgcaaagcgaaggtatatatgaaaccgggtgtaaagggaaaacaaaataaatctacccgatgttaagtgcaatttactctttatttatttttacttatttgattatgctgtaaccgagttggatggcaaaccacgtatggtgtgatagatttacttccaccattatcctcctttttatctcctacatatgtgtttacagttcgcttatagtatgctgttgtatatgctctcactgcaaactataattaattaacctgaaaaatataacaaaggtcctttcagattgctgccgagtctaagggctcattcggaatgtaggattgaaaaaaatataggaataggaaaaatataggaataggataggaatgcaagtgtaaaacagatgatttgaaaacataggaatttcatgtgaataggtgtggatggagtaaaggaaaaacataggaatctttagaagaaaataggtgcactattacaaaattatcacatactactagtgaattaaacaacattaatcaacctaataatgtgctttagttgcttgatggcatgatttgcctcgttcccacgcgaagggagagaaaaaagaggtcagcatggatgtttttcttcctatgatcttccagtgatatggctagcgtaggaaatttctctatgtatttcctacgaacattttcatgtgatccaaatgacgccacagtaaagcaatccataggaacccaaatccttcatttttcctgtgtttctcctctattctgaacaagccctaaagaaattcaaggaggcacctgaacgccggccaattagtgccagcgcaaacagccgatcgctgagaaaatgtgaataaggcaaagcgcgaactctggaaagcgctcgagagaggtcggccggcgacccaacaacacaccaccaccggcctcgcgcccgcggcgcacacaagatcgccacagcgccgtggtcggaacagcgaatccggccgcctgcaggcacaggcggcagtgccacctccccacccccccaatccgctgcgtttccctctggcctcgtcccttcccaacaaacaaacccgccaccacacggcgcccagcgcccgtgctctcctctcctctcctctacccgcccagcccagccgcccatcccccctcctttccgcggtccttttgctcggttcagcacgcacgcgggcacgcggcacgccatcaccgcgcggccggccgcctgctgctgctacagccagtggagtactgttctgggccgcccgcgccgcccgaagccaccaccctttccttttccggaagcctccccaatcctccgccattccccgcatagcgccccatgcccctaccgaccatagcctcccaatcccccatcgcctagctgcttccccgtttattttaagatttttctttgggttgtgagtaaggcttggtggggcccagctcacggttccttctggcataaacaatgacttgggcctgcccgccccgtggcctcgccatccgacactgtgcctctcatcccgcgattagtatatttttgctgtttttttatgggtgaaaaactgtgtgggctctctcgttgggttgctatccgtccacccgtccattcatcctcgcctttgccagttgcggtgttgcccccctcgctttatttatgtcgacctgccaataggagcaagtccccgtctcgagacaccagccgcgccgcgcctcgcctcgcctcgcctcacctcacctcacctcaccctccgcctcgtctccttcccccctttcctctacccacgcacgccctctctcccatcccagccgtagccgcgccgtgacttgtctcgatcggcggcgaggaggagggcttccgttccctggccggtgggggaggatcaggcgggggggcggcggggagggggaggagatcggtctcggtcgatccgcgcgcggcggcgatggcgcgggagaggcgggagataaagaggatagagagcgcggcggcgcggcaggtcaccttctccaagcgccggcgcggcctgttcaagaaggccgaggagctctccgtgctctgcgacgccgacgtcgcgctcatcgtcttctcctccacggggaagctatcccacttcgcaagctccaggtatgctgttctactcccacgcctggatatctctcgactccgcttcgtctcccgcgtttcgatagatctagctaggcgcgtttcctcccccggtctccctttgacttcgatgtctaagatccatccgcctgggctagggtttaacacgggatattttaactagtaacacggatctcaccatttccacccgttcagaaaaatcaatacagttttagaacgactcgtggttactttcgccccctttagatgtagggg

SEQ ID NO: 23694 - DNA, 10557 bp, Oryza sativa
tgttgttttcttttgcaatgtgttaaatcattgcagaactgttgtttgatgagaaatatcctgttgttgttttcttttgcaatgtgttaaatcattgcagagctgttgtttgatgagaaatatcctgttgttgttttcttttgcaatgtgttaaatcattgcagagctgttgtttgatgagaaatatggtagtctcctacacgtatcgttcgtcatatccatctcgccttatttgaggacaatgctttcctcattgcaatcccttttctgcgccttaattaggtattatactgttatgctgtatcgctatatgtatttacatcgtgctgttcagtcttgtttgcagctgtacaatatgagtttgtttatgatatactcgccctttaatttgttactcatgataacaaactgaaataatttactcatagatctttatcttgcatgtatccatttcgaaaagtttcctttgtcttaataaaagaaatgttgtactagtacatatctcattatatcttcatgtacctgtccatcacttcatcgtcactatatatatatatatatatatatatatatatatatatacaaacaaacaaaaatggtgttagctagaattctcttttgctgagaaagtatcttaattattatttcaggtttgttaatttgcatcaatttataataccttaacttcttttacttcaaacagggattttgttaaacaattgcaatttgttttatgtaaatttaagtacatcatttttcatttcttcgatgaatgtagattatctcagataagataacctgatacttcctttactcttctacatatgaatttgtttagttcatatcatatataaaagaatggacggagtatgttttttatggttttacatcagttgtcagtagcacaacttaagcaaggattcaacttctcttgatgtacttttttagaaatgtgcacatatacaacttaatttcatccatggtacaatttatttttagttcatttctacaaactagagttaagtgttggaagaagataaagaataaactgggatggctggtactgttatatgtggacaatcattcagccttggtagcatttaaatatgttcattttacctggtagtgagtactggtagaatccataaatcgtgcttctatcaataaaaaatcacactctataatattaattcaattttggagctgcaaggcttggtttatctaagaagttactatttataaactaacatttgtcttgattatttgttctacagctggacaatgtattgatcctttcttctacatttggatgccataatatctgattttcttactgttttctttttcagtgcttaattcctatatttctgtcaatatcaacttacccgtgttaatttgaccagggaaaaccactttcatttctcaagattactcctgcaatgttatagacttgtagtctacttggcccgtgcctttataattatgaacattcatgtataatttatgttctattttcgttttatctgatggtctgtggcctactgtggtattgatgatgccttctgttggacagtatgaatgaaatcatcgacaagtacaacacacattctaataatctggggaaagcagaacagccttcgctcgacttgaatgtatgtgaatcatcttatcatactgtgttaatagtaaatactgttcttcatatatattgcatcttaatgttgcctaactacatatagtagtattagataatggttcaaaatgggtcattttatgtccatggccttagggtggcacaatagcaaaatattcatatttaggttttcacatctggtagcattatgatcttatttctgtaccctaaaattttacaaattaaacttaaaaaaacaatcgcatatgtggatcctttcaaagttctcagtatgctctaatgatgtctgttttgttggttgtgtgttaaatatgtaaattatttgttttaattttttgttgctggattttttttaaaaaaattaatacttgcagaaacaatttacatctctcacttcctcatatttttggtgatacactataaattaacattattaaataatatagttctctatctttttctattgtatcttgagaaaaattccctggaatcggtacactatagcacaatactaattctgttttttcatggatcatgaactcaaatttagtactgttagtagtaattagtgctcaggcatgatgtaataggtgccttaaacttatgcagatatattttctaaatgctacttatgcagatagttaatactaacagttcaatcttttcttttcagttagaacatagcaagtatgcacatttgaatgagcaacttgcggaagctagtctccggcttaggtcagttcttttaaccttttttttttaaaaaaaatgttatacttgaggcatttgttctcagatcctttattcttgaggcatttattctcaaatgtatatcattggtacatgaacaaattgtagacaaatgagaggtgaggagcttgagggattgagcattgatgaactccagcagctagagaagaacctggaagctggtctgcacagggtgatgctgacaaaggtttggtgatcatcacccagactcatcacgtagctcgtactatgaacaacttattgattgctatatgattttgcaggatcaacaatttatggagcagatcagtgaactccagcggaaggtaccacctgttgctagattaaccctgaatcatcaatgtagcttggcaacatataatttgttttttcttgcaaaagtagaacctttaaagaagactgtgttgcatacaagtatccgttgctggcttatttgtagttcattctttccaatacatcactgtgtaaaaagttgatttatagttctctccaatacagagtgaaatcacttataattttactgttgcatcttgcatgactaatatatgctgccaccttctgccttttcttgcaagatggcacatgcatctgttcaagcaaatttactaaatcatcaccaccctggccttttccccatggatgagtcggaattttggactaaattccctgcccaacccttggaagtctgcgggttttgttcatgccggaaaagtccttagcgattaaaaacaatttcttctagtccttattgtttcaattttaccaaattatattggcgttttaagtcatgtcccttcttcccccaaattgaaacattgattttgactatcttgaagatcaaattagagggtacccattggataaaataactaatttaaatggaaattgtactttagtttttctgtcctgcatcatttaccatttgcccatttacatacatttaagtattgtagatgtttcttgctgtgttggaaactgatcaaacagtaccatttcttgggaaatgcaatcttatagttaaaaaaagaatctacaatagattctaccgcatccaaaatgttcttgtgcctgcttgtttttattcaaacccttaccaattgaaataagagaacattataattatgtgttgcatattctttgttgcattgcagagttcacagctggcagaggagaacatgcatctcagaaaccaggtataaatttactttctgtaagctcttggtttgttgaggacttaagaccagtccatctgaacacattcgttttcttggtactgaatacaggtatcccagatatcaccagctgagaagcaagttgttgatactgaaaattttgttaccgaaggacagtcctctgaatctgtgatgactgcattgcattctggaagttcacagtcgcaggataatgatgatggctcggatgtatccctgaaattagggtgagtttctgatcactttgtttatgtgctgaagttaaattccaattcaagtttcaggaatattggtcatatgattatttggtttaatggattttaaggatgtgattggtgactttaatccttagatgtattatcatattatcaacaggcaagataatccatttatattattattaaactttattttgtatacatggatacaaattgtgtgtcgtgtttttctgggtattgtttgagaccgagctatggccttttgctaattcttattttcttataaatccagatatgtgtacctttttttaaaaaagatacatgtatacttaatacacatttgataaatgctttttttttctcttccttaagctatactattttatttcattccgcatgtcctaatacttggcaaatgtagttaagccacatttggttctctaattgcttattttctttttcttaattaagctatactttgtttcatgtcctaatacttgtcaaatgtagttaagccacatttggttctctgattggtttgagaagaaggatggaatttgaattcttgcctgggggtgtactcaactacgtttgattacttgtatttgcccttcagtattttgttcatttcgatttttcttcaactctacaatttgcaggctgccttgtggtgcatggaagtaactgaaaggaaaaaaaaagcatccttgcagatctggttggagtcgttgcggcatccaggggagaaacgcttgtgttattcccaaacccagactgcaataatataatcttgcgttggaagcgagatcagttaacctgatttatcatccttgtggctgcatgatgcgatgttccgcttgtactgttcgctaggatcttgactaaactttgagatctatgtgccgtttaattatcccatcgctattggcactccttatgcgatacatcatatatgcactttgttgctatcttaattatgatgcgtcttttgcagcgttctaagtatgatcttgcgctatcttgcattcttgcgtaatatatatacattgtcgctgtcgttagatttcagttcttagctagcagccactagttggtgttaatagcttttccttttcctttcccttttcttttcatgatttacctgtcacgctatttcgcgggctgcaatttgttgcttgagatatgctctgcatggaagaacactatgcagatgcgctccagcattgattttcattatgggatactaacggggtatatgttgctgtgtgctacagatgtacagcgacgcagcagaaaaggtgacagctgcagtatatgtactgatctttccatttaatattaaaaaatctatatctttccgtttgctcgcatatccttctattttggattaagagcctcaccgtttgacttatctgcggaataagctaaataatatgtgttcttagcgatgtaaaagcaaaggctaaaaaaattaatgtcgatgaaaaaaccttaaaatcggcttcaaatttaaggttaaaaatttagattttggttaataagtataagcataagtgaaaagataagaccgtaaatggttggatttcagttgccagatttattcatcagctagagaattaatccatatttggttcactgtagcatcgcctttgttcatctcattggtataagaaaataagtttaatctgtatatataacaattgcatattaaaattgtctttagaaacgttttttccaatattgattttttttactatcatatcttgatctaataaaacagatcaaaatagcatctcaaatattgtaaaaataacatgcccaaaggaaagttactacctccatcctcgttctcaaaaggacgatgtaacatgtgcaatcaaaccatgatttaaaatgtgaaacttatattgctaacttcgtcctaaaatatagtaatttctaactatataatatttatatatggataagtgtttgttgggatacataaccagtaaatatatattttaggatggagggatttgttaaaaaaactttcatttagttttagttaaaaaaaactttttaatcaaagtttaggatgtacttgaaattttttatatagtttaggagtatatggaattttttatttaaaataattctatatagtttagaaaaatagtgataaaatttgtgcattagattgttgatatctcttgtgtttgatttgggggtgagataaggaccctatttttttagaatatgatggttacattatcggttagatatgagggatggaagagtctgtgacccatgtcaacgagttgagaggaattgggttggattggtccgggcccctcaatttttaatgtgtgaagccaatccggatcttagagaaatattctccttgttaaccatctcacgtaaccccaaaccaaacacctcgactcaatctgacgcatgcttaaaaactgaggtggtgtgatagtggatcttgaacagttcttcttcactctattctcaattctcataagctgacaaacatggcccacttcccagctctcccagaaagcagcaaacatctatccaaccaatgaaccaaccaacacaagtcaataacacgacatactactcctacattgctattcatcttatcatagcatctccaacaacttctccatttcactctccaagctaaattttagccattatagtaaaaaaaatgtcctccaacaacatttccaactggccaaaacccttcctccactagccaaatttggtcagccaaaagtcactaggcaaccgtgggccctacacacattcctcctcccatctcctctccggctcctctctcgcatcggctcgacaacacagttctccaagctctcggcgccgtcgcttgccgcgacctccaccgtcctccacaccgtagccagccacagccgccgctatccttcgcgccgtcgtccgccgccgtcctccgtgccgtagcctctgctaagtagctagccacccccaacgtctctctcacttctgctagtgctccgctctcctctgctgctcaactccacggcgtgcgcgtctctctcactgtcttgtcttcgcaccgatgccgccggagcgcgctgtcctctcaagccgcaccctccgttgcagatgagctccaagcaccgctccgctgccgctgctgctcccgcggctgttgaagacgttgtcggggtctggtggcggtggcaggcaaggtgccagtgtcgaggtacgtgctgaggttgtcgtcgtcgcccgctacgaccgccgccgcctccactccatctctaccccctccccattgctgaggtcgtcgtcgtcgccgcgagcctccgccgtcgttgtgagcctctgcgcagtcgccatcgccgcattcgaggtagagggcgtggggaggagacagtagtacatgaggaggaagaagagagatatagcgaaggatgacaaatgggtcccatttgtcaaatacttataatggggatgatatatggagaggctgttggagcgagtagctagtttgaatagccaaattagatggaaagttggttatataggtgtttatatagttcgatttggagaggctgttggagacagggtttcccaaatcgccggtaccggggttactgcgccccggcggtaagcacggttaccgcggtaaccgcaaaaaaccgtgaaaaaccgtgcaaaatttatcaaaaattcaaattattttttaaatttatttgaatttaaggaggttactgtaatatttatattaccgtaccctgcggtaagcccagtaaccacgcggttaccgccgtaagggaaatccttgttggagatgctctcacgcccacgcagaggtccccctccgccccctctgctgtccccctccctcatttgaatcgagtaatcatccgcaccgcccctcccccatcccacagtacacacaggcgccgtcccgcaacgacacacacagcccacgaggccacgactctctccctccccctccccctctccctcctctcgccgtgagcggaacacgaggcaacgccgccacctcgagaagcgcgtcgccctctagggttttagagcagcagcgatggagggcggtggggagggcaccaccaccgccgcggcggcggcggcggtggctgcggggaaggaggaggaggcggaggtggtggtggtgaggaacccgaggtgctacctcgacgtgagcatcggcggggatatggaggggcggatcgtggtggagctctacgcctccgtggcccctcgcacggcggagaacttccgcgcgctctgcaccggcgagaagggcgtcagcgccgccaccggcgtgccgcttcactacaaggtttgtcctggtttggcggtccgtgtgctacccgtagtttttcctggttgcagccttggagggtcgacgcgtgagaggatgccggctgcggtgcgattgatcgtagttggggggtgtttaagctatccgagttggggattgtgtggtttcgcagatgaatttgatgctgtttgcgtactagtgcgatttccacctgacgattatgatttggttgtgcgctcacagaggttcgcatgattcagtaactatcgcgttccatagatttttattcagtaccgctgccattttaactttgttacttagcgcaatttccgcacaaacctcgcggtgaacatttgcacacttgcagcacatttactgctgagcaagttgatccccaaatccaacacaaatccgtttgcatggtccatttggtcgatggaaatagtattttcaggtgtctgcacgttgcaattggttgtttcagctttagctttgatttgtccccttctgtaacaacgccattccaagtcctcgcaggccttttgttttgattcgacaactttgctttcgctgacattgttacggtgtgttcctattgttagttctcatgtttggcgctagtactttgtatcgttccagttagtgttaactgcttttaatccatatggcttatctttgctttagtactagtgatagtgatgtgcttcatgtgccactgcctacaactggtcccggtactcaaattatggtcctatggccctcctttagttttgacgtcatctcactactcacttgcatggtggcctacctactttcttgtctgatcttatgatgtacacgctgaaacataaagcaccttagttttttttttcttttcaaatttgcatgcctttactttctgtggctttattgttggcaatgttacaatgtactacatattcctgaaatgcttaagcagagcactgccatgtttagcctgaaatgcgcacgcacacgcacaagactctaactcttttgataatttcgaccatgtgccagggttcaaaaagttggacatgataagaatactttcttacagttatgtctgcactaggtggacatgatactattccgattgtagattagccttaaagcagcatctgtctgcactaggtggaccaaggtttgtgtagtatctattatttgggaagtaatccaaggacaaactatatggctgtaagagaatcatatgcggatctggttcaatatggtcaacatttttaagtgaggcttggtatttaaaagctaagcttaggttctttagtcgtcagttggaatgatgatggcaaggaaacactaagtgcagtaatagtgacaagtcctacttgactgttgggggggcgacagggatccaactgcgtaatctgtggttctctactttattttgtagtggtggggactctagatgttggctatccttccacttaactgttgtggctatgatgctaattggacagagttagcatcattcttaaccttgaaaggttacaatggccatccattctttgctgaaagaaagaccatgattagcctttgttacattatttcttaatgttcacaatagttttcctttcttttttaccattgtgaatcatcggatctttaacttccaaaaaggttttactgactgcgtcaaccaatctttttttttttcttttggtgtttttactcctccagggttcatgtattcaccggattgtcaaaggttttatggtgcaaggtggggatattaccgctggtgatggaactgggggagagtcaatatatggattgaattttgaggatgaaaattttgtcctgaagcatgagagaaaagggatgttatcaatggctaatgctggtcccgatacaaatggatctcagtttttcatcactacaacccgaacaccacaccttgatgggaaacatgttgtttttggaagggttataaaaggaatgggggtggttcgctcaatggaacatgtttctgttggagaatctgaccgtccaattactgatattgttattgttgattgcggagaactaccagaaggtgccagtgatggagttgtgaactttttcagtgatggtgacatgtatcctgattggccaaatgatctcgaagaaaaacctgcagaaatttcttggtggatgactgctgttgactctgcaaaatcttttggaaatgaatatttcaaggtatgcacttcctttagcatcctttggaaattttctttaggtcatatgaggaaattctcactgcagcattatgtcttgcattgttagaatgttagttgcatcatcgtatgttatatagtaccggatgatgctcatgtccggagcttgtagggctgcaggaat

SEQ ID NO: 23695 - DNA, 6636 bp, Oryza sativa
agatagatgaaggtaggtatttttttttcttttcctatcagtcttcaattttgttaattttatcatttgatacttatagaccgaggcatatcgtactagctgattctaacagcttattgatgtgcagagaagagctcagcactacggaagacaaagtcaattatactcacaaatagttctgtaagtcccacaactaaccacttgttgcatgacaaatcataattcacaagtttcttccctttcgtaataaatatgagaaattatactgatgagacattattcattagtgctttctgaattgcatctaatgttattacatttcctgtaaattttagcctctgctataaatattgaatccacttatgacttgttcaggcttgcaagctgaagttgggagatttgaaaggtgctttactagatgcagactttgcattgcgtgaaggggagggaaacccaaaagcttttttccgtcaaggacaggttagtgttacactgttactgttgggtgtcatattacctgagatagcaaaatcttaatttgtggagttgtgcatgaggctgtgcttaaaaagccacatttgcatacttttgtatgcattagcaatgcagcactacaatctacatataatcctgttttacttgataaaatattatctgcaattcttgtttttgttgttgctgggaggatttgttcttagtgccttcatagtgagttcaaatttccagatttaacgcagtttaacatgatactgggatttgcaggcacgcatcgcactcaatgatattgatgctgcagttgagagcttcaagcatgctctgcagttggagccaaacgatggtttgtcccttgcccactcaattggctattaagtttcttcattggaagtttatatattttgtgttcataaatctaggaggaattaagcgggagctggctgctgcaaaaaagaaggttagtccattgagttcatgaatctttggactaatggatgttccttcattgaagatgttattgatctgtcaccgacattatcgcagattgctgacagacgggatcaggagcggaaagcattttctaggatgttccaaccatcaggaggttcagagaagatcgatgaagtactcttctgataccacattcaccatttggaatcttttgtttggatctttggcataacatcggtagaggatgtgtcatttggatgatagtttgttttgtttttctgcaggagaataactgatcggcttaagttcaacgttttgtagttctcttcatgacacatactggtgctgcctggtgaaaaaatagagttcaggttgctcttacagcccacagccactattccttcgaagtttgtgttgtttcaatatactgactccatttttatgctttcaggtgatggatgagagagtttttgcataacagaaggtgatggatgagagagttatgcagtttttgcataacagaaggtgatggatgagagagtttttgcataacagaaacaactcccatggttgaaaatagttttggtcttttggacaccaagccttatgttttgcagtatagagtttgccacaatgctatcgtaggaaatgtctggcggattgaattgtcaaactcttggaaaggccttttgaatgaccaatcctgttaacgaaacattgttggcaagtgttctcgcgtgtggttagcttaactttgccttttgctgtgtggtgtgtgctcttgttatggatagcctttttagttttgttcgcgttacaactcattacctccggagtttcatcaatcacaataatcatagctaaatagctttggtctagcaaacagccaatgagccaagcatgcgaggcgggtcatctcgcggtagaacctgaaatttgatctggacatgcttgtaggctcgtatcagttgaagaactcagagcctcagatacgtgcaattcttttcaacgcctcgtgttactgaactattgttccacaaattcatagctgaagcagtttgcaggggcagcaacccaacacaccactaattccacaaaattgagaccacgcacaagcatagccaaaatcctatcaacccaaacacaccattaattcccccaaaacatcctcagattgccaaaatttacgcacagtaaattcatttccctgtctatgcattgtagttgtccacgcccagatccctcaaggcagatgtggcagcatctttgcagctcccgtgcatcatcttggttttcctaataagcttctccacaccatcattaagcaagatcgtcctacaatggcagcacataagtcaacattctgatactagaagcatgttactatcgaactgtaaatgccttaattctgaataggtcatgccagcagacagtagtgcttgtgaattgtacagcataccggttttcagggtttctgacgacaagattacggatcataaggcaggcttgcttctgagtttgagcagaagaagggaacttttgcattgcctgtatagccaaagtgccataccctgctcccattgcacgagctgcattttctggtgaccgcagtgtaaggatagtcaccatagacattacctacacattcatttagcttgtaaaagttagcgcacatagatgcttcagtatttctcatttatatgcaatgtggcagtacctcttgtattattggtgggtcttcagaaaatctcgatgtcaacttcaagaacttatcaaaaccacctcgttcaatgatagtagtcttgtttgcatcacttccagccagcttcaagcagaaagaatggtctgtaagtatgattcatcaatgtaggatttcctctgttacaggattgatgcatttgtgtaccatactacagaccttggacagcagagagcagcaagattttgctataactttgttcttttgttcactagcctcatcaatacagcgaagaagcacatcaatcccaccattttcagatatggatctgcatatttcatcctgaggtaacacaagaatttagtaaagttatcctgaggcagctcataagtcataagagtatagcttgcagcttgtttttggttaaggacattgacaacagttccaccaggtaaagacatcttgttacaagtacaacagggatcaaaagcatgagaaaaaatagcaagagcaagatggtggtgggaagttgattataaagggcaccgtacttttcaaagtgttgcttaccataaatgttaaccatatgcaattgcagcagcagcaattcatattctttttgccagatgacattgaattaatggcataagaaatatctatagtagttcaaaataaacttttgaattccagtataaccatagttttctcttacattgacagcaattgccttcagagccgcacaagctgatggtaagctggaaggggcaactttctcacgtagtgcattgacaagaactgctgcaatcccagtttctgcgaacctccgagaatatccatatacctgcatcacaaatgttggtcaatgtcatctcctatgtccaaattccattcacttaaaaagtttcaaatggctagattgtcaattattacaataaaggttctctggatatttccactacatgtgctgtgcatattataactcaatttaattccatatctacatcttccctcatgtatgtaaactaacttgcatgcacaatcacaaatatgactctttttctataaacataactctagcacatcataatgtttaatactttaatactaccaaaaaccatagattacggagagttgacaactaaagtttcataataaagtgcaaataggtccacttgctaatgcaaaactggaccaaatattcacacaattacacaagcatataggacatacttgagaagccaccacacgattgtcatcaggtgtcaatagaacacgtatggcatcatacaagctttgcacattgctatttgatttctcccccataacttgaaaaatgagttcatcaaccttcaggaccataaagcactctttaacaacttcattgcctgcagatgctgaagccacaaccctaaagccaccttccagtatatctgaactttctgaacctcctttcaaaatacccatgacaacttggggcccttcgctttgcctgaacttttcagtgcttccaacatctacagattgaattgttacctcaaatgtcagggagagagcagagattgcttcttcttatcgataatattatgaaaatgaatgcaagacactgcaacggacatggaagtacagtactcttgacaagtttatgttgcatgtgcgctgacagatcaaggaatgggaccagtccattattttgacttaatgccatttgaacctagcaattggatggtgagtctaccttcacaattgtatgaattttgaatgaaccagtctgtacctgatttcttactacaacacaccattccaacacattctcacacttgcatgttataagaaatttatgaccagcagaaacaagtctgaatttctactgcctctatgctaatagtattagttcaacagaatttctaatcacaacaaaaaacttaagcttacaacagtaagaagtaagaaactaataatagcataaccaaaacagaacacatcctcatatctcagaggtaataacatcaacttaccgcggagcaaggagcttagcgccttcaagcccgaggcaagtagtctctcctgcttaaccccagccgacgcgcacagggcgacgagcgcctccacgccgccattccgagcagcgaccgccgcattctccaacccatcgccggagcacagctcgcgcaactcgtcgagcaaagaggccaacctctcagcatcctcctcggacctgccgccactgtcactgtcactggcagaagaggccttcacctcgtccagcacccgcatcaccgggctcacctccgccgcggcggcctctccaggcacgcgcttgatgatccctggttaggaggcaacgggaggagagagactcgatcaggcgagggtatgcgaagatcggggagatgcggatctggaaggggatggagaggtggaggagttggtgggtgattaccggagaggtcggcaccttggagggtgagggcgtcgacggcgtcggcgagggcctcgtcggcgtccatgccgaggtcctccatgttctcccgcaccatggcgtcgaacgcctcctgagagatcgcgatcgccatttttgctccgcctgttggcttcggtgccggctgccgagtgaacaagtttcagtagtagtacgtgcctttcttggtttttcctattctgagggggcggtttcagttttgaatttggatttctttaccgctacgctgaagacgaaaattaattagcactgatgttagattaattttcaactagtttttggaataacaaattttgcctctagatcattatgaactgatcaaatctaaatcttcgccgggcaaaaaaaaaaatcgggctattttttttcgttgggctatcctctgcccgtattattccaagatttatgtttcgcaataatagaataatcaaataaaacaatcgaacacttgtttattatagaatttataagtgtacaaagtttaaatatttatatgtttattagtagaaactcttgtgtaaccagatggctactactagatggtatgattatgcgcctaactcactactcctccgtcccacagaaaaccaacctactattggatgtgatgttttttttagtataggctgtgttctttgctgggagttcccaactccccaatttcgttttccgcgctcacgctttttaaactacctgtgcgttttttgcaaaaaaaaaagtttctatatgaaagttgcttaaaaaatcatattgatctactttttaaaaaaatagctaatacttaattaatcacacgttaatacgaacatcgttttgcatgccggggcccaacccctcctcccgaacacagccttactcttgtctagattcattgtcctataaaacatcccatccaatactagattggctttttttgggacggagggagtacagtttaaatcttggatttggcactaggtcgttggctcatatagacgcgttatgtgttgtgcccttactacaaggtatttgatccttcaaacatagttctaagcatttataaaagatacatgtgtgggtgggtgtgatctgtgatgtggataaatactacttgctctgtttcatatcataaatcacgttgattttttttctaagttaattttttgtgagtttaactaagtttattgagaaatataacaacttttataataccaaattagttcattaaacataacattaaatatattttagttagtttgtttggtattgaaaatattgttactttttttataaacttgatcaaacgtaaaagaatttaactttaaaaaaaatttaaacatcttataacacgaaacgaagggactactgagtatatatggtttaccatttgctacagtgaatattgtctaatacagtatatttatgtacaacggttttatgcgaaaaaatacaataaatattgtcattttaccgttactgtgttaaactcaaatactcaataaaccaactcatacatacatgtagcgacagaatc

SEQ ID NO: 23696 - DNA, 602 bp, Oryza sativa
cgtgcacattaaataaaaagcagaattgcacgatgcagctaagcattgatcaaatgcaccaatgatagtatgatatccttggctagctgcggcacttagattcagccgggatgcatcatccaaaacagacgagagctttatacagaagcgtaccggcaccgctcggcgatggcggcgaggcctagcgtgctgaacccatcgcagcacaccagcgacagctccttgaacagcgggaatgacttggcgatgagcgcgaggtcgtcgttggagacggtcatgcgcttgaggcagatgcgctcgaggtgcgggtaggcggggccgagcgcggcgacccagggggagacgtaggcgccccagccgtagggcacgaggctgaagtccgcgaaccgcggcttccccttgagcaccacggcgcgcacccctccgaaccgctccacggcgcggcgcggcgacaccgcgtagcagttgccgatgaacagctcccgccgcgtctgcgcctcggcgcggtaccacgaccggcacaccagcgacgccgcgttccggtcccgcgccgccgtcaggaactccagcacgctctccagcacgttctccagcacctggtc

SEQ ID NO: 23697 - DNA, 661 bp, Oryza sativa
taatgttgcatggctccagcccgtgatgacatcaaacaactatgattcctttgtgcacttaatcatcgacttcattgtcaagaggcttgaagtgataatgatgcagaagaggttcagccagcttggtgggctccagctcgacaaggaggtacgctccctgatcaaccatttctcggaaatgtcacagagaccagtccgagacaagttctcaagactttcccagatgtcaacaattctgaattttgagcgggtatcggagatactggatttctggggtgacaatgccgggcatctgacatggcttttgacaccagcagaggttaggagggtgttagggcttcggattgacttcaggcctgaagcaattgctgccttgagactttaaattgttggttcatatgcgcttctttaattacttatacagtttttgtatgttatataacaagttatatttactcgttctcccgagcttgcgctactggagcagtttttgttgtagcaccaaactaattgtcctagcaaagaatttggaaatccatattttgctgctgtaatattgtggtgtttactgtaaagaaaatctctgctacggtacttgactgcaattcatataagcaaagaaggatattggtccttttaacttatattttggtttgaacca

SEQ ID NO: 23698 - DNA, 587 bp, Oryza sativa
ccggactttgttggaatcgtaaaccctggccacaatacgagcagtattgctttgcttctgcataataggtacgatctaccatgcccacactaataataaaggcaaattttgtctacaggacactgtaatttcgtggttttagccgtaggacactgcccgaactcacttttggaggaaaacactctataaacatggtaatttggcaatagacatcgtgctgattaaaataataatttttggttgaagaggagagagaaatggcatgaaagttctaaaatacccttgggcccatatgtcatatcttccatctcttatctctatccccgctgcgccgccgcctcgatcgaggacctcagcgctgacgtcttccaggaacagcttgggcatcaccgcgctgcccaccctgaacgacgacgacccatcctccttcctgacgtcggcaaagctcaccatgaccatgagcttggtcgcccggccatggccgagcaggagcagcacggggtagaggctgtacagcagcagcagcagaagtccgcggaagagtcccccgacctccagcgcgacgagtatgaagtacgggaaggtcg

SEQ ID NO: 23699 - DNA, 19470 bp, Oryza sativa
tgtaagatgatattcttgaagtaaatctggctttgaatttatcatgtggatttggtttgttattcatttgatacctccaccattctcaaatagatgacattttggaacttgtgcagtcaaaccttgaaattttagctcactaatatatgtaaaaatatcaggatttgatatgtgaaaataacactaacaggtctgccatgaaaaataatttcatgtagttatattttttattaatatacaattagtgtaatggtcaaacatgtacattggagactgtgttattgtcttaaactacaaataaaaaagaagggaggagtaattttgtagccctatacccctatattatgtataatgtctcgcaatctgattgcacctaactattttattatgataatgtgctaggccaatgttttagcttcttcactgaatgacttgcacaatttttctgaaaacttggctaactatcctataccctgttgacttatatgacgttttgatacttaccttcccatttcttctcatcattcaggtattgcgaatgccagccacagcacttcttgttgatgaggtacatcaatttaatctccatacctgatgtattcgtgccactatttgtgtctgacctagtcaattgtaccacagatccattctgatatcttgcttctcttatgtatctttatcattgttagtttttgcttctatgttcaaatgtgttgggcttttcgcaaacgtgttagactttcagctgctcaatcaattatcattcactaattcaccaacctcacaaatcactgatgattttccttgcccactttacccatgggcatgctgcatgcttcacttgtacaattgcactacagatcatacaattagttcttcatgaatatcatccataaccatcactttcttgaccaggaaaaaaagcgttatgtaggtatcagattggcatctggtcaggatattttgtgccaacagttgatactcgatccatcatatgaaattccttccttggatatgccaagtgatgcaccagtatcaaatttgccaagaaaagttgctaggggaatatgcataatcagcagctctgtgagacaagatacatcaaatgttctggttgttttccccccaaagtgtaagtacagccatttctccctgtgtctctgattagatcttggtgcacctgaaggtgatattttgcttctcttctttgacatcatctgtttccttcattttagcactagaagaggagcaaattactgctgttcgggtgcttcagttgagcagcaatttagcagtatgccctcctggaatgtaagttttttttcaaggatgtaagttatttgtcctattattaacattgcaatgttagggtatttttactacgatcaccaaggaaccactcatttaaaactaatactgtataatgttggtgagcacttcgcttggacccttacaagctaatctcacttgcaggttcatggcatatctctctactccctgtactgatgccttcactggaaagaaatgcatcagcaaagcaatagatgctcttttctcaactaaggtttctaatgatttggaagatcatttggagaaaaacagtgaagaaaataaggagagtgtgaagccaaccctactctggagctgtgtgtatgtacaagagattatacaggtgcgtatatttcattcatggtagtttcaacattgttaaaaacatttgctgttcagatgtgcatatttatagttttataccttatataacttattttttattttgtcagggaacatctggtactgcattgtcatgccccatacctgatgaaaatatggactacaggagtatacttgaatcaacaaaaatggtacgctttcttctcaattttgtactaagtactaaccacatcagaaactaagccagagagtttggttaatcgtggatgttatgaaactgttcctggcttcctgccaaaatgggaagatttatttctaggttacattaaaaaaaaaaaacttagatggagtaacatatgcatctgtgcagccctggtgcagaatcattaatctttcgtaagctaaactgtgtttgagataactttagaggttgactgttcatttcaattattaccctaaaccatatgaaaaacaacatgcacctgtgttctttactatggacaacaacatgcatctgttcgtacctgatgttgcattgttctttttgcagctgttcactgatatttgtcctaatgaagagttcctgcctagaaattcagctcccaaatatgcttctgataatgactctgattctgcagagtaaatccaaacttgcaaaggtaaatattttcatgtggagcttacactgtttacacatgtttaattcattagtattggaattgaaaataaaacattctttgcacatgagttgcagtactcatagtaccttattgcatatgaaagtacgaaacatatcaaaacctttgcaagtgaaactttgtgcaatttaattataaatactgttacatataaaccctgtaatcaactatgagtttgtgccaaggaaattttttggtacaattttctccttaccaccggttaattgattaatattaacgtgtgatggacaagataaataccaagaaagctatgaagatttttgaacaaaatgccaggagacgcatagctatttcaacattacagcactaccaacagaacctttgatactttgatttcatctgctgctttttgattttattaattacaattccaggacaaaatgaccattacaaataagaaagtttgggcggctaaatatatatcaataaatagaatgcatatattcttttaaaagatcatattattaggtacttgaggtttgactttctggttttattaaatgtcgtacatgtttgattcatcctgcttttggaactttagttgtattttttttcctttgtccacatagatgccatatacagtacatccttactagtgataggtaattccagctactagtggtgcgaactcctgccttgaaccctggcttgggcctcagtctttttattagtattattttgaaatcttataatgcaaaagactaatgatggtgacgatagcaaatagataataaagtaaagcacactctttcttgtgatattcttgtgccataggcctatcgtgttctctcattaattggcttgcatactatactatactggttcacacggctgtcctttagaaaagtctgagataaagaaaaaccaggctgcatatattttacagtgatctttttgttggtaacagatgtttgcttgtgctgaatagatgttcttgttatttttggcagggctttgtattctacatgacagggttatcgttgaagatatctgttccatattacagtgttccccaaagtcacggtaagaaatattgcagcaagggggagccctttacgttggtgagatttgccaggtttctctttgactagattgcagatgcctacattgttccatcattggtacgacatattatgatactggtaaaacactcaagagagagcgatgcagatgtccttggcattttgacatttggagaacatcataccacatgaaccgcttagtgtgattactacatccatatggttctctgaattctatgctgaatttgttggcacataggagtactgtactacataggaaggatactgctgagttctatgctaaatctgtgtatttttggtgggctgcctgaatcattgtacaagcgaacgacagaaatggatatcaaatgaggtccctccgagagggagttgcattacatgcatccttatcgatctgcgcggtcaatttctgttgcaatgactgcaacaaacctacagagaatcctgatccgcatttgtttgtttgggagagaacgaggcactgcgatgaattttggcaaaaaaaaaaaggggggggggggggggggcggcttgtctatatgagattcgcatgattttttaggcttctatcatgcagtgtttcaccaagtagattaaaaatgtttcagtcttttaaaaaagccagaacacaactaaatcacatcatgaaacattttggtacaacgtatgaaacaacggttctaaatatattgaaatatgaaacaaatcctgagtatatctaggaaacgtctatatgagattctcatgattttttaggtttccatcatgcaaattttgaagctaatcggacgctgtttcaccaagtagatcgaaaatattttaattttttaaaaggctgatatataatcaaatcaccttgtgaaacattttactacaacgtataaaacaacggttctgaatatattgaaacataaatgatttagctatcaaaaaatcattcgataaccatttagtcttcctgaaaaagaaaagttgatgtaattctgtgttggttcttacattctgtcttctttgaaatatcttgccttaattctcaaatatgtgaaaaccaactcttttgaaaacaaaccatgcccaaataacattacttacacgtatcacgtatgcatggattgaagtattttgctagaggggttcaaattattcgtgtacgattatgcacgcgagagcgtttccaacaagttttcttttagtcaaaataaggaattatagttggttttcgtctctcgtacactttactaatacaatggataaatatattatctcatcaactcaactagtatttgaattttatatgagtttaaagattgatttagatttagattccacgtaatcgcgagagagagagagaagagaagagaagcgcgcagtgtccagacgcaaccgatcagtctcgcttctcgcctcgtctcgtctccttcctccgacgcgcggaaccttctagaagcttctccctccggtcgggggatgccgcgctgaccccctaccgtggttatgctggcgtcaaagctctggtcgaggctcgcgtcgccgtcttcccccgcctcgccgcgcgccctttcttcttcttcatcggcggcggcggcggcgaggtacctactgccgagctctgggatgccggcccaagaaaggtcgccgggtcaccccagtggcggcgacgcgcggcccggtgcggggctcgggctcgccgagactgggtgtggcgcggccggtgcgccgcgaccgctgccgctgccgtgctcttcttcgtcggacaatcccgcgtgagtctgcctcggcgttctgaatcttctgattctcttgtgctcaagcgcttgcaccttatctggatcactgaataggtttacgcatttagtaaatctttagtaaaatgtttgccccaaaaaatgataatgaaattgtagattcaaaattgccctattcttttgtaatctgttggcttgagctaaatttcgtgtttgcggtagggaagagaatccttgcacaagacagatataccaaagacagctaatgccgcatcggttcaagttatttttgggggagaaacgtcattttacatatgcaaatggtgcttcactgaatccgcagaactacagatatttttcatcttcttctggccaacagagtataggaattggtaacaaggtgggcagccatatgttaatgagcttctatgacagagcttgatatgttcagcctttagctttattaaaggaaaattgctgccatttttgttatagaagaattatttccttctgaatttattgactggaggcaacatgtttccagattatacatgaccttccaagaagtgtgaaaattgtggaagttgggccacgagatgggctacagaatgagaagaacatagttccaacacatgtaaagattgaactcatacagagactggcaacctctggattatcggttgttgaggcaactagttttgtctctccaaaatgggtaccacaggtaattttggtttagcaattagcatgcattagatacttgcttcttacacatatacggtttgatattttaaagatcaccatccacccatttttttctataatatttatttgacttccatgattttttggaaggatttttctacttgataattttaagaaaagtttggtgctagctctgttacaaatacagagcactgtatgttatggaacagccattacatgtggttatcgatcgttaacatgatcctcttattcccaatgatgcaattgcttcttgcattataatagccaatgtcatgtttcttccaaagtattaaattgttgcttctcttattaaaagccaaagaaatgtccttattatagaggacacgtgtacttttcaagtaactaaataaaatagatgagatgtagcaaacatgacacacgaacaagtataatctagaaataagcatatgcttgtggcttgtggcatacttatcattgacctgagcaaattatttcaccgcaccaagttccagttaacttgtaatggagtattggagtgagaagaaaaattgaaaaatgtaggagtatctcaataatactttgctgaacttgaatcattgtccatccattgtttccagattttatggttttgtatgtatattacttccattatctaacaaaaaaatgtatattacttgcttgctgctttatgtacttgaccattattttattataatctattttttatcctgtttgttcattggtttatttacccatcacatctttaccgttgagtttctcaataatttcttgtttctaattgtagctagctgatgctaaggatgtgatggatgtagtccggaatattgaaggtgtaagccttcctgtattgacaccaaaccttaaggtaatataatttgattcagataacttttgagtacatatgtctgtttacctcgtttcacatttattctgttcgttggtaatcagggatttgaggcagctgttgcagcaggtgcaaaagaagttgcagtatttgcgtcagcttctgaagcattttccaagtcaaacataaactgtaccattaaagagagccttgctcgctataaagatgttgctcttgcagcaaaagagctaaaaatccccatgcgagggtgagttatgtcacacagtagcctgatgttgcatcaagtttaatttctacatttgcaaatatcgggtgtatttgtatgaaatagtaatgagcaagtaaagtaatctggatttgatttattctgttgaataaccaaccagtctacctgttgcctctggcatcagctcactagctagtctagtgtatgatttatctttctctggatggtagttcagtttaccagagttttattccagggtagacttgtataaatagcttatacaaaatagtgtgtgttaatagtcgctcattgcataaattggtagtagatgctgacacaaagataaactggaaagtcttcacatacatggtttggcataatggtgtgggcaaatctgatttatagaactaccatttggttagaacttagaagagatatgtgagcataatcagttactgaacttaacattctcttcattttgtactggttcttggtgcaacatgttgatatctagttcctttacttgacaagaatataggtatgtttcttgtgtggttggatgcccagtagaaggatatgtgccaccgtcaaatgtagctcatgtggctaaagagctttatgacatgggctgctacgaggtttcacttggtgatacaataggcgttggtaccccaggtgatttcatattacctattttccatctcctgttttttgtgcgctatattatctatagcttcattcaactgctgcaaggccttagttcattacatttgttaaacaaaaaatatttcttgctgcggggggcagttttgcgctaaacagctcaccgctacaatcttctggagattgtgtgtagtttttctttaggagattgtatgtatagttattaacaggatatttgtttttcagtgcatcatgataaaaaaaattcctgttcttattaatacttaccagaaaacaagaaaacatcacataaaaggaaaaacaccatcgcgaaccatgtaattcatgtgaatgccagtagcctcttgcccttttatacacatagaagtttaagtttttgtctactagctttggtttattacccttcttctccagcttcatgatcccattactagccaggttttaaacagtttacttcctccatctatccaggcaccgttgttccaatgcttgaggctgttatgttctttgttccaaaggagaagcttgctgtccatttccacgatacctacggccaatcgctttcaaatatcctcatctctctccaggtaatcatccaccagatactaaacaaatcatcacacagagccaaatggttgtgaacttgtaacaacaaagaatcatatgtaatttccccaccaaaaaaaaaagaatcatatgtaattgatcatgtcctctgctctctttttattgtctcacctccgagtgcagtggccaggatatttattccattttgttctactggaaaatgctgcaagctttcttaccaacgattactgcatttgcctttgaatcagatgggtgtgagcgttgtggactcttccgtagcgggcctcggagggtgcccatacgcgaaaggtgcatcgggcaatgtggcgacggaggacgtggtgtacatgctgaacgggctggggatcagcaccaatgtcgacctgggcaaggtgatggccgccggcgagttcatctgcaaccatctggggcgccagtctgggtccaaggcagctatcgctttgggaagcaaggttgctactgccaacgcatccaaactgtgaggttcactaacattcactgatgcagtctttcggaggatgcgtttcagacatacaaatgtatacgataaataaaggcgaaattggttccatgctattcaagtgacctgggatttgtcggtgctagaaaactaaaatcgggatcgttgggtgatgtaagatcaattttgccagaaataaatggactgatgggattgttgattgatatatatggtcagcttttcctgaagaacttaagctgatgtttccgttggttcatgaaactcaatgtgtgtatagagccagaagcgggttgctcaatattgcatttgaacagctgcacatttaaaaagagaaggaacgggtggtatatttgtatggaataatcgacgatgacataactagaatgaaatggatgaagaggatagtagctttgagcccatttaacaaaaagacaccttataattaaaagtttagaacgaatgctacaatctcgctcacccaaaaaaaaaaaagaatcatcggttcatttccaacttcaaatcaaacgttcaaacagcaataatatcatttacagtagcttgttaaacacaatggtacactgctaatgtgttcctgaaaattgaacggactagtgcacgcaccctccgggcttacttcaattatatacttgatggcgcccatgaggaaataccaaaatgtttgcaccagtccactcaaaatgatcagtcagtcaagcctccctataaaagtcggattgtcataatgttttgctgaactcccctgatggcagcacaagaccttttccgtaggccgctaacaaaagggcctctgctcgccctgcatgagtgtaaaaaaaacattattgagctatagaaggaacatgtgtcatctattctcatggaacgcttgaattaaatggattgaagctaaatatgttacataaaaaacttatttaactcatccatgtaggtcgtgaattttaacacatatacaacctacagattcaatggacaatactagtagcaaatatgcacagtgcacactgtgaatgtgaagcatatcaggggtcgtttgattttgatttgatgcgcacctggaaagacagacaatggttctttgtattgtctttgacatactccctccgtcccaaaaaaaggcaaaccctgggtttccgtgtccaactttgactgtccgtcttatatgaaatttttttataattcgtattttcattgttgttagatgataaaacatgattaatattttatgcgtgacttgtctttttaatttttttcataattttttcgaataagacggacggtcaaacgttggacacggaaaccagtgtttgcctttttttgggacggagggagtatatcgcttgtttattcatgtgtatcagtcaagtttacttcaaatgttcagatgaactagcagaaacaaaaacatggcgagataatgaactattcgctaaaaataagatataatgaacagaaaatgatcttgttgcagtgaaaaaatcatttatattagcaggtatgctcaaggccaaaactgcgtgacataggcagtaaaagtttcacagtatgtaccatgatgtttcttcctattcagggacagggccttgtccgggaacaagattgaagcagcttgcctgctatagtcctgttatagatcataaagacaaccataagagggctatagaacagcaatgagttgatattctacttcaacactaaccatattgagttattgacattgaaatcatgttaggacaagatcaaaagctaacaacagagatcttgagatatgaaggtaatatttttcagatatttaattcatgaactttgtatataggaagtatttcagtgctctcccggaaatgaagaagagtgaaactgtgaattgaatgcctaatttgtgaccacactactgcactaccaacaactctataggacttcccttatttacactaccacactactgcactaccaacaactctataggacttcccttatttacactacagacaaaaataagcaacaaaaactccaggcccgggcacttctactttgttttttctttgtggtgtgtttttgtattgttttttcttccccttaatgaaatgaaatgcagctctcctgcgttttcgagaaaaaaaaaactccaggcccgccatatagaaacaagaagaatacagacagacacatgttatcttcatagccctggtaatgaagtgagacctcaatcccatcccatcttgttaaactccaatagtccattatacccaacctataatgtacttcaaccctaagccagctcccacgcacattttggcctcattatgttcatgttgtacagtgtgttcattttagttgacaccttcgtttaactaatttggatggcttgttatatattctgcaaaatctctccaatacctccaggttaacaaacaactctactagagattgtagaaacaaagagtcataaagcaactttatgttgcatacttccatatgacaagagtaacaaaccttaggtgatccgcttcgtgttagcccaaaataagccttccaggtctgtgatgcaactggaacaactgaaaaaccagatgcaactagagcagcaatccacaggccatacgaaaaacctgtactccaccatccctatatgaccccccaaaaaaaatcaccaacagaacagaaatttattgctgaaattcacattgcaccacatggtgtgattattcaagttatgaataatttcaaattggaattcattgttttagtgtaactctaaacttcagattatgtgagaaacatcctcaggaacatgatatctcaaactgtcgcaaaaattagttctattgttttccaccattgcaatcgtgcatacatcgtcaataaaaagacataggagagcactgctatccaattgcatacattctccaataatcaatgcaggggacattagtctgatactgttgacacaaggacttctacaaaatggctaaatggaaggaaggaaaagaaaataccagctttccatcagttggaaatgggcttgacttctcaatatatgccgtagttcctgcaagagagcgaaacaaacaatgatatcatgattagaaacaatgcagttcttcacatagcgcatatctaaaagaagaatgtgataactatgaatgaccataatgagtaatcataatggccatgtcccttgtgctgattgctgaacacaacacgaagcaaaccagcaccacccacaaaagaatgcagtaagcagtacaagttgcacccatctgttcataccaggaggcgcatcgaggccacggagcagctcgatgatggatttggtgtccaagcgcttccggatgaactccgagaccactatgtgcacgaacgggttatcaaacacctgcaagacatgaacgcctttgctcaagcacacaagttgtacacacagaatgcgcgagttccatcggagcaaagaaacccagccatacctgcgaggacccgtcgggcgagaggacggcgattgcgccgcccgtatcgggatccaccccaatcgcccagccggtggaggccgcggcggcggcggcggcggcctcgccgtcgtcgaccgggagcagcgagagggaggccagccaggggtccctcgtatcggcgtccgccagtagcttcgcccgcgccctggccctagccctagagggggacctggtgggcctcgtctcggcggcggcggcaggagcaggcacgcggcggcggcggcagcttcgggagcggaagggcggggcgaagaaggccgcggcggcgtcccagtgcagggtggagcggcggagtgcggtggagcggagcgcgttcatgtggtcctggctgccggcggggagggcggcggcggcggcggcggcggcggccgctgccataattaattaattaactcgaaatgagggaggaggggttttggggggataaggcgtcagaggaggacgcaggcgtgcgtgatgcctgcttgcttgctcacgaatctcctctccttgtttattttgcttcgtttttcttggttttttcttaattgcaaaagtttttttgtgtgtgtcgaattaggcatttctctttaaaaagaaaaataaaaaagtttcaatgtcacatcctcttcggaggtttagttgaagtgattttgtgtatttgatgtagtgaaaaatgaaattgcgcatgacaaatgtagtgcaggtgtagggtacataaatccaagaacgcatttgtcacttgcgacagaaacaatgccatttttatttagaaaagagatggtacatgtgtttttaatagaaatttagtaatgttaatgattaaccactagcttttatctcttgtcgatacacttttcgtatgaatttatcgagatttttatgttctctcgatattattgttagtctccgtctattggagcgtgtcatggtacataggcgtccttcacgtaatgaaaaatagcattggataaaatcataaaaatgaagaaactaagcaggaacaaggttttctttaccgccagatgcaaacagttagcacccagtaacccaaaccaagcataaaatttttgaacaaaaatttagttatttttgttcaattttatccggtttcagttttcctgaccgaaacatgattagagtacttatccatgaatcgatgctagaactgatcacgaggcacaaatttctaaagaattttacactatgattccaatgtttatatatcatctatcctacaagctgaatttggaattatacatcatctgtaaggtgagagaaatttaaatattgacatagataacccgttaactacggcaaatgtttgctgacttcctaagcagacgcctgacagctagcaagagccgagtggaacttctcatcaaatcatggtaccagtggcaagtgaataaaattagcagcgcaccatttcgtcgccaatctgctgcctaatggacctcagcatgttgcctcatcttagaaatatcaccaattctgcccgcaatgtttccagggaagtcgcattaagttagctcaacgagtctgcgcttcaaggaggatgttcgtggccgtgttgatgtcatttctggctcgcattagcgcctgtcttgcagcatttccatcaaagcccatcgaaaccagcatagcgattgaagattctgggggctccacgacaggagcgaatccagatggctgattgttctatattaaatagacagaatcaagatgtaagcatatagtcattggttttctttcaggcaatgcttaggaactcagagatgataaaggtttcgtgccttgtatgttagaaactataaaaattaatgggctatgcttgtatcagtagaaaaataattgaataacagtaacagatatgaaacatcaaaacccatcaagatgagacctgtaacttaagtatgaactttaagaacattgtggaccaagaccaaggaacaacaattttgtgctagtaactggagtcatcttaatcttgttgatgattacatatatggatgagtatttgatctatctatgttcacttcagttacaatggatcttcatcacatatgatggaagacatcacaaaacaatcataattgtccagttgaatcattgaaacatgcatacatggcagctaagtatatgaccaattactcaccagctaagaatccagatgaaaagatttatttatcaaaggatcaacatacacataaatcaaaacccaaacttagcttatcaaaaactaacctgcacagcacggcttgtacgagaactcatgtttccgaccagactcctggagggcctagatgaacctcccgaagaaggtgcgaaaattcttgcgaaaaatgatgcaataacctgtggcatctgtacaacgagcataaatagttagaactgcagacagaaaaataggcatgttttgagcctttggtcaaactctaaagacaaggaaatataataataaataaaagctctcctgccccacccacccccaacccccaccccaaaacaataaacttgaaaagaacagacaccagatcgtactactcaaaaccaagctagcaaatatccaacaaaaaaggggaaaccaggaataaacaacaaaatgcaatagcaaaaaagatctgactagatgtactttcacttaattctgcctgcagccatatgtatgtcaacatggaccatacaggcggtccgtgctgttcttttcttcgaaatgattatctgatatttaacaactgtaggtggagcaggtaatgactagctccagcctgatattacttggtccagttgattccatatcatattgcacacagtgagattttattaaaaaataacttctgatgccatgactcatgacttgtgactacaatagttctagtatatggaattaaatattattccaagtaaccaggcgactaacagaaaaacaacagaatataattttagtggtactgacataacaagaaaaattaatatagtatgaataagggagaacttaccttcatcctgcggatgccaagcacgttcagacgatagagagaaccagcaatcagaccacaaataccaggaataagagaacgcttcccagaagataaaagcagctgccaagagtaacagggaagttgtggcaatgaaatacttaagcgtaaatgacagataagtatccatttctgtccaaaaaaaaaaactaacctgcaggccagctaggtatatgaatgatttatcactgaagttaacaccaaaaatacgaaatcgtgatgtgacaggaatgtcaagaaagaatggaatgaatgaggcaaatataaggccataaggtccacatgcaagagtgctgaggtagttggtgtctgcaaaaataaataagaatatcaaaagaagctcaataatgacaaataaaaaagtcaacatttgccacaaaattatgacaaaaactgcactctcaataaatttcaaaaactcagagaaaataatgctcataattcaacagctaagctcatgaaaaataatcgtgaaaaagagggaaggaaactaacatcagcatggagcttaatgtctcgaaagaccactataaaatggtgaagaacaataaatcaagagccctatagcataatatggccagaaacaatgtcttggaacaactggatctagtatgtcacatataatgaatctctctaggtagcaactacctgacttgaattcataacatattgaatcaataaatttgtatttgcttgcaagttgcaccaaatgatgcattgcttgctagttcattggttgggtgctgatatttatcacaattcagcctacaaactactcagctaggttctcaactatattgttttttaagatgtataccttgacattttcttatctagacaacagccaatcagtttccagaacatccaaattataacagttgcagaaagcaggaaaatgaaaacaatgttagtatgtaagcatcattcataactactcaaggaaaaggaatttaaaagtatgttcttttcttaaaatttaccagacaatgctagtcagaaatttgtctcattgtcatacctttcaggagaaccaaagataggatctcaagaagcaatgatactgagatagtgaataaactaaaaacctgcaaaatacaattaaaaagcaattatatcatgatctcttactagcaaatttgtttgaacaactatttcttcttacaatggaagttaaaacaaactaaatatactgtttattccttcatgcattatatatggccctaaaactgagttgattccacacttaggctcatgacttgatagagtatttccaattgcacattaggtttttacacttcagaagcatttcactaaagtctgcggcatataaatttacagtgcgttatatgaagcagctaagagcaactttaaagttcaaggtactagacggtaaagttctcgagttccactgtacaggttcagatgcaatatactcctgcttctagttctaccaatataatgtaagttgtttatcaatctccatttcccagaaaagaattgatctcactctttctaccatactattactgttgtttatcaattcatttcacagcagagagaagtacaaaactgaggcacttaccgagtatttgttagagcctatctgcctctcgaaaacacggaagtaatagagcaggtagactccaaacaatagctccggtgttgactgaaaggcaaacccagatgcaaacaacttccatagacggaagtttttgacaatcccctgaaataacaaaaatgattgctttacacatacaaattacaaaagatccgtcataccacggatgcagcccaccttaagttttgcattaaagaagcagaaggtgaagtacagataataacaagaataatttaacggtgctgcagcagtgcaagctaacaggcacatgagaaatactgtttcagagctactattgggagttaactatcattataactataaggtacacacatggttaaacatatataagtggcatggtgcaactgaaatgtcatgtttgccaacttatcaacataaaatcatgtcctactcattattaacatgattagtttccatgtaagtttatatgataagtaaaactttaactcgtagtctactgtccaaaaagaacatatgatatattcaattacaacggtgatgaaacatctatatgtgctagttggtctgaagatggttctttttcttcttttcgggttgtgtacagatatttcccagactaactgaatcctaagttgatgtacacattttgcttctgttctatttgcccagagatgcactgcgtgaccgcacacccctaacagttcaatccatgtcttcccacagatacagtccatcaataagcaccagctactgagcactcctcaaatttccagaacggaccaaaatctgcaatctaacatcaccttggaacaacattccactagcaaatttcacccactgattcgccaacaccatagactattaaaaacaaagtaatcaggcacatcaaaacctatgattcagcgatcgtgcattcatgaatcttaatcaattagtaacccatgaatcaggcacttaatcaaagcaacacaacacaacgctcgtgacctaaccacggaacagctgcctgaaaaaccaatcgagattcggcgcccggctatccagggagggagggagggaggatgacctggtgggagaggacgagggcgcgggcgcggcgctgggcgctgaagacgacggagaggaggccgctggcgaggacgacggcccgcgtcaccggcgcgttctctgcaaccaaccaaagcgaaaaaacaaacaaacaaacgccggggaggcggtcaggcacggagtaaacggggcggaattccggtctcgattccggcgaaatctgagtggggggagggaggcggcgcttacggaatccggacacgccgccctgcatcgctcctctcgtccggaaccgatcgaccaccgccggggtcgggacgcggccccccacctctccgcggtcttccgcggcgagggttcccgtcaacttggacgggaggcaggctcgcggtcgcgggcggtccgacgaggaaggaagcgcggggtgggggccgtgcgagaggtgcggcgaactcgacggcggcggcggcgggcgggcgggcggagctcgggagggaggaagggggaagaagagtcagatgaggcgtggcgtgttttatgaggcggaagagacgaagagtcgttgacggtggagggggggtggttggctggaactcggctttggactctcctcctcctccgacctccggtgtggagctttctagaaatcacacaagtttgctctcttcgcatcagttccctacacaaacttgagaagcctttcttaaggtctatttggattgttatcataccaattttttaaaaaaaacttagataaattttggtactaccaatttttttttgttagggtaagattgtatttggtttgctacaaatataaagccagcacatgaattctagtgaagattgttctaaattgatgccaaatctagcatgggcattaccaataaattggtctcaatcaaaacaagcacatgtactatttaaactaccaaaatattggtagggctaagttttggtagcaatccaaaacagcccttaatttgatttctggggcggggcagattgtagccaaaatattactcaatattaccaaaaattttggcaggatttcttacgtatttactaaagtttggaaaaaaaaactaaatatatgcacatctttggtaaatttactagaaaataatatggttaacatcaatatgaatagcccctctattaagtcaaccgcaatgccaaattttaataacgtagctaaggttaagatgtgtgaatcgtgtaaaaaaaagtaggttaaggtgtgtgaattgtatctggtttgttactttatttatatcgaagaaaattttagaactatcaaatctttgtagaggctattttgggtactactacctccgtttcaggttataagactttctagcattgcccacatttatatagatgttaatgaatctaaacatatatgtctagattcattaacatctatataaatgtaggcaatactagaaagtcttataatatgaaactgaggaagtatctaatgggg

SEQ ID NO: 23700 - DNA, 6636 bp, Oryza sativa
cccccccccccaattgaaagtccatccaacactctaaaacttaaaacgagaatactgttcatataacaccctaagatgattttatcaagtggtttttatctaacttgcatatatgttgaatgagtttgaccatgtgacacatgcattgcacatatatatgttaaaatccttgcctaaacattttgcttttaccttttttttctctcacttacaaaccaatgttgatataatactagtatgacatcactatagagggatcgatgaatgacgatatataaacatactatgttaattattattcaaaaccacttatttaagctccaaatatgcaaaattactatccaaaactatcttatggtgtaatataaatgatattgtaaaatttgaaaggttgaatgtttggtttcaaagtttggtgtgcttcatggaagtacagggagtacacagacttttccctttcggcaaccatgtgaatttaagtttgtattgaaacttttaaacaagtactcgaaattctatataaatttgctttagaagttctaaaattggctccatgttctataagggccagactgctctgaatgtggcaatgtttgggtgtattagatggacgactattatccaggtccttaacaatcctatggcaaaaaatgggacaactaaaacagtaagtccaataaccaacatatattctgcaaaaattatctatgtcttaaaaaaaactatgcaaaaaagttcactctgctgttgtacaaaggaaaatactcttttactctcataaaaaggttgaaactaaattgaaaatggtactagctgtaaatacagagaaaatttgtcacaatgatacaaatatagcagtactattttgttttgtaagaaaaaaacactcgctccatctcaaaatataacaacacagtattagattatatgcaaatagttcatagtattagattatacaccatgttcacttggagaggagaggagagatggctatctcagcggccgtgcgtacagtggaactttctgttatcttttgaattgatcaaatcgttctatagttaaattaatttgctcaagctctaaattattttagtcttaatttcctcttctcatcgtcttcagtttttcagttaatttttcatgttccatctttatcaatattagtgttcaacaattttccatctttgagtgcccatgtcatcctcaagggtgactcaggcgacgaccacccgcggcagtggcccaccacccttccccttccttccccctcgccgtcaccgatgctagccgccggtctacgtgcggtgacaaggaaggcgacggtggggccgcttttcctctccagatctagtcgaggctcctcgcggatctaaggcgttgtagtttggagttcgcaaggtcagtagcaacacttgcagcagaggaggcggcaacccgcgtagaaggaggagacagagtcgacgacgacggagttggcggtgacaaagtttgggggtcgagctgttggtggccccatggacagatctggtaccccatggccggatctggagaggctggcgccttcaacggtaggagagcaattccaaggtgggcagggctgcagcagccacaggcttcgcagtggccgataggtcacggcggtggtgtgctggagttgctacggttgcaggggtagagttgaagccgccagagcacctagaaagggtggagttggagttggagccgtcgacggatttgtctggattggcgtatgttgagggtgtccgcatttgcaggaattgctcgtgcatagccgcagggcaacaacatcatggtgggcatcggctttcttggtggcttcaaggacggcttgtggtttccccctcgactgaccaatctccttttcccacccggagctcctccccttctttgtatcgctctgcttctagatcccggtgcagggagccccatggtagtaatgaggtttccgtatggtcaagcagggttcccacaatatgctaaagtttgagcaaccttcggcgtcatcgtcattttctcgaggtctgcgacatctaggtgacatgtgggggggtgtacctagggattttggtggttttggttggttccacccacggctgagctttcgcaagctgaggtgaagtcggagctacttggtgtgacgagcttggcaatgataacccctcaggaagtgtagttcaacgtggatggaggagcagtgttgtatgcccctgaagtgcagtgtcatcttgtgttgtggtggaatcggagctgttgtgccgggtggcaagctaggcaatgataactcagaacacccttgtcttgttctttagggtactccctctgtcccaaaatataaggaattttggtgggatgtgatatatcctacctgtccagattcgtagtactaggatgtgtcacatccctccaaaatccttaatattatgggacggagggagtaatcaacaatcgagagagcccaactgcccaaggcggaagcctttcgtagtctttttggtgatggtgatgttgacgcctttgggtgccgtgttcttcttgggtgcatcattcatgtgactctctcttctttaggtgaacacctagtttggtgctacagtcaggcgtcaaaagcattcttgatgttgtttccttgttggaggcttcgattaatagttcctgctcctgtggtgggtttgtttgaaggttgtggctcttcttaagaagtcggggcgcttctcgtctcttgatgagtttgacaacgatgacttgagtcgtaccttagtagtcttgtagtcgttggttgtttctcttttttctctatgtgtaggttttgacggttttccttataaactgggctaaatctccttcttaatatatctagcagaactcctgccgtcggtgtttttttaaaaaagtttttatgttcctaggtgacatcaaaaccaataccttgacggcctcctcgtttcatgcaaggccatcagttggcgccaacgcacgccggtgtggtttcctctccaaaattaaggcgtcccctctcccaaccgcacgtcgcgcgttccctctcctcgccaccgccgtcgccgccgccgccgccgcgccgttccccgccccgaccagacgaccgccgccgccgccgccgccgccgccgcgctgccccggcggcagcgccgccgaccgccacatgacacagcctccccggcgacccgacgccaccgagacgacgaccgccttcctcggcgccgcgtccacaccgagcccgcggcccgcgccggccaccccgctcccggacgccccgtcgttcctgctcggcccgtccacgccgctccccccgccgctcccgccgccgacgtcaactgcggcggcggcggcggcggcgaaggcgaagcaccagaagcagcagcagcagcagacctccaagcactggtcgcggccggcacggttcgtgcggtcggtgcgcgccgcgttccggtcgttcccgatcctcccggcgccgtcgtgccgggggctgccgtcgctgccccacctcccgggcctccaccacggcggcgcgggcggcgccgtcaggaaccacttccacggctccacccgcaccacggggacgctctacggccaccgccgcgcgcgcatcaccatcgccttccacgacagcccgggcagcccgccggcgctgctgctcgacatcgccgtccccaccgccaagttcatccaggacgtcagcgccgccggcatggtgcgcgtcacgctcgagtgcgacaagcagcagcatcagccgccgccgcacgcgcacccgccgggggatcccctcccgccgcggcggctgctggacgagccggtgtggtcggcggaggtgaacggcgagagcgtcgggtacgcggcgcggcgggaggcgacggaggcggacgagcgggtgatgcggctgctgcacgccatgtccatgggcgccggcgtgctccccgccgtcgccgccgacgcgccgacgtcggcggcggacggcgaggtgacgtacatgcgcgcgcacttcgaccgcgtggtggggtccaaggacgccgagacgtactacatgcacaacccggagggatgcgccaccggcccggagctcaccatcttcttcattaggacatgatcgacgatgatcactctaatttatttaggtttttctttcttcttcttcttcttctttttttatcttggatcatattgttcttgtttgataagtgtgcctcatcccaaccttgtgtgttttcctctatgattgtttgtgtagattattacatatcaatggtttagtctagattgcatataaagaaaccatgtagagaatgaaatactagattgaaatgttcagatggaataagcttgattagttgatcatgtgttcaattggtgcatatatgcttacattgtattgggaagtcgaataagttacatggtgatagagctctacgcctccatgcctaacgccaaaagtttttgttaagcaaaaggtatatgaagagggcaaatctattattctcctttcaaaaattgatcgattgtcacacattaccattcgtgttgtgattcgtaacgcaaaggctaaattttggcaaataatgctctgctccaatgaagtaatcttgtcaagtttctaggggtagaaacatatcgaactaatggaggcctcccatatcaatgttcatatgttaatgataatgaatacacatcgaattaagatattcatgtactccaatgttgtgagtaggaatcaatgttgtgaagaatacaaatccaataaatgcttcatatggttggatcaaattaatatccaatccaacaacataataaaggagttcagtgaaagaagtttttaaggagttcaagagttgcaaacttctcccaaaaaaaaaacacattgtcttcctcactctttgaaacccaaattaaatttcctttcttttcgttgtataaacaattggttatgaaatcataatactttgagatccctcaaatttcttacaaacctttctccaacggtcgacccaactctcacaaacacagccgggaagccaatccgggcctcaacctcggcctcagacccatgcgacatcccctctcctacaccccctctactcgtacgaccaccgaactcatcgccggtccaaacgtgcttccataagccgccatctgacatgggaaagtaggcggtcaccgtgctcctccccttgtccaagaccggcaccaccagcatctctgtcccaaccaggaattgttggtatgtcatcttctgcacacgctgatcctccgggtagtggaggaagaggtgccgcgccacgggaaggcccttctccgccgcctcctgagaagaaaccagttgtcaggataaacaactaggtagtacaatacaatactgtgtaaacatgatacaatatatgggcaatcacttctaaatgggcaagtgatttcatcccttgaggggatatcctctcgtttcgtgtatgccacctaaatagtctttaaaaattttgacaaaatttggtaagatagattaatatgatatagtatatcactccacaaacatgcaggttaaaattcaactcctacaaattgtaacaaaaataacaaatataactgcgaatgtacgataactatttttagtttattttgttctttttgttgcaacttgtagaagttgaatttggtttgtatgcttgtggagtgatatacttcatattaatctatgttgtcaatttttttaaaagatttttataactatttagatgacatacaaatataataatatttgcatgagagatgtccactcgttatttatgtcctgtaacgtgcaccgtgtaaactttttttttccaggcacgtgcaaaagctttgcaatgacataagagcgagaaggaatagagagtggcgtgtcacgtgtcagttcagtacctcgacgagctggatccggtagaactcccaggctttgtagatctttgcgcagcgcgcgaaatgcgcgagcgtgcggttattggagtagaactggcagttggatcctggcttgttaccctgcacatccaaactcagaattaattggatcaatggatcatcttgctagctagctagctcgatcgaattaatcagctcattgtttgatcagcaatggcgtcagctgatcagctgatggatgtatatatatgtatgtacctcgtgggtgcggaagacgacggtgaaggcgctgagctccagccatcggaggaggagctcctcgctgcggcggtagcggaggagcggcaggtcgacggtgcagtagccgccggcgtcgccgtggttgagcgggaagccggacatgccgccggtgaggaggccgacgacgctgctcttgatgccgtcgttcgcctgccagctcaccatctggtccccttcccagaacagcatcgcccacctcgagctctccctgaaccccgcccgcacgaagaacaccagctcgccgtcgccgtcgccgtcgtcggcgtcgtccgcgacgcggcggtgctcgccggagcgccactcgtcggcgaactcgcggttgacgcgcgcccacagctccgggtaccggttgtgcgccgcgacggggccgtcgtcgccggagccggaggagtgcagccgcgcgttcagcgggaggcc

SEQ ID NO: 23701 - DNA, 4990 bp, Oryza sativa
cgtcgccatgatcactgatctctggagctcaccgggacgaggcatgggttgcagtaggtcatggtcctgacgccgcggcgccggagatcgcggaccagatcattccatccggcgtagtggtcgtcgtctacctcccagttccaccatagctgggatccaatggacgtcttcctctggccaacccaatcctgcatttttgtgaaagaatttgtccagagcttggaaattggatcatggagagtttacttggttcagagcgctgaatgcatcaggatcatggtcttatcattatcgacagtcaggggtctaaggccatcaacaatttatcatgacaactataacaaattttaactggtggagtttcatggtagttgtggtttcacacaattttttctaattaattgtgtattgtaaggttgtttccttttctttttaaaacggggcacctttattttttatataaaacgtcggtaatggtttggccattcaaaaaaatattgaacaaattttagttaaaaaataggttcataagacctaaccaataagaattgtggcattttggtcaaacgcatctaaggccaagtctactatataattttattcgatactacgaagaaagccttggcattgggtctacgtattagagcaagtttaatagtatagcccactactagctccaaatcatctatagcccatgtaatagttaattcataaaatagtttgcttactatactattaatatttgatctcacctatcagggcatccacaatggttatctataaactctctacaagagatccatgtcagcatattttcctacttgaaagagattaaatgaagcgagagagcaaagctatctactaacatggagatagtctatagagaaaaacgaggcaatggattagagagctatagatacccatgtagacataccattgaagtggtttactattaatctagtctattgctgagatgtacatgttttatagatagcaccttactttaccattgcgggtgctttcatacacacattacatcttagagtttgtgctgtagctggctacatatctatagcacgctgctattctctctctttctttttaaaatatggttatagctggcttatagcctgctattgtacatgctattagaaggctagtagatgctaaaataacacaagaactgattcatgtagagacatatatttccaatggataaagaacatttctttttactgtcactaagtttgttacttgaccttcgcatgataagtagaaaaagacaatttcttttgtttttagacagaaccgataaacactagcattgtttctagcacacgtactagagagagagaaaaaaaagatctagcacatgtatgacaaatttatctactacaagtcctatgaatatgatagggaatagtagcaaactttggcaattgcgtagggaattcagctagtaggttcagagttcagatcgaatgcaacaagaaactcaggttcagagagggagagggagagggagagggagaggttgagacctgcagccagaatgcagagaccgggacgtcgtggtcctgcagctgcttccagacgcggcggacggcgtccgtgccgccctgcatcccgaccaccgcgccggacgtgatccaccggggaagagccggcggcctccccgtcgactccgtgtagctcgtgatcagctccgtcggcgagccgccgtgcaggatcctcccctggactgaactcccgtacacctgccagattcattcagcacagaattgtaatcggcgaattgcaaaagcagaatggatgtgcgagttcttggaattctgtccataacatcgatgaagttcttggttttatgattgaaaaattctgagatgcacttgatagtgcagtggtaaagggtgtgtggttttaacacgctcacaatttcttcttaaaatgtttggagggatgtctctccctccaaatctcctttttttttatttggaaaatcgcaaaagcagagtgaatgtgagttcttgaaattctgtccatgaacatcgatgaagttcttggatctggttagtttagctaatcaagtattgacagttcagaatgattagtcagaaattcaggattcagaaatgtgtttagggggtaatggaatggctacctgaatctgcactctatcaggctttgtcaggtcaaaaatggagtaatcgtatccctcgaggtacaaagatctcatctttgaggtcatgtagaacggagacggagcatacgtagtactccagtttcctccagacctatacatgacgaaacaaagtaataaaccaccatgaacaacaacatactaaaaaatgcatatcaagttatccaaaagaagagaagaaaactcgtagaaatcatggatcagtgctcacaaatcgacaatttgacatgataatttctctcaagagaagtacaatctgcacaagaatttcaagcacacacgcacaagctacaaattctctaaccaaggcacaacggtcagtcactgtcgctgcggtttcagagttctcatctgcaggccttacaattcctagaattatttggtgatttctatcaatgcaatgtcgttttctaccttaaattgctgtactcttcgagctcatccaaatgagctgcaagtggcaacgcctggataactactcctagataagttcaggcaagctctcaatgcagttcttgacacttgcatggcaatctggcaatgaggattttcactttctacttactattcaactacaaaaacagtaactttctggagtactttctattgcttaccaagacgcaaagaaaccgaatatgtgaccgaacggaccgtgtcaggaccggtaacatcaaactttgaaagatcttttgttggttgaagtcaaagtttggtagggttaaaaaaactggaataagtcatgtacataataaggaatatgatcagtgcggtcgatttttaaagaaatctgttcaatttcatgggaattcggaaattttccccgtactcaaaaagagctctgatctccttttgagaagtactcacatgtcacaagaacaagaatgcaattttcctagagttgatgtggtaaaccgggaagtaaaaagaatttataaatgataagtgaaaaattgtataaccatgcatgacaccgttgatgtaccattaactaatatttttctattagaatataaccacgacatataacaaaattataatattataaaaatactccttccatcccaaaatataacaatttctaaaatttaaaatttctttcaaatataacaacctattaccatcaaaagataacctttaccactaaactacccatactatcctacttcctccgttttatattataaaactttctagcattactcacattcatataaatgttaatgaatctaaacatatatgtgtatagattcattagcatctatatgaatatagtcaatgctagaaagtcttgtaatatgaaatggagggagtagcatcaaaagatagtttcccaactagtaagggcctatatctcactccccccgaaaaggcaacaagacttttcacccctccccttaatagtcgtgcaaattactaaaacttgatatatttgaaatggaagtacctataaagaaaaacgtactcatacgatttttatttttccaaactaaaatcatttatcatactaatattttgagaggtagtattaatgatcatagtttcaatgttggactaaatcaacaataatacgtactacctcagtttcatcgtatcctcagtttcatcgtatcgtaagttgttttgacttttttttctaaatcaaactttatcaaatttatagaaaagatatgcaatattttcaacatgaaaaaaagctattaaaatactaagtttgacttaaaaaaattaaaatactccctccgtctctaaatatttgttgccgttgacttttttaaatatgtgaccgtttatcttattcaaaagtttaagtaattattaattattttcctatcatttaatttattgttaaatatacttttatgtatacatatagttttgcatatttcacaaaagtttttgaataagatgaacggtcaaatatatttaaaaaaaatcaataacgtcaaatatttagagacggaggaagtaacttctctaatatgaaacggagggagtagagtaccctgtagctgccggagtattgtggattttgacttgttacctgtagctgacgaggttggcggcgaacgtgatgggctggtcgcccctcccgatcccctgctcctggaccaacaccggcacgcgcttccccttaaactccacgcggctgaactgctccccgaacccgtagaacctctcctcccgcgagctcgccaacgtcatccacacccggttgaactccaactcctccttcgccgccgccgctggcacgagcggcgcgagctcctcccggtcagccgggacgcccgcggcggcgaaggcgagcttcttcttcttcttgctgccgccgctgctccgctgcacccgggtggataggcggagccggaggatgctgccggcgcggtgcgttcttggggaggtggagggggatggcgatggcaatggggatgggtgggtggcgtggcggtcgtggtcgcagctccattggtagtcgccgaggttgacgcggaacgcgacctgcgtgtcgctcttctcctcgaggaggatccagtaccgcgccgagaggaccggccgtccggcggcggctgcggcgcggcgccggccgcagaggcaggacggcgagggggtcggcttcctgacggacacgacgccggtgatcaccaccacggggaaccgcgcctgctcgtgctcggacgcctggaacgccgcgccggcgacgcgcaggaggtcggcgtcggcgtcggcgtcggcgtcgcggcggtacacggcgcggatcctgtcgacgcgctggcggtcggggacgaggcgggc

SEQ ID NO: 23702 - DNA, 2819 bp, Oryza sativa
ctcgcggagcgcgaacgagccgcggcactcgtcggcctcggggtccacggaccccgccgaaacaaacgcgacgccggggacggtctcccacatcgtcgcgccaccgccaccacggcgaggagccagcgacaccgcgccgccgagggacgggtcccagcggaggaggaagtgggggccgacagggaagtcgtgggcgccgtgggcgagcttggaggacggcgagaaggagagcggcggcgcggcgtcccggtgccggagggaggacgacggcacggccctcgggaacgggttgttgaggcggacgtggtccttctttctggtcttcggctgcgccggcgatggcgtcggcggcggcggcggcgccatgtctccggcggcggtggcgagagaaggcgcggcgcgggtgctctgcttggcgaggcgagaagcagagagccgattggctgaaatagattctggaatgaagggggagtgggggcccaggtggtggtgggcctggagagcacgcgctcgttttgactgaagtggattcgtgtgaatttaggtagtgtttggttggtgggatgggatgggacgaatctacttttagaggtgtttggttgaggggcgagtgggatgggttggtccctagagaggaatattcctcctagatccgggacaaacacatccggcaaaatcggccagacgagctcgtcccacttggacgaagcacacggcgtctcctcggcgaccgccggcgctcgtccgcgcccgcgcccgccgcctcctctgtgaccgccggcgctccgccacgaccgcctgccaccacctccacgaccgccgacgctcctccatgaccccctgcctcaacaccggtcgccgccacgagcgagatgctctgcgccatcctgccgctcatcgcgatgctcgacgagagcggctgcggtgatgtcgacgtggcgggctcgagtggcggcgaagcttggaggtagggagggcggcggcggtggatccagaggagggggactcggcggcggcgaaacttggaggtagggagagcggcggcggcggatctggcgcaggggatctcccgatccagccgcggcgacgatggtgggccagcgggttgggtgctccgacggtggtggccgtcctgctgctgccactgtgcttgattgtggcgcagtcaacggtcgttgacggtgatggcaaacaatgtccatcccatctcccccttatcccttcaaccaaacaaaaaattaggattgtcacatcctacaaaccaaacacgtgagtggaatcatcctaacccaaaatcagatatggtttcatcccatcccatctagctggatcatggatggagtagcaattttggtcacttccaactttgccatgtgtttatttggattaatagcattttttaccctgtcaattttttttggcagcttcaatagtaacgtataaaggcccacagtatttgtattataagttgtttgacttattttctagttaaacttttaaagtttgatcaagtttatagaaaaatatagtagtattttttttaaaaaaataaatatattataaaaatatattcaatgttagatttaatggtactaatttaatattttagatattgctaaatttttctataaacttaatcaaactttatgaagttttattagagaaaaatcagacaatttataatatgaaatggagggcatatgaaatttggtagtgccaaaagttatcaaggttttagcactagcaaaatattggtacgacaaaaattggtaataatccaaacaagcctaatatctattagtattaccacatttttacaaggtaaaaaaaataatcttactattgctactttaccaaagatcgataaggcttcaacccaaacacaaaaatactatcaaaattcggtagcataaaaatgtgccacaatttagtacttcttaaaatttgataacgttaacaacaaacaggacctaaatgcgctcaccaatgttcaggccacaagattctctccttgcgtaaacagtccacgtggaatggcatactggcgaggtaaataatttaagaatatcctaattaccttgtaagattgacagatgatacggttttgtatttggcgccaaacttgattttgaaaagtttgacccaaatatattctaaatattaaatatttatgtacggatggagtataatagatctacaatcccaacaatgttataatgcgaggtggagcagaacgacgcaagagcggtggagagtgtgtcgtgggcagccttggatgcgcgccgagcagcggcagcagcgaccgcttctccagtagttgggtcaacgtcggatccggaggagggtgtgaaggaattgcgtacggcgtcggcgacggctttgacagcctcatcgatcgcggcgttagctgcatcaggaaacaacgctggcttcgacgtggtgtcgggcgccatggagaagaaggaatagggtttaggtgttgtcgacgtttgatgtcacgattccggtatttgcacagtatggggatcgttggtactaggatatatgcgagatttaagtaaaagagacggagacgaggattttttataggttcgggcccctgaaatgtcaggtaataaccctatatcatgttggccaaagccggtattgcttttattcaccataatcataccagtataatatttggggtagtctatctaactattgtcgacttggcagtctgtagtactgactcgtagtcgataacagggtagtcttcctcctcgaatccacatccagtgagatcagagacaacgctagattcctctctttggttcccg

SEQ ID NO: 23703 - DNA, 16331 bp, Oryza sativa
ttttatatcgaaaattaaatggtaatatattctggtaggaagtttcctaggtgaattttattttaaaccattatatatatattagacatattgcgaaaggaacaaccatacacgtgaagctagaatgggactatagaatgattacatgtttatgatttatttggtactgcacatgtgatttggtaagtcaaatggagcaatggaaatgcttggaaatttagccccatcgttttgcttatacttaaaaatttagtcaaaatttaaaatttaaaactaaatctttcgagttgaatttgtggttcttttatcatcatttattttaaattatttacttttgaatggcaaaggacacacatatgaaaatcttaatcacaaattgtttttctttctaataagctgtacggataggaatagtataagcaaaatgatgtggctgactaaaaaatttaacctatttcaaatataggcttcacctgattttatacgattgtaaattcacaaatatttttggtttagtaagattataatcacgaaagtagcgataatatttaaatatgtaaattatgtgcacccttcaacatgcatgatggatagttattttctcaaccaatttggttattattccggggtgtacatatcaaatttactgtaagaatctaaactggtcaaacctcagaaatgtaaacggagatactccggaactccccataaattaccgaagtttatggtaggattgctttagtgtatattactccctccggtttcatgattcctgactttttaaataagtttaagattaaacttttgtaacttcaattatcgttaactttaaatatatttagtttaaagaaactagaacaacatatatatagatttatatttcaaaatactactctctccgtcccaatttcatcatcacataagaattttaaagtcttcccaaaatgatcaaacaagtgactatttgtttatttgtgcaaagagtaaataaacatcattgaatgcactgcatgttaccaaccaaattaatttctatcggtgcaaccgtgaaatatttaaaacatgaagcaattcatggaagacgatgcatcgtagcaccttaattgatgataattaattatagaatgaagatttttattgtccttggtctctgcgctttttctttaaaaaagtaaacatgtatttatttgttgtatatactccctccattccataatataaggcacaaccatttttttagatgttccataatataaggcatacatgcatgcatacaattaactatgacatcttctccattaaattattaattctttaaatcattcactcttacatcctctaattctattagatgcatgtattgtatttattaggatgatccaaactataagatgataataattatttcttggtctttgggttaagggtagttgtgccttatattttggaatggagggagtattataataaaaacaaagtcatatatatatatatatatatatatatatatatatatatatatatatatatatatatatatatatatatatatatatataggagactgtgtcattgtccaaacattaagaattatgaaaccggaataaatactgtaatatgctttgaattatgcagatttgctatataaaagttatattattagatctgccactgaaattgtttctatgatgttacactcttactgaaatatttttatatagatatataaaaagttaaaaattgaagacgcacaccttagttaaaaacatatatgatgttaattttttaggccttcgagatatgactgaccatatttttttgttagaataatatatataataagtttgattactaattcaaataaatctgcatatatcatttttatgtgttcatgctggatatttaaaagatattgatagattaattaagtttatccaaggcatgtatcacagtcatggtgcaaaatcattaggttaagtgaatgaatggcaggagtacagcccagagttcctttctttgtaaagtttgttgtcccgttgtgaataacaccgtgattgtggaaaggtgcatctcgtatacaaagttagccgtgtacgttcatgcttagtactcctagcaagtagctttggcaacaaccgagcagaagacaaagtaaggatgaggcttcttacaaggtacttctattaattaatggaatgaatgaatttagctagaggcatgtaacgtgccaaaggtggccagatgcaatgaacctagtagaggtttacatataggacaatggatatgtgggcgtaccgttgaagtgatttaattcggcaccaagtttttaggaacaaacaacttcttctaacaaaataaatgaattgatactctcttcatcccaaattatagcaacctagaaacagatatgactcaaacgaatctaaacagaaagcctatccaaattcgtaatagtattttgagtccatctaattctagattattctatcatgggacagacgtagtacaatttggaactccgtctctaaacaagatgcataggttccctctagtcattaatatatgactttttaacactagtttagtgttaaaactgttagatattaatgagtgttaaaaatttcatatatgaatattattggagtgagtatattataggacaagtgaaataacttacactcccgtctgatcatattaatatgttgataggggattgttgtgatcctattatcttactcaataaagaaagaaatcatatgactagatggtttcataccacatatcactatttggatattacctccgttctcaaaaagatgacatcaaatacatgcagccaaagctcgaacttttaaatcagtcctagattaaaaaatatattagaatttaatatgttcttttcatgtattttctcgtaacgagttttataaatatatatttagaaaacatgtgtatcggaaaggggcaatttcattcttacccctacttcgatgttcatattgattttgccccttcggaaattatgttgatgttcaaacaatgagtaaaaaaagaacggagcaagtatataactgctaggaaacgttgaacaagattagtagttattcaacgaatttcagttattcatgtgtgctttaactagatgggatattcgttaattgatagtagtactacttagtagaacgtaattcagcatgagcttcagtgatccatgtgaccatgtctatgttacagccttacaggcctatatacgtaagatcgagatggttcatccattggcgtgcatctggacgttttcgcagctgtgttcatccatgctaataagcttcagtatagcatgaagacacgtccaaacctctcgcttttatggagtaccttgcatctgctcgttgcttatgaatcttcccgccatcgtggaaatgttctcagtagaactgcatgcattacaagcgtacgacagtctgtttgtcatcatgcaaacgagatgtttcactgaagtactcccgacgtttcagattataagtcgttttgattttggtcggagtcaaattgcttcaaatttaatcaaattggtaaaaaaaatagtaacatttttaatccaagataaatatattatgaaaatatattcaattatagatttaataaaactaatttgatatcgtaaatattactatatttttctacaaactaatttagagcggtttaactttgaccaaaatcaaaacgacgacttacatcaacatcacaataaggagagatagttcatttaggttggactcttggaaaaggccgatgatcgaacaccatgaagaagaagagagaatcttaaagaaagagagaaccggcggtatacctatacaacttattacaaggattgagttcagaagttcagattccttagattgatagagaaagtgtttgtggtattatatagaaaatttatgtccttaattgtgggttgtgaatagaagatataaggtgaaaattaagacctgtagcaaatctaggggtgcatttttttttagagggggtgtgatgttgaacgtaataacgtttggaaattggaatatttgatctcgaaaataacatctagagccattcattaaaattgttcgaccaattaatttctaagaatggctttagttgagttttttttttataaaaaggacaaagggggaagttctcattattttttactatgatttgactgcttatacatagagtataactaaaaaatcagttgaatgtgacgtaagatttgcgcaggttcacaacgcagctattttacgtaagttttactagaaaattccacaagagttacaattttttttcatagtaatcagagttaattatcgtgttccaacatgaatcgatttgcgatttaggaattctacaggatacatgaatcgatttaactaggtgaaaccccacgcattgctgcggaaatttagtatgataacaataaaaaataatgtgtaaaatagctagataacatcagattaaataaattaatgtggtttatgataatttaaatttaaatagtacgtagaatggtgattcaaacgtaaaaagtaagctagtatgactttatggaagaataaaagtagggagatagtttggaccgtagattaatcatctaaaggctaaaaataattgatgatatgacttaattagaggaaaaaaggagaaatataatttggatcatagattaatcatttaagtactaactaagtgaggatgaactatataagtatataggatatcataaaacataataaagatatacattgaaacattatgtgaattatgttgcatgataatttaacatgtttgtatttaaaaagctcttaaattataaaaactataaagatataacatgtttgcatgatgtttaaatgtgatgattgttagtggatgatgatgtggcatcttgttaattagtgtatgatgatgtggtatcttgttagtggatgataatgtgacatctttgcatgtcaagcttaaggagttagtggaaataactttatactacctccgtcccaaaataattttatttctaggattgaaaattcgtcccaaaataattgtaattctagagtactaattgccccatcaatcatctctcatttaaatttctccctattttaacctcagccatctttccactctcacataaacaccatttaataagggacaccatagtctttcttttcaatttcaaaccttaatatatgctaaacaatatagaattacaatttattttgggatggaggtagtagtaagataggattcctacgtcaactagacgagatttccacgctccactttccaagtccagtctcactcacagtcccgactatgctaccgttcaaattcaactactacaaggacacgaccaacgaagccgtcttatggtgcacacgcggaaattcagaaaacgggggtagcacgagggtgcaaggaaggaccgagcgtttgacgcgaacaagagctggacgagatggaaataactgtccaaaaacttgctacaaaatctaaacaaaattacaggcgaaagaaacattaacaactactcctgaatacttactagtaatacttactactagcaggggattactctttgtaagtgtccgcctgtcaggggattacgtcttcccctagcaagggaagattacccccaatgtcataacgagttccaacttacaacgtgaccacaaccgaactgtctcccagatataccagttaattaggcagtaattgtgtaatgtagtaggggagttgacagctcccctggcaaggaattaaaccccatgaaatcatttctggtttcttccctagcctacatttactgctaaattagcaccaaaacaatgttggcaaggaattcaagtttgctacgcttggttcctgtgggaggggattgaaacagtggataatctcctgtaacatacacgactgtcagcattgccgaatgtgctcaaatatcaaggtgttctaggttgaccatgcttgcagcattctggatcagttgcttcctgacatcaacctgaaataaaataaaaagttctgatgctaaagcgagaatataatatgttaatcgttttttagaatttagtaaacttagctgcttacccgggtacccataagagatgagaacacaacgttggcctcagcagcatcttcaacctttagctgcttcaacatcctcctctcagggtccattgttgtctcccataattgtgccggcatcatctcaccaagacctatttagccacaagagaaaaggatgcaaggcaaaatgtctaccactgagataacagaaacggatgaatctttggatatgtaacataaaaaaggtgtatagtatacaagattgcacaaagcatatttagtaacaatttcatgtgcatgtatgcatgcatggtacaaagactgagcactaataacgttttgttatgaacttaaaagtcagcatttgagcataagagtaaatgtagcagtatatgcatgttttttggctcaagtgtacagttcaattacacgtcatatagagcgccataaagatagtttggtagatgagaaaggggcacattgcatgcgatacggtgctggaaggaactggggggaagattagaacggtagaagtggagatcaggcagagtacatgaacaaggagctctcaacagtaatggcatttgtgcattctctagaaacgtttgtgcacaaaggtgtgtgcatagggtagagggtggaattaaagttgacttggttgactggagctggaggtaggaaagattaatgtaaatattaacaaagtgttatgaatactgatcaaatatggataatgtgttaagttgggaaatcacagaaaatagattagataatcacattgaaaacttatcagttcataattgtcagaaaaatctacagtgtagctatttctacctaagcacggtgatgtattgtcacctagcaaatggtcttataggtagacgagttcttcactagatgattcaaaagaacaaaagataaacttggtacaatatcgtcaattgagatggctcagcacaatagcatataaaaccgcatcaacaaaataatattggggataacaaatagccaaatgtactgagaaatgactgtgatgtgttgacagattttctcaaagttcattgcactcattagttgattgattcaaatgtttgtacctttaaacctttggatatgataagaagcatttgttgggaaggtgttaactagctccttaaggtcagcatcatcatagcagtagtgcgcttgtttcccacgttcaacctaacaccaaagataaagatcaactacaaacttaagaccagctcttccgtcaaaatttgaaggactagtgttgcatccacaatcaaaccttgtaaagaggaggcacaccaacataaatgcaaccttcatcgaatagtgctttctgcatagacagtagtgttagaacggaaaacatgccttttatggttcatagtatcagcatctgccatcataatatggtatggacagttgccatttaaaacacatagcatactcttctaaaaaaatgttaacatgataaggctcaaaactaacctcatccagactgagattatcataaacagctaaactcccacccactgaaactgatcttatgcaaactacaaccctatccattgtcaagccttagttgtacaagagtcaaaatacacaggcaaaaccagagaacaatttatttgaagttgcaacacctaggatggcccctaacagatcagccataactccagtttgatcagtatcagaaagagggtagaagtacctgatatctaaagaagaaagtaaggagaagagtccggatatgtgcaccatctacatcagcatcagtgagtatgactatcttatgatatcgaagagcttccttgttaaaatcctcgccctgaaagaaaatattagagaagaaaacaataacagtagaagtttagatcaaaacagtatgcacctttactcctaatccaagagcgacaattagattttggatctcttcgtttttgtacaaggctgcctcgtctctcctttcaatgttaagaattttgcctcttagaggcaaaatagcctgcatccattttcgaaggtatacttagatctaagtaaatgacaaaacatggtgtgcaagtccaaacatgcttaatatagaacaatagattatgactccttatgagatctcatctcacattccacaataaaggtgtctacgtaacaaaaaatggacacgctgctcttgacaattatgcgccaacttgtgctggtcctgctcgacagttgcagagtgtttactgatattctttgtagcttaatttatgtgccaacaccagccggataattatgtttgctgagattgttggcaagttaacaaactgaaattgtatatagtattctgcagtttagaactacatggcagcagctttgaacgaagaagaatttttggaatactgatttacttattctcgaacaggaaggaatactgattttgatggactaataagagagcatccatttgacaaaaacatagatactctatttggccaagctccaatatgggccagggcctgagccagggttccccagccaaatgaataatgaactttggagaagctcaaattcaagcaggccaagtcccaaatatttgtggagtctagtttctccttaaaccagctactagagctaactggtgccagaggctcagctaaacatggccttagcaactaaggctgtgttcgggagggcaagttcccaaccttgcctcccaacacggaaaacaaagcacgcgattatagtgagattaattaagtattagcctaaaaaaattgaaaaatggattaatatgattttttgaagcaactttcatatataaaactttttgcaaaaaatataccgtttagcagtttgaaaaccgtgcacgcggaaaacgaggggaaaagaacacaacagacaggcatccatgttggacctagaaatggattgctttatatacaaaagaatgacaggagggcgagggcactcgtgctcttcctagtttcatgtacattatattagaaaagaaaagaacacacaaagattggcttacaaccagacagatttcaattatgtaaacagacaaattgaagcaatatgttctccatttttaagaattttcatggtcttcttaataacacgttgtccattccaacactaagcataactacttatgaacaaaaggatgaactaaccatctcaaaaaaaaaaaagggatgaactaacttaggtatatctatccttgatggtacgacaagtagaagacatggtctaacatttttagagttctaaagcataaattgatgcaatggaagtttttttttaagaaaaatacatatattcaaggaaactttgaaagggtgaacaaaaaccgccaatagatggaacaatgatcaacacatcagctgatcaggaatactaacagctatgcaaaatagaattagtcaaatcaaacttcttcctttagagaaggtaaaacgacagtagatagctataaacatctactcttggctgtatatcatgaatattgcaattcttctggtgtagaatcattgaatgcacattagcgtgactagactggcaaaaaaaatggtatacctgaaatttcctatcacgtccttgttttgcactacccccagctgaatcaccttcaactatgaagatttctgaattcatgtgtcataaccaaaggtcaaagtttagaaaaagtagaatacgcataaatcatagtttaaacaaaaatatacactacatttgtcaggcatatatttaaaagaagagttgaagaccagggagaagtcaaatcagaagggccaaccaaaatggtatcaataagatttgaacttgagccacttatgatgcaagggtttcatggtacaagcagcaacgcaccagattcttcaggatcactagatgcacagtcagctaatttcccaggaagtgaagaagatttcaatacactttttgtcctcactaactctctagctctcttagctgccaatgcagcctgcaagagaaacatatgccatgcattgaattagaattacagtttttgaactcctgggaagggctttttcatccactgagaatagaataggaaatgtcctttcctacactgtcaatcagattcatgtcaaagtgcatatggcagactgtatcttaaggaagcaggataaaccatttaagttatcgtttataacagattatgtaccttgagagcattaagggactttgacagaatcgaatctaaaacatctggatgtaactctaagtactcagttaaattttcttgaacagattgttcaactattcttcggacttctggatttcccaacctcgtctgtgaaaagagaaaagaaacaagatttagccaatcatcagcacttaaaagacaaaagttatcgaatcattcttctggcacatttgtctgtatcaggagcaagctgttacctttgtttgcccttcaaactctggattagggaccttcactgcaataatgcaggtcattccctctcttacatgctccccactcaagctaatatctttatcctataaaaagcattatatgttaagataaatcccactaaaaaaattaccaatacagttaattaaaaataccatttgatcagatgaataagtatgctaaaaacatagtaataaatagaattttccaaaatatggatccaaattccttactttaaacatttcaacattgtggtcttttagtgggaaggacagaacaaaattaatatgtaacttatcaccttaagagtcttcgacttctttgcgaagttattgattgttcttgtcaatgaagtcttcagcccatcaatatgagtaccaccatcaatagtacggatactgttagcatatcctagcaccgtatcagagtatgaatcagagcacctgtaaatagcaaacattttctgtttcagaataaggcacaaaacttctatctagctgctattcagtaagacctagaaggaggaaaatgaagagatagtgaaaaaggaacagaacataacaacatcacatgacctttgaatctggactgtgggccatcatttatgaaatttacaaagtttcttgacttcttgtatggttatgactaaaggtactgcacaggcagaaatcatttgtaaaatgatcaataccatttaattccctttgccaactgatggataaaatttcaacagtttgaacagtgtgaaacttccacacataataattcgaagggcgtcaattaacttataaagtacatattgattttgatcacaaaaaaggactatttatgtaccactgcatttatagcccttcaatactttgaagttattctaagcacattttttttcaaaagtttaggctaatttctaaaaaatatagcaatccagtagtttgtcataagctgtgatttttttttatcatccagaaattgaccattttgatgctacctaagatcattcattttagaacatgtagtggtactttggtagaaaacacaatcaaaaactttgaaatcaaggatctgatttataaaatagacaagacagccaacaaaagtatcaacatgttcaaccaaatcaagataaactgccactaccagctagcagatgaccaaacagaccatggaggacatgatattaggactttttatttctttttctttcaaaaattcaagccaaggaagtacattttaccattgaagggaaacatccactgttattccatccatttcttttctgaatgcgattggatcatgaagggatttctaggaaagaaaacatgaccaagcaaagtattagggttgctgctggataacattataaatgcatcatgtattgctatgtgcagaagtaggactcatcactcatatagtcatatctggtggcatattaataatagtatacgttacattattactctaaaatttaaggtagattaatgtaagtttcttcaaaggaataataaagaaattcacatgacaggaaaatataaccaaaataaatatagatccttcaacattttaaaatatcgtaaacataaggcaagtgtagattcagcctataagcatactgtctaattcaactctgtgaattttgtccaaagaataaagcaaacatagcatatatttcttcatttcattaccgtattagcatcagtatgacaggagttggttaggtatgcaagtttgctcacttgtgtgcccattaacccacatggtcacaccattcaactaaaagtgttttttatattgcatataaaattataaaccaaatagaatagcatggacgggtacccgactacccgtgggtcaatccacttgcatccttagcgttgattggtttatgtaaaattttagctcggatccaaggattaccatcagtaaatgttaactacaatgtgtatttctctttttagttggttgtcgaaacaaagatagaaagaagtaaagctagccctgatatttttaatgagtcatttgaaaggatcaaataagtcaattcgtaacaacaggtactactatgttaggagccattcaagtagcagatatgaaccattttctatgttgaaaaagtgccgaaatggagctgcatgaacatgtttccaatggtacaggtcaaaccttgtcagtattcaaccatttaacatactcaaccagaccaccagcataacagtattcattgtgttgaacctgtaagtcatcttcttcctttgtcaatgctattgtcagctggcattgagagaataatatgaaattagacattggcctactttaagaatatcaaatattactggtgaggtaagttgtgcatacaaattaacattaaaaaagaggcataaggatgttcaaacaaaactgccaaagtggcaactttccagaattttgaatgaacatatagggatttcacggaggaaaaagttccaagtaaaacttgacctaagttaaaggtgaccgtaacagcaccaataaatgaatgtgacaattcaggtttccatcatagcatttttttcaagtacattgattcctaaacttggttttgttacttttatcatcaatatctatgggtgctctccacaaatataaacaatcatagctgttgtggactcccatattacatatatcagataaataagcgttggcattaaattagagtacatggagagaagaacaaactatatataacatgatttgtcttgattgtgaataagtatacaaaatgaattgcatccttcaatgatgaaaagataataacttgtatgttttttctactgattgaaaaaaaacaggattaaacatattcccatggtgtgtcactaggaatcctagctcccaagtgtgtggcctggttttaagccatgggtagagcaatggttaaaagtaacttcttagaatatcaaataatccaacagagcaatcatgattcaagcattagctgaccgataaacaaataaaggaaataatgattgttcaatgatatcttcgagaactagcaacaggaaatataaaacaatacaatttatacctcaggatttagaaaggcaagttcccggatgcgaccagctatcgtattgaagtcaaagtccattgtggtggtaaaaactacatcaagaacaataattacacattggggaacataagtagtaatggtacagctaaaaaaatatgtaaagacagaagcatactatgtttatcaggccaaaatctgatccgtgtgccttgacgagaacttgattcatcagacaatgtcctactagttagcatcgtgatagcttttccacgtgagtaattttgtcggtattcttttccatcacgccaaacagtaacttctagtgcctgtcattataatatcacaacaaaacaaattatcaatgtaagctcatgagtaatatgtattgtttttgtcttgagactggaaggttggaaggttcttaaacttagtgcagagtagccagtatacgtaaagataaagccacatgaccagatttgtattttaaaccaaaacctgacaaaaatgacttcgtgtagagactagaaagagtttttctgtctgaatcatgattgttgaacttttatcaagagatgctttcattttcttaagaaatcttagaataataagtaaataaaggtgaaagcaagaacctctgacaaagcattaacaactgataggccaacaccatgcagccctccagaaacagtgtagccactctttgaacctccaaatttgccaccagcgtgcattaactgcatggttaaaaaattagattgattggcatccaacatgttgaacactgggtatgccaaatggataaacaatgtcgcacatatttgttttttagaaggtaatgaattaacaggtctgcacagaaaatgaacatcacaacacatgtattgaagtctggatatgcacatagcaacagcacacaaacaggccttaggattaaggtgtggactctgacacctaaatataaccatgagatagcatgtcatatttcatgctccctccctagaaaatgaaatgccccatgggtttacttatttgggaaaaagacggttgaaaaatagaaaaaaataatacagttgattgaatctaaaaggagtataacaaaaaagaaattaacagtaccgttaagacggtttccacgcaagatttcttcgtctgagggtgtatatctgtagggatctgcagtatgcgtaggtttaaacagtaattaaataaacaattgacagatgatccacaaagagttacaagtgaaagatgctgcaagtaaatagtcaaaaagtgtgataagcaaattataaaaacttccaggaagcaaatgtaaaactacaaaatttcaaacaaacgatgacattaatagtctagcatagttattcaatcaacaaactatgcaaaatggactcgaactgcatagtatcaagaaacatgttctgcttcccaccaagtcatccctccatccacaaatataagggattctgtatctttgtttacgtatctggacaagtatttgtccagatatatagccaaaatcccttatatttgtgaatggagggagtacttggtacatcagaatgtgttagcagcataaatttaacctttcgtgtaactatgatatatagtaatgtagaaaagcttcctccatgtttgttcacttcttcttaatgtgggattactcaatacaacagtaactaaatactgtagctgaaacatgagtgttcatcattaacacaaggtcgtcaaaatttccccaaaaaatgcattggccatacaggaagtacatcttgataaggttttaggaactacataccccacgaccattgtctgttacactaactgaattgtcgccatgaaggataacatcaaccttagtggcgtagcctgcttgagcttcatccacggcattatccaatatttcataaacctgtgatacaccattcagacgaatgatcagaaaagaacaatatggaatactttgtaccacagaaaaaaaacagtagcctaatctgcattcaatataccagatgatgcaaccctcgtgatcctgtgcttccaatgtacataccaggccttgtgcgaactccatccaatgcttctaagacctacaaaattagcagttcagcatgcaaccaaaataaagctaaaaagtacagcttgtgtttgaaaagatgatggtgtcagataggagaaatcttgaacaaagctgtgaaggtatacaatgttatatttatttgctttcaaaaaagataattgaattttaatactaagctgagttcataagtccaatgactacgctgttgagctaatgactaatttattgttggcttctgacgtctggatacagtgtataataaagtcctttggaaaatgaattagatgtaaagagcattttctagacaaattttcaaggacataaatactaactttaggttgtaacaaacttaaacagtaacaatcttatcccctcttacgctccatgaaccaccatcgaagtatggaatccacagtatgtgaccatggaagtatggaatccacaatatgtgctaaagaagatagaacatttgcatggcatataaaattgtatatattgcatgttatttgggtaaacagctcacaaagtcagataatctagtatcataagagttaaatatcaacgaaataagaatactccatgagaaaaaaaaacagctaatcgtcatgttaacagaaatcgtaagatgaggaaatcttccccttaaacaatgagcatga

SEQ ID NO: 23704 - DNA, 19642 bp, Oryza sativa
ccccttaaacaatgagcatttgattgcaccagattgatttgtaaaaataaactacatgttgaattaataaaagttatgaaaaaaatgcatatgtttgcaaggctaattggacaataaatttaactaccacttacatataactacagaatgagacggatgcttgcactagcaagtccttgcctccttcccacccaatctcatctctttgaatgctatgtacatccatttaaaatcccgggaaaatacactgattcgttggccccctaaatatcaaccttagctcttagccacagaagcccccatcgtgcaagagaagcgcacgagagcgaatcacctggacgttcgcagcggtgtactccccggccacccgcttctcctgcatcgcctcggaagccgccgtggatgccatgaaagccctcaccgcgaccccattccgccgcagaggagcacccgccgcagcagccgcaaccgcaaccctagagagagagaaaaccccaacgttaccaaaattaacagcccagaataatacccccattgaagagagagaaccccccaacccgaaaggcgcgcacgtctggattcccttacctgggcctgacgaggaggcgggcggaggaggaggcggggagcgggaggaggcgggagggccgaccggcggcggtggagaggaggcggcggaggaggaggcgcaggtggcgcggtggcggcgacgaccggaggaggggccccatcggcggcgggcggcgcgcttcgacgtgcgtgcgtgcgtggccggcctctcgctgccgctcgcttttgctgccgctgttgtggtgagggtgaaacgggagggggaggggaggggacgctggggtttaggcggagccgcgtcgcggaggcaggcaaagagtggatgaggcgaggaggtcgagggttttagacgagcgggccgggcttccggatttccgtcggggcgggcagtgcggggaaattggaaaaaagtccacatggactccctccaatatacgccgtgtttattccaaagttgttcctcaaacctccaacttttccatcacatcaaaactttcctacacacacaaactttcaacttttccatcacatcattccaatttcaacctaacttccaattttggtgtgaactaaacacagccatagtcaaatctaatttataagaaggacctgactacacagctagtggtagctggtttgtctaaaccagctaccactccatatatgatagacactatccaactatacttcaaatataattttctctaaaactgcttatccgatctacgatctgattacaccgttgtgttcgtaacaattaaatctttataacaagatatcacatgattatattttgatgaaaaaatataaattaattttataatatatctaaattacttttagatttcactaagttactttttagacatataaaagtaattcaataaagcctaaaagtaatttacatatactatagaagtaacttataacaaaaagaaagtaacttctataatatatgttaattactttaaaactttcttgaatttacttttatatgtttaagaagtaacttagtgaaatctaaaagtaatttagatatattataaaagtaatttgtgattttttatcaaaatataatcatgtgagatcttgttgtaaagatttaattgttatgaacacagcggtgtaatcggatcgtagatcggatgagtaatttaagagaaaattgtatttgaagcatagatggtaggaatattttttctacttgcttgatcaattagtactatagtaaagtaagattcttcaacacacatatgacaatggctgattgtatctggacaatggctagcgttgctcgttatgactaaattgagagcgctctcgatttagattttacgttataagaagtatctctcaacctaaaaccagatataatatctcttccaactattaaaacggcgcaaataaacttccttgactgctttgaaggtggttttcgctgtcgtggcgtccacgtagtattccaatcatcacataaattaaaaaatagacgtacctgaaaatggtctaaagaagcccattattgcttattattgtaggcctgttaaagactgaaaaaatgtttgtgcacctcttgtgaggtaaatcagcggtaaatagtttgttcgggggtttgtgatggcataccattttggttgtaggttaaaccacatctgcgaagagacatctcactcgagagcctaaaaagaaatatggccatatgggtgtattatataattatggcgcttatgttttttttccatgctcttttctaaatttactcctgaattgatgtgcaagttgttaaagggccaatttgcctagtaccatcacaaaaaacacggagttagaaaataccatcgtatgtgtaattgacatgtgggtctaggcctcacatgtcattatcacgtatgattatattttacaactcacatacctttgcgatggtacttcccaaattttcccattgttatctcagcaaccattgtcgtggaagttcatccattagatcttaccaccaacatgtacagacgcatctcaacgtgtgtccttttctatcataaaggcatctgatttcaagattcaggatttagtattgacctaccaaatgaggaggtaaaaaaaaagaattgctactccatcttatattactttacttaaacaccgtgggattgctgaagaattagcgcgccacgtcaacgacgtttttgcaaaatggtcctcgaatttccagttaattacgcgccagtctctgctaccccaccgtccgatctcacgttgcgattgatctggccatacacgtgtcccgccatggcggccctttcacaccagtgggatcgtcgaatcgcgaacagacggtagagatttcgctagcccacaccaaaccatagccctcttgctcgctcgcttgcagcctctcacgcgcgccgcctctcccttctcctcccctcgcgtgcgccgccgctgccggtgtagcccgcgctcttctagccatcgtcgccgcgtggacgagagggacgcaagccgccactgccctcttctcccttttcatcccagctatccccgccaggtcgacgaactctctcttcgacgggttcacattacactattataggcgctaacatgtgtgacaataaaaagaatgggacccacataccaatgactataataataatggtattatggtagagggtcatcatccgtctttgacacccgcaagcaatgtccatgcgaaatcacatccttgcttacaaatcaccaactacgtgccaaccataacgcgtcacacggataccataacgcgtcacacggattacaaaactgtgaatatacacatcatcagaacaaatgaaatcgaagaaattccatgcgtgcgaaccaggtaaacttggttttttgactcaaacctatcatgcttgcatggatagtgcaggttgtggtttgtgtgctcacgcaaaacatttacggttttacctgtcaatacggttcggctcatggaatgtgtgtgcccaatcgaccaaccgtatttggtgacatgagcaagtgggagcgaccaactgaacgtgtcaccagctcgatcataacttgtaacctgcccagcgcatttgatcatttccaaggacgactggggcccaaccaaaggcacatgagagtaggtacaatagcagactattacctctgctattagccagttataaacatattttaataagataacgataagagataaaagcagcggactttaagggcaagtactatgagccctttatcactaattctaagatgccatgtagagtcatatgatgatgtggaggagagaaaagaagagagaggagagcagccacccctcatgcaagaggcaacctccacaccaatttcaagaaataagagagaaagagagaagttgtttggtagtaaatgtattgggtgtagtataggtagatgcaatctattgtatgtattacctctaaattaatatgtagatgatttggataaaattagatgtgaccactacctctatcataaaacttgccctaaatctattgacagctgcagcacagactctaagaacgcaatgtgtgtataacaggtgggaccatatattaatagtatagtaagcaactactgtatgaattggctattagattggttatatgtaaattagagctagtagtgggctataccattaaacttgctctaataacttgcattcaagactccaacgaaaaaatggtagccaacaaactgttttttccttccaaaatttagtgtcgtgtagcatataaatctgcaaatatataactagattttttttgaggagcttcttatcaatggtatctatatatatcatgtaaaaactttatattcaattaatatatttaccatttcttttgctaacatagagtaatcgaggaaaaaaagcagtggcgggcaaaatcaactccaaaataaactttgatgaccgctgcgggattgatggcggcgcgaagagaggagatcggcgaggcaatggcgggtgatggggaggagaaggacatgaaggcggtggggagaaggaggacacgacggtgtttggtgaggaggaggacaacgcggaggcggtggggaggaggcgatgcagcagcggtgagtgcgaaggaggacgacgcggaagcgatggggaggaggcaatgcagtagcgttgggtgggaggaggagaacgcggcagcggtggcaggtcaaggagattcggcggcgcggggagtggcgggaaggggatcgagagcggtagtagtgagtagcacgggcgaagtcttcgcgcggtgatgggagcgaaaatcacggtggagataggatggagttgctgtgcgagggtgaatcgcagtgtacggtagggatgagagcgatgcggatgagatgcagatggatggtaggatcaacatgttgatttagcctgtatgattgcaaagagataactcttttttttattagtaaatatttaaatggttatttagtaattaattatcattcttaggcatcagcggagccatatgtgttggaaatttggtcataattcggcatattttaatccaaaataacaagataataaacatgatatttacaataggatttgatccagtgatagtgttgaatgtaatcaacatgagcatgcttaacgttgaataagcatcaacaatcacataatgacacaatgttgacattgcgatgaacattaacagtaaaacttctaattgaaataatgtaataaggttataccccaagaatggtcctccgctggagtttgaggcagtattgcctccgttggtgttgacgggagtctccttctccttgtctccagtgttcgacatgttggtgaagatgaagtagatgttgacgaacagtgagtagtcgcgccttgcgctccccaaaaacctgatcgcccgcccgtctgtgcaaacgtcgcagcaacgcgtggtttcggaggcctactctcccaacgcgtgtgcacacactcgtcgggatgggattaccgtagcaacaacagctttggaaaatggatgaaagtgtgtcttctttttctcgcgggagatcaaatccattcccattttataagaggaatggaagatgaagagtaagagtcatggaataggaagaggaatggagcaactaattgtcatcaactagccatgaaccatcctccactacacaaccatcaaccaacaatcaattaagagtaattgatgtaagttaccaatggaataggaagaggaatagagcaactaaatgtcatcaactagccatgaaccatcctccactacacaaccatcaaccatccatcaattaggactaattgatataagttaccaattccttaatcaaatggattaattctcaaaactcttcatcccattgatatcccatagaagaatgaattcacatgaattcctagcataatgagccttggaatttatttgatttaattgatttaaatggattaattacccaattaaatctaacaatccccaccaaattttcaaggctcatgagaatgctctctattccatagcagcttttatataccagtgtttcggtgaagactgttaagttgaactttcacctagaaaaggagctacacctgaccacaactgaacaatggactatgccttgaattgtcagtcttgtgcagttaggtttcactcaattccataactgatactaggcaaccattagtattccctcgggttggagcttataagtcatactccaggcctttcatgagtatctagagatcacccaaatctcatagaagcagtcgaactcatataggtgtgttccttctaagatgttctgcaggtcaacatttctgcttggaaaagccactcggatcacattaagacataagccatcctaccatgcaggaaagaagaaaagcacatcatgaaaatgagcccttttcaagggtctcttctctcagtcacacaatagtttgtttcaccatccaaattcacgggatctccgatcataatggacaggtttccactattatgcaaccttaggtgggtatcaagcccatttccctcgatgcactgtctatcacattacgtggtagccccttggtaaactgatctgccagatttctagccgtttggacatagtccaatgctatcactccggagtttttctgctttctgacagatttcagtcttctcttgatgtgtctagatgacttcatgttgtcctttgaactgttcactttaataatcactgtttgattatcgcagttcattaggatagctggcactggtttttcaaccaccggcaaatccatcaggagttcacgaagccactcggcctcaactgtcgcagtatctagtgctgtaagttctgcttccattgttgacctcgttaagatggtctgcttgcaagacttccaggaaacagcgccacctccaagtgtgaacacatatccacttgtggcttttatctcatcagcatcagatatccagtttgagtcactatacccttctagtacttttggatacccggtatagtgaattccatagctcatagtaccctttagatagcgcattactctttccagagcctgccaatgatcatctcccggatttgagacaaaccggctcagcttgcttacagcaaatgagatgtcaggcctcgttgcgctagccaagtacatcaatgaaccaatgatttgagagtatctcagctgatcccttgctattcttcggtttttccttaatagcacgctgggatcataaggagtaggagctggcttgcagtcactatatccaaagcgactcaaaaccttgtccacatagtgggattgcacaagtgtaatcccaccctcatctcctctttgtagtttgatgttaagaataacatcagcctctcccaaatctttcatttcaaaactcttggacagatagtctttgacctcctcaatcacattaaggctggtcccaaagatcagtatgtcatcgacatataagcacaagatcaccccttctcccccaccatagcgatagtatacacatttgtcagcttcgttcacaacaaagcctgcagatgtaagcgtggtgtcaaacttcttatgccattgcttaggtgcttgcttgaggccatacaaggatttcaatagtttacacaccattccctcctgaccttctagtacatacccgtctggttgatccatatagatctcctcctccagctctccgtttaggaaagctgtcttaacgtccatctgatggacgagaagaccatgagaggctgccagagcaagtagtactcgaatcgtggtcaagcgagcaactggtgagtatgtgtcgaagaagtcctcgccttccttttgggtataacccttggccacaagccttgccttgtacttttcgattgtaccatcaggcctaagctttttcttgaaaacccatttgcatcctacgggcttgcacccatatggacgctcaacgacttcccaagtaccattagacataatcgagtccatttcactgcgtactgcttccttccagtagtcagcgtcaggagatgaatatgcctcttctatggttcttggggtgtcatccacgaggtatacaatgtagtcatctccaaaggattttgcaaccctttgtctcttactcttgcgagtatctacaatgttgtcctcctcaggattttcctcaggcgtttgatcattgtgttctatcggtgcaaagtactcatggggcatgacagtttctttactagaagtgctaggtgtatatttcataggaaattcattctcaaagaatgtagcatctctggactcaagaattgtaccaacatgcatgtcgggtactccagagtttactattaagaatctataacccacactgtggatagcataaccaagaaacacacaatcaacagtttttggtccaagtttccgctttttggctataggtacatttaccttggccaaacagccccatgttcgtaggtatgagagatttaatttcttcctttcccattcctcgaatggtgttacttccttatgcttcattggaattttattcaggacatgacacgcagtcaaaactgcctcaccccaccattccttggaaagccccgcagtgtctaacatggcattcaccatctcagttagagtacggttctttctttcggccaccccatttgattggggtgaatagggaggcgtcatctcatgaataattccaaactcttcgcaaaaggatgcaaactcattggaaaaatactccccacctctatcagacctcaaccgtttgattttcctttcaagttggttttctacctcagctttatagattttaaagaaatgcaatgcctcatcctttgttttcaatagatacacatagcaaaatctagtgcaatcatctatcagtgtcatgaaatatttctttccccctttagtcaacacgccgttcatttcgcacaaatcggaatgaacaagttctagaggtgccaaattccttgcctcagatgccttgtgaggcttgcgaggttgtttcgattgaacacaagtatggcacttggaaccttttaccaaagtgaattttggaattaaactcatgttagctaagcgcgtcatacaaccgaaattcacatgacagagtcgcgaatgccacacattagactcatcattctcgctaatatggttcacagcattatgattattacacatgtcattcaaagaaaagcggaacaagcctccgctgtcataaccttttccaacaaaagtctcatatttagatacgacacatttattggactcaaacacaagtctaaaatcttctctacacaatagagagccgctaactagattcttctttattgaagggacatgctgcacgttcttcagctgcacggtctttcccgaagtaaacttcagatcgaccgtaccaacaccatgaacagccgcaagcgacccgtttcccatcaacaaggaggaacctctcccgacctgataagaagaaaatagagaaatgtcagcacatacatgaatattagcaccagtgtccacccaccaatcaggtgaatgaaaaacagagagaactgtaggtaatattttaccgtaccccgatgttcctccgccctcgctaatgatcatgttggcagacttcctgtctttgcgctcaggacagtccttggcccaatgcccagacttgccacacacaaagcagtctccatttgcctttcccttgcttttcttcttaaaattggttgcagccttgggtttgacatcaggcttgactttcttgttgttgtgggatgcatgagggttcttcttctgtaccatattggcactagaacctccctcaacctttttgccccggacgtcctttgccctcgccttctcctcaacacccaaagagccaatgagatcaagaacactgaactcttgtctcttgtgctttagagaagtggcaaagtccgaccaagaaggtggtagtttggcaataatgccacctgccacaaacttgtccggcaactcacagttgttgttctcaagttccttagccagcatctgaatctcatgagcttgttcaactacagaacggtcatcgaccatcttgtagtcatagaactgctccataacatacagctcactgccggcgtcagaaactccgaacttggcctcaagtgcatcccacatgtccttcccagaaggcatgtgcatgtacacgtccactatgttgtcagcgagtacactgatcaatgctccacggaacaggcaatccgaagcctcgaacttagcctcttcctcaggagaaagaggtggttcacttcgtttgccccgtgaaacatagaagcactgcatcgctgtcaactacaatagtgcacgtgctttccatctcttatagtttgaaccatcaaaggcatgtggtttcagtgcagcagcaaagccaactaccgaaaatgacttatcaggtttttggattgttggaaatttggtcataattcggcatattttaatccaaaataacaagataataaacatgatatttacaataggatttgatccagtgatagtgttgaatgtaatcaacatgagcatgcttaacgttgaataagcatcaacaatcacataatgacacaatgttgacattgcgatgaacattaacagtaaaacttctaattgaaataatgtaataaggttataccccaagaatggtcctccgctggagtttgaggcagtattgcctccgttggtgttgacgggagtctccttctccttgtctccagtgttcgacatgttggtgaagatgaagtagatgttgacgaacagtgagtagtcgcgccttgcgctccccaaaaacctgatcgcccgcccgtctgtgcaaacgtcgcagcaacgcgtggtttcggaggcctactctcccaacgcgtgtgcacacactcgtcgggatgggattaccgtagcaacaacagctttggaaaatggatgaaagtgtgtcttctttttctcgcgggagatcaaatccattcccattttataagaggaatggaagatgaagagtaagagtcatggaataggaagaggaatggagcaactaattgtcatcaactagccatgaaccatcctccactacacaaccatcaaccaacaatcaattaagagtaattgatgtaagttaccaatggaataggaagaggaatagagcaactaaatgtcatcaactagccatgaaccatcctccactacacaaccatcaaccatccatcaattaggactaattgacataagttaccaattccttaatcaaatggattaattctcaaaactcttcatcccattgatatcccatagaagaatgaattcacatgaattcctagcataatgagccttgaaatttatttgatttaattgatttaaatggattaattacccaattaaatctaacaatatgcacatatgcatgtggtcagaggagtaggtgacagtagcagcagcagcgtacagtaatattaacgaacatgcttaagggcaactctaagagagtaagcagccatctacttacatgttattttcatatcattaaaggtgatataaaaattaatccggttgtgtttaggcacttgatcaaatttttttaagtatactgacacatatttaaagtattaaacgtaaactaataataaaataaattatagattccgcctgtaaactacgagacgaatttattacacctaattaatccgttattagcaaatgtttactgtagcatcacattgtcaaatcatgacgtaattaggctcaaaaaattcatcccgcaatttacatacaaactgtacaattgattttttcgtccatatttcgatgtgatgtttttagaaaaaaaataaatctaaacacggccctagtcattatttttttctcaatgtgggcaagccttggttctctctcctaggctatctaccaaccacttatgctctttcgatgtgggcccaccttaattatctctcaccaaatcttttaaccaatcacagcttccatcgcaggtacattgtgtccaggcacccgtccgaagctgtcatcaatttagagcgagtacgatagcaaggctacgagtcagctgcgagttcacgcggagaagataatagaagatagagaagggaagcaaagtataaatttatagctagctgtagtatacactctaatatattatgtgtataaaagatgagactatatattagtgatgtagtatatatttatagataactattatgtgaatgaactattatattagctatagatgaattggagataatagttagctatactattaaacttgcttttagtcgaccgcttctctctccactccctcttccttccagcaatgaaaaagagctgatattagcagctaatagtaggtataatttccttattacacttgccctgcttaaccaaaattagcaaaccaaagtgacatactaactcttagtgccatcattttttttctttgcatgatagtacaagcactataatttcgtgtactgtttttcctcaacctaaattagaacatgccgtttgttaattttactcgagtttatggtaagtgatatacggatttatacaaatatatgtgtacttctatttgttgttagctttgtccaggctcaagaaaaaatttggatctgccgctgaggttgttctattttaggacagaaagtattaatgcagataataaacagtactgcgtaccaggggtactgcgttcaatcaataattgaaggatcagatcgtgcgctaccgtaaatctaggccttgtttagatccgcatgataataattagccctccgaaatcttgttatttaggaatatttaataaagtctatgtaaaaactatttgcagaacccttgggctaattcacaaggtgaatgtagcaaggtgtattaatccacgattagcggatgattattgtagtatcaatgaagtgaaacatagattaattaggtttattagattcatcaagcaaattagactagaggttatggaatgagttttatcagtaatctacgtttaatactactaaatagcaatattttggagagctaattattagagcatcaccaacggtctacctatatgattcccaaaactaattttgagcgattttagtccaaaaatcagctccaacagatcccctactctcctacccgagttttggagttcccttcccccggttcctcactccatttatatgcgggcacgaaagtcgctcccaatccgcaatcctgcctctctcctttgttcccgcgcgtgggagatagcgatatttctacgcgtgaaagaaaaaaacggaattttctcttggtagttttacagacgggcccacttttaagtttgggggattgaatttaggctatctgttggagggaggaattttttcacttcctattttcagtttaggaaacccaaaaataaatttttaggagaaaattatagataatctgttgatgatgctattagccctctggatgcaaacaagaccctggtacaatactaaaacagtacactacattagtccgaccctgtagctacagtacggtactgtttatgcatgcattcacagaagatcgatcctgtgcatcagtactccctccgtcccataaaaaactaagctagtaacatattttagtactacgaatctggacatatctctgtttagatttactccatccgttctaaaaaacactacgaatttagacatacctctgtttagatttactccctccgttccaaaatatagggcatacctactttttaaagtggtttcataatataaggtgtgcatgcatacatgtaattaattagcacattctctcccctaaatattattattttaaatcctatactcacatgatcattaattctattggttgcatgtattgtattaattggggtgattcatgacaacgatgagatattaattatttattggtttttattgtattaattggggtgattcatgacaacgatgagatattaattatttattggtttttagattaaaagtggttgtggcttatattttagaatggatgaagtagtgtactcggaaatgttatatccggtcgtagcttctttttttttttatatggagggagtagtaaaaatttaggcaaccgtgaaccgttcccgacttttccgttgcgcgagacgatgcaaaggagaacacggcagctagcagcatctcaacaagaagaaggaaaaaacgcgcggctcgcgccgcggggcatgagggtgcggatgcgaattaagccgcacttgaccacgacgccacgaccactctccatcgatcgcgtcctccttacattactccgcccgctgcggcgaggattccctcgatccagggggggggggtggtgaagagctagagctggcggcgggttgttgaggagcggctgactgaggggagaccagaccaatggttggcggcggggcgggcgagccgctgaggagggcgtgggggtaccaccccgagtgccccggatgcagggtggacaggaggaaggaggagagggaggggatcccctacacggagctctccctcatctggctcgtcaccgtctcctccagtgagtgttcatcggcctcgcgccgcctctcttccctgaccttgatcgacctgtagtagtgcttcgtcttttccgccgtctgtttctttttttttcttttttttttggaaattagtggaggataacgccgttctttccttcttcttcttctttgttttgaaattagtggatgatggtatcgctgtcgccaattcaatactttgaactttttctaagtcgaactaacattttcaatacaaaacaaatatattatcaaatatatttaatgttaaatttaataaaactaattttgatatcataaatattgctaattttttctataaaaaagctttaattaagaaaaaaagtcaaataaattataatataaaacggagggagtagtactatcgtagtgttatcattgtttcggttcgtactttgtagtacaagtagtacacatgcatgtgtatatcatggtgtaatggggattcaattagtatgggtttgtaggagcatctcgttgccccgagctttggcatgccacgatcatgctcaacgcagtagatttgctcggtgctctcgcgggtattctcagaatctccactgtcaaatgccactgcccactggggattggtgcaaaaccgcaaactttgaagagcaagtttaatagtatagctaactactggctacaaatcatctatagccaatctaatagtccattcatacaatagcatatactacactattaatgtatagccctaccttcatacgcacataacgtactgagtccgtgctagttggctacaaatctgtagcccgttttccttctctctcttcttccctctcctacacatatgcttacagttgctattctactcgctctaaattcaaaatcgaccaagcgaacttctattcgcacatcccgaattcgaaagacttttgacagaaggatagtgcacgtatggtacctgcacgtacacttaggaaatgtacttctcgttttctctaatcaaacactgaggcttactaaaatgttttctccatttgcctaatttgctcatcttgttaggccaggaaactgatttaaagaagattaactgcacatctgtgtcctatatcttgcgatctatatctttattgtttatcaggacctgatattatttgtccctttctttcttaatttgtctttctctgttgctctttgcagccctgccgatacaatccctgtttcccttcttgtattttatggtgagcaattttacttgcttttttttagaggtgcaatatgatgacattttgtttcatgagaagagaagagttactagcgtcactatcgattttacatttggacttaacagctgtgctggatctgtagtatgtaaaaggtaaaaataaaaattaatatgcactgtcacattgtaattatttcatatattgagccaaggaagaaccaaatagtaaatactataagagcaatgctacacgtactaaatttttcttactaaacttttactaacaatcatctcaaccgtttgatttaagtagatggaagttacaaaaattctaggtgcactcatagcatgacacatcagtgttagtaagaaaaagttagtacgtatagccttttccatactataaacctggacacatatcaccttcattgttgtagtaccaaaagagccataatctgacatcctctattacaatgatcggttaaatatttctccttaaatatgcgtcttagatattctatcgacattttgtttccttatttggtatagatttgtcggaaacataacttttgaacgtaaaacagctttgcaaatgctgaactgtgttctaaattaattctcttttatcaacattggagtttctgtttgcagataagggacctgcatattgctaaacaagaagaagatattggattttatgctggttttgtcggtgagttttctctgaaacatatttcctcttttgcgtcaatctgagtaagcacttaaaagtagcttctaaggatgtattatgaaagtgatagcctcagcaaggcagccttatctaacagggtgaacttgtgatatgtgaaggcgcttcatatatgtttggaagagcactctcctctgtgatatggggcatcgtggctgataagtacgggaggaagccgattattataattacccttatttcaatgtaaggatcttcgttgaatgaaacgtagaatccaatactctcatctataagcttttcgttggatctaatttgttaatgcacagagaatttgagcacattttctaatctattgcagaattattttcaatacactctttggactcagctcaagttattggatggcattaacctcaagaggtttgcttggtctgatgtgtggtatacttggcccaattaaggtacctgtgtccacatgagaatgcttcacttttgtctattaaaaccttcgaccatgttcttgcagcattattttctaatttctgtgttccaggcctatgctacagaagtgtgccgaaaagaacacggtcaccttggactatcccttgtaagatcttggaccattactatttcaaaattttcgttgtctcccaactttgttaggcccccaatgtaatgttcactggttgatattgctggctaatctgtcaggtttcttcctcacgtggcataggccttattgtgggaccagctattggtggttatcttgcacaggtaatattttattttaatatttgaagaaatcatgatgtaattaacttgtaactatgtcaagattattggcccttgtattccaatcatgactcttgctaaccatagtcgcaaatttcacaaattataatactttaatgcggtgtatctaaagtttggagttctcttgtcatatacattaataattatactcgtcatgcctcaaaaatttgtgaagaacatgaaaacacacatgttgattatattgctgcatcgaggataaagtgcgatagtttcatttttcttttattggcatgcaactctacttattttgcttgtgcctttctgttataccagcctgcagataaatatccaagcatattctctgagaagtctatatttgggaggtagcatctgctttctagatccatcttgtattggttgtttcttacactactaatttttaacgtgcaatgttttaggtttccgtattttctcccctgcttatgtatatccctccttgccattgttgctctacttgcttccttctggctcccggtgagcatttttcttatatccctatgatacaacatttcttttagcaaacatcattataataactgctttcattaaatatttgataattgataactctggtgaaatcccattttgacactggaatcatagttcttcatgatgatccataaattcatttagaatctgctgctcagttgcaattgcaacattagtattgatgtgtaccctgagaactttgcacaaaaaccttaatgtcactgcacaaaatttgacatttacgtcatgttacaggaaactttgcataagcacactcaggatatggttttagaggattcaatttctgtagaagaaggtctttctggtccaactgctgaagaaaatagtgctggatgtctaaatttattcacaaactggccactgatgtctgctatcattgcatactgcatattctctcttcaggatgtggcttatgctgaggtaatattctacagtgtcattggagttgccttttgttattatttagaatttcatgcatcttttttttaatgtcatatttgatttttgcaccacccctcctttttctgttattactggatttcatttgggaaaacacaaattgcaggtattttctctatgggctgtcagcgacaggaagtatggtggattaagcttttcttcccaagatgtgggtagtgtccttgcattctcaggtacagtaagcacaacaggaaacctcccactaatatggagttttgaatttacaggcagacttataagattgttcatcgagatttgaaattttgaacaccgtggacatgtggatgtgatagggatctaaagaaagcactagccccatgaccccacatgctatggctaatgcatatgataatgtaaaattgtaaattaccataataaatatataatatggatatagatcttttcttattgttaggtctagtttgatgtgatcaattgcactttctcaatttgaagtattaattcttgctaaaaccaaatcttaatctgaagtatggtatgaacttgcttaaaactcaattattcgtattccatgcaatgtctggtatattgagtactgacttaacttattatcaggtctcttcctcctggtattccaaattttggtttacccgtcagtggcaaaatcagtagagcccatcacgcttgtccgtatagtggcagtaagactatctctctttttttgggtcagaatttagatcagctcagttctactgtaacggttcaactcatatgatacttctgaattgcagatattgactataccacttctttctagctatccatttatggccggattgtcagggtccattcttcaattgatagttaactgtgcatcttttctgaagaatgcttttgcagtgagtgcaaacgtcttgtgttgtttagaatggatactcgtttggacaagcgactcgttgtttattcatttttttgaaacaattacttcaagtgtggtcctgtttattgtatatcactcttttatatttcacctctcgacacatccatattagttttgacaaaattcaactcatgctcttctaaaattttttcaggttactaccatcactgtattcaacatcttaatgaatgatgctgtggtaagttcttcaagttccaaataatgtgtaccgggtagttatataaaaaatatattctatttttcggttattatacgtggtaatttatagtttctaattttgtttttctaaccatgaaaatacaaataacaggctcaggacgtta

SEQ ID NO: 23705 - DNA, 7595 bp, Oryza sativa
  unsure (1)..(7595): unsure at all n locations
tgacatgtgggtccaagtcctagcctatatgttagtgggacgtcaataacaaataatggaccattgaaccacgtgaaattttcagtgtgaaataaggaatttccctagttttcttggacaaacaacagtgtccttacaatttcttagatagttatatttccttttggttaatcagtttaattacaatgacaatgaaacacaattttagttttttgtttgttgtgatcaactcccaatatttttgttttgccacatattattagtagtattaattcatcaagatatacagccaggattcacactttgcaaactgtgggtaccagctttttattatacatatatgttttttcaggagaaataccgcatcgtaatgctaattactcttttcccttatagatttgcatgggctcaaaggcgtcagacagcttcatttctcccaggtattacatgcatggtatattactagtgaattaacacgaagatacaactttgctatatcctatccctgttaataccaatgcaattagcactttatcagaattttcttaaaataatatatgggagagccaccttatcatgtcaataagttggaaagttatgataccagaatagaaagaatgcagttctgaatgttggcaatgaactcgccagatatcaacacctttagaacagataataactatgaatgtggtacatatataagaataagttatctaccattagttcttttaattatttttgcccctctcaatgccatgaatatctgaattgaatgatcaaactagagaaatttaagcttgcgtgtctgttttaagaataactagatattgtttgtctaaaactaatgggatagagtctcttaatgttaggtaccagcgaagttcatatcttcatttttgaagtaagatcgtaaatacagtaggttcttagttaaaaatttagagtaagatgtctcatctctgtcttttgcgatgttcatttgatatttaaaataggcaacatcgtagactaaaaaaagagtaaatttcacaaaactacaagtactttggctaaattattacaaaactacatatttaaggtgaaatatcgaaaaactacagatttagtaacagagttatcacaaaactacaggattaagataaatttaatcacaaaactttaacatcataactcaaacatagcattagtgcttaaggatttaaactctaaaatctgtagttttgtgatagttttattattaaatttgtagtttgcgatatttagccttaaacctgtagttttgtgatacattaacttaaatttgtagttttgtaataatttaatcaaagtatctatagttttatgaaatttactcagaaaaaaaatccagaaatatgctgatttcaggatcactattcactattaagcccgaccttaggatctcttctgataccccccttaatttcaactaagcttatgtatgcgtttgaaaagattaagccaggtgggttggcttgttgaaatgcaactacgaagaggatttcctaagcattgaaacgttgttgtatcccattgattcgttgtaaagctctaattctgttggcacctgctctctgtttttgcaggcgaccacctggtattcttcatgctgaacgtcttcacagtcatcggtcttgtgagcactttcaggccgttttacgctagaagaagcacgaagcacgatcccattactacttagcactaaccattctactcaggacctgaggtctgatgtagacccccatttttataacaggaatcactcgtgttaatagtaccatttccctggatcaagtagtctggtactcacgattacattgccgaaatatcaagtgcgcatacaaagatggtctagcgcgaattattacatcataggcccgcaggcagtcttagaacataggaccaaacggtctacaatacatgatgtaacagaaatagattaggcagcggaatataggcagcggcgacactattgccataggcaacgaccgtaaataagacctacgaagcgtcgttatcctccgcatcctcctgaagataagcatagggatcctcctcgacttcattgccatccactgattaaattttgcaatagcaagagtgagtaccaaccgtactcagcaagtcaccataacaacaatgcatatgatagtggtattcaaagtatggccattggtttatttgcataaagctagtttaaccattcttttcacaagcctattatctagcatagactagtccagttttaattccagtatttattacacagcagcggttatgttcactatccattgtcttcccaaagatggcttcccgttactggccgtaatggttttctggggtttactccttctcgtctctcgagaagttgatccgccagtacaaaatcatcatgcatatcccatcccaatcaatttaagaatttagagtctagccaagtgtaatacatgtcccggtgctcattatccgtgagcacggctattcgaatatatttggtttactcacactgcagtggatgtacactttaccctactccgcgacttgcccaacacatgagcctacgtcccaacgaatgagacttgccacggcaaagcctttcaataacctcacgttggcagtactcgctccatgaatttacatcttcatgcactctaggcatcataagtttctagtagtgagaggagttctggcgctcccgggaagggaagactcacacatgcattaagttttagttaagttaagtttacacatggtagtcctaccgatggcgacaccactgtaagcactcgcccctcgcggtcccatcaatggctgccccaccgtaggccctgcccccacacacatcaagaataaccactatgcagggatactgcctccgctcggctatgtactccgctaggtctatacacatgcgagaagtacggttgtatgagggtcgtttcatgcttaacttcatggctcagtccttaactgaccagggacggcactagccttttccggacaccacccaagtaccccagccgccctagtcgaaaacagtgtttaattttatttctcctttcacaattcatgtcatccttgtcatggcaatgtggcgctcatgtctccacatgccgcatctcaactaccttccctaaggtagttgcccaagcatgtagcacttgataaatatgagaatgcatgattctaattagcaggactaagcatttgtcaatattgactaagtacacacgataacagggtttacaagggtcatacagataatcaatatcaaggcatggcatatataacaagtggggcattcatattcgtatatatagcatgcaattttatttaaatcaacataattttcgcaatagtttcaacatgctcaaagattagtgatgacttgccttgatcgtagtcttgctgtccctgctcctcaatcgactcaacaattccctcggaatctaaatttacgtgcgaaagatcggatttgaattcaattaggattcaaataaattcaccaaaattcaaacagtacaaagcatattgagaaaatggtatcattagatagaccttgattttagatgaatttaggttcaagtttcattcaattccgagttaaaatgagtgagttatgagggtttaaagattcaaacttgaattaattcggaaaattgtgaaaaactactgttcctaatgatttatttttttgtccgaaacattatccaacacccacagtggctgacatgtgggccatcctcctatttcatttctggtttttttattttttttaaaggaaatcctgctgtgtcattgacaggtgggtccggccccctgttggtgaggtcaagccggacctttaacctttggtgggaccctcatgtcattgagacatttacttaaaaaccaatttaattagatttctaagcatccgggcctacatgtcataggttcacaataatatcattagtttgaggattactgtacactaatgaagtggggtccacatgtcataatctctccctctctcgttcttttctttctccccgtcgtcttcttccttccgctcgcgacggagcagaggagcggcgcgtgatgatgcgacggcccgagccggaacggctcggcgcacggtggggcgagcggtggcgcatcaccagagacccgccgccggcggcggcgaagcgcggcgatcgtccggcgcgcggcgcgacggcggtcgacggcgccgagatcccaaaatcggcggcggcacaatgaggaccaatgtgagcgtaaccaacgacgattcaaccatctagggtccacatggagcatatagaagcaaaaatctagcctaggttgtattggaacgaggtccctccatgatgagctcggccatggcgcggtggcggccggagtcggcacggttacggcggcgcacaccccaaatcgagggggccgctggcttctaggtgtccaggcaatactacaggcgcgagggcttacgacgaagtggcggaacggcggagtttgacggcgcgcggcgtggtgcaaccgaaacaggggcagacgacggtcggcgacgtttgcaggtgtttgacgctcgtcctccctcgcgtagcggctcctggctccttccaacagtagcaacagcaacgcgggcacctcctcaacacaccctgccacccacaccggccgagaggccctgcggcggcggcgcggcccccgcccaccaggtgttcgacacccggcggcggcgtgttttctttcctctgagatggagcaagagctttggggaagagagaaacagatgaggggttgatcttggataaagtcgagctaaaggcgagcttataacagcgagaggaagggcgatttcttaatggataaggataatcaatgactcggctttggttcgatctcacccaggttcggttcaatgtgcaggcgtggcatgattgcctacgcggtagtatgcaggagaggtatcgctagctggacaaaggggcaccgcattacccagcggtctcaaccgggggcgacaagatggcgacgcgacggcgacaagagcgacgacgacggatagagataacggcttggataggggcgcagggctatgccctagggtgacgcggggtcgtcgtggcggccgttatcactccatcccgagggcgacgcgcgaggggatgggatgacgcgggcacccgtggcggcgcagctttggcgcgggcttttggcggctcggtcggctgcgggcccacgcgacgtggcgcggcgcggtgcggcgcacgggcacgcctaatgcggcgcacgggtcgggacagcgggcgcgcggcaaggcagcggttggagggggcggcgtcgagcgttcagacgggttaggcacagatcgaacacctggcgcgcaatgaacagtagcaacccgagaaaaatcacaattagggttttctaatgacaatttttatggaatttttgtttagcccactacccctatttccattatagatctacccacatcatatacttctaatttcatgatttattgaacccaagaattaaggattaatattattacccttgacctatattcctttattctcaactttatagcttctaacctttgtttttctataacctcatatttgatttattacaccctatgtcaataactaatattctatttgtattatgtttttcttatttcgccatattctggattttattatttgacttccatctcaacttacttatcttatattatttaatttaaacaatatatttgcaatagagaaacgaataacaccaacatgatgcaaaagttttaaaaagttcgaaattttagtgatttttattgcctatacctccgtagtaaagtgtatatttttctgtttgccacacaaccattctgatgtactgcaaaatatgcctcgatttttttttagatcagtacttcgatttggtacgatgatcttgtgctgttgtacacatcaaacttagcctgaaggcttgtcttgtatctgtatcttgtatttggacgctacggctcaaactgccatgtgccatgactgtccattcagctctgaaattccatcgactgtgagagtttttacactgtccttaacactgtaatccatcaatttgtttggtggtccttaatctgtaacggcttttgcttggcgcgatcttttgtgggctatgtgcatcttgtacagtgctaaatgtatctagcgttgcacttcctctggttacaaaatattcactactccccccgtttcacaatgtaagactttatagcattgtccacatacatctagatgttagatgttagtgaatgtaaacacgtacatatgtctagattcattaacatctaaatgaatgtgggcaatgctagaaagtcttatattatgaaacggaggaagtagtaatattttgaacgagatttagcaaaactcttgaaacttttagaaagacctattttaaagtgaagggtgttatttggatttttgtgatagtttggagtgtaaaatggagttactgtacatgttagattttataaacttattattcaaatataaaattgatggtcatttttaaaagcttaatcgaatttcatcctaataaacattaaatattaacaaccaaggaagtagcagcatcttcgtgacccctgaggatgttttcagacaggatggttttaatgaaatccatggatttcattttaagaagaaaatatcgggcagggcgtccgtattcaattttctttttactgcaataaccattacaaattcaaaccattttgtaatcatcaaaaaacaaaaattacttatagatgtaaaaaaatagtcatgaaaacaacccattcggattaagcccaatattacacctgtgctcgtatttatagctaattatttttttagtggtaggcaacatatatgtacacagcgagacgtctacagtgacttcgttgatctcaagataagcatgcctagtattttggagatgttcatagactcatagggtaggatatatttgcgcgttcatagaatgagtgtgcgcgttacgagcatatgcatttatatcgtgttctgttttttttacatgaaaacaggggtagagagtacgcatagcagtttgctctcaatgtcgtccggtcttacccttgcggtcgttttttccataaattttcctcccccgcttcccttctcttcccttttttcgctcctcctccactcgcgctccgcctctctctctctctccatcgatccaagcccccccccccccccccccagatccccctcgccgcctcgccaccgcgtcggccatggcggaccagctcaccgacgaccagatcgccgagttcaaggaggccttcagcctcttcgacaaggacggcgacggtatctcctgctccctccttccctctctctctgtaccttctgtttttgaactctgttatgctctgcgtgatccggtagcgcgtgcgtgtgcgctgatgcgatggcggtggagtggagtcggtttcgcggcctcgcgggtgcgcgagaaggtggggatccggtcgccgggggggggggggggggggcctnttccggcggggggggggggggggg

SEQ ID NO: 23706 - DNA, 2206 bp, Oryza sativa
  unsure (1)..(2206): unsure at all n locations
ttattgctgatattaatcagagtttccaacgggaggagagatttgtttttgtttcaaaagctaactgcagatcttatgattgagtaccaggtcgaaagtgtgagtttgccctttattatcctctcttttcccccgttcttgccttttactttttgaaaggttcatcgatagcaattttatttgtcttgtcaatttagtacgatcatgtacctgttgcagcctttgaaatataaaactccatcatctgtattaaattcaaaaaggagaggcaacttaagaaatccattattattgggatgtctagttttgtgagaacatatgggggaaaacgacagttaaagatttttctctgatctttcaaaattggattatatggatttttgtttgtccagaagagggggagaaatctaaaaaagaggattattcaacgaggaattcgtcaaaaattgcagttctgtcctgtcgactggatctttctgtgtggttctgagcctattgctttttcaacaaaacagataacttttcaatggtcaaacgtttctgattcctttaatcttaaacaaatcagaggaaataaatgccagattattattcaaatcaggtaagattattattcacgcaaaggtctggcttccaccgtgccaaacttcttttttgacaaaacaaaagagccaaaaaagttactatattagtttgtttacagtaagtggttcatacttcatactacatttatattacccatttttctctaattcacttacgcgctaaaaacagttctctcttttagtttgtaataatgtagtgtttatttccacacacaaacaccaaaatcgaccctcgntctattgagaatccgcgagtacaatttgctttcttgcaccaaattttgtcaattttgggtacacatttttgtcaattttgagccttcactaaatacaaattcgactagtggatttttttccaaccgattattcctttgaatgattatgcctaatgggcatttatcctcccctctctgcagaaggaaaagggaacaagaggaagagagcatcttagcagcaaaagtagatgcccattaggccattagcatatcatttcatgatgaccctttcagagaaaaaaaaattacacaattgatcaaacttttacagctttgacactgccagcacatccacctagctagattaagttcagacatctccatctttttctttccctctctctttgtgccactctatatcagaagatggacagagattcagatcaagaactgcatcaacctgtgcagcttttacacagtgtgcatgatgaattcagctccagggttccagcataatggtcatctcatggctaaagcaaagaatcccatctactactgttcaactgtagctcccatgctgcatgtgccagccttcgttaattttacctgaattccatgagctacccgtgccacaatctctcaactcggcttcctatctaacctgccctagttggcttctactagtctacaagataccatatcatatagccctactttgttaaatttcattaggatttttcagacttacgtggaagatagatacttactacaaagacaatggaatggatcaccatgagttagaagtcaaaatcctgaggcaatgagacctgaaaaattcagacattaggtattttctcccccttttacaccccatccctcgaaagcgacccatatttgcttgaggaagaagagatatgcacacaacaaaattggcacggattaatcttacaattgttgtgacaatagcattcatgttatgtagggaactaaaaataaataaacactagctaagctaaaacagtgaacccaccgaatcaatctttttcggaggaatgtcactttttgaacggtccagatcgagaaatcctgatcgtttcctcaagagttatatgatcattctctacaattggcatgcctctaaaatcagtaacaagaaacaaatcatgatttgaaaaatatcagtttatgtcaaaaatgtttttatttgaatttgatagacgaggatttgaacccgggtagttgggttgtgcttgtgcaccgctcccctctgacccggagtgctccgtgcactcgatcttgctcgtccgcaccctcctcctcctcacgtgcaggcgcgacgcggcccacgacacgacgcgcctgtacagcgtcccggcgaggccgtgc

SEQ ID NO: 23707 - DNA, 16387 bp, Oryza sativa
gccaccgccatcgccgccgcacacaagcctggccacgtagacgttgccatggctgcccttcccgacgaggttcttggctgcgaatccccccgtcgccgcctccacctcctcgaacgagaactccctcatggccgccgccgccgccgccgccgccggcgagcaagctctactctacacctcgatctcctcttggtgcaatgcaaatggtgtggtgcaatggcgaaatggaaggaggagagaagagcttggagcttaggagaaatggagagcaatgtaaagcagcagcagcagcaagtaggcaaaggaataaagagcaaaaaaggaggaggccaagaagaaaggcaaatgcatggatggatcatcaaaggtaaagttggtggctgcaattttcagagagagaaaggtaaaagaaactccaaactctagctagagagagagagttaaagaagaaactccaaattctagagagagaaaggtaggcagataaaatttaaaaaaaaagaaatttggataggtatatatagagagagaaacaaagaggtagtagtactagtagtatatagtattatgattatgtttttgcttggtctcctaaaagaagaaaatttgtcttctcaaggagaaagaaaggtactgtagaaaaacaaagttaaatcaacagaagcaaaaaatggcttacctgctgtctctttctttcttcctcaatctctattagtattatataattataattactgttgtttatactcttaagcagagaaaaaggcggcatatgcacacacacggtgcattggggttcggatcgatcgttggagtggttggagagagagagagagagagagagagagagagagagagagatgcaagatactcacggcaagcgaacaaatcggcaacagagaatgtcgatttgtcaggaggggaatgtggagtggtggactggttggggctggggtttcatccgttcctgtggacgcgtccgtcgtccttgcctgcttggacgccaacacctggccggactggggtaggattagttcttttttttttttcgttcggtagtactagttcccaactcatcctccccattttctacgcgcacgcttttcaaactgctaaattgtgtgttttttgcaaaaaatttctatacgaaagatgcttaaaaaatcatattaatttattttttttaaaaaaaatagctaaaacttaattaatcacgcactaaaacgttgcttcgttttatgtgccaaggagtgagggttgccccgaacagagttgtgtacaatgtggttgctgtgatatgctgggttttcaatagtggaaatttaaaatgagacttaataaattgtcacaaaatttctttaaaaagtttaaatataactacggtatatttatagcgtaattatactgtagctataatgtagttacaattaatcccttcacatgcgtagatccctcatgcacaaatctcgatacgatttgatggttacaattctttttttttttgggagggggattgggggaaaatcgtcgttttctttagcaattctcatataaatttgggctacaaagattgtaatgtgaaggtatttgcctatttgagataatgatagagaccaacggcaaatctctacccttgttgagttctatcgaaagttactgcaacaaaatatgtgggtaacattcgtggccacaagcattttgatcctcgtggatgaaatcatgccccttgaacataagctacgggtatatggtagcagtgttgtaattggtttcagagcatgcatgtgtgtgtgaaggttaaaaaaagaagtaaaagtcaatttatatgagaaacaaggccgatgtatcgctcttttgtttccaaagacatgttattaaatttaaaacttgcttgagaattcaaggcaacattttagatttagttttgggccaactacaaaaatgtaaatgtaaagagtataaggatttcattcatgttgtatgctgacagttggagacaacaattatgtacattttcatcaattttggatgaagatttagcaataggattactatttgaaaataaattgtacatccaaccttattgttggtgccttttttatataacgtggcgtctctttattttttgctagataatattatattttggttttaagctaagaatctcttctttatataaagctaatgctcactaaatatctaaagctcaacatgccagcatagtatttattagaactcctaaaacctacatgcaagcatattacatcaacccattaagcacacaaagctcgaatgcaaacatatactccctctgttttaggttataagacgttttgattttggttaaagttaaactgctttaaatttaaccaaatttaaccaagtatgtagaaaaaagtaataacattttcaaccaagacaaatttattatgaaaatatatttaattattgatttgattaaactaatttagtattataaatattaatatatttgcctataaacttagtcaaacttgaaacaatttgactttgaccaaagtgacaatgtcttataatctgaaacagagaaaatagtaattataattacaatttatttcattctgaaactaagtatacacatactaaatcatcattctcaaatcattttcataatatttcattctaaatcatttcatcatttctccaatatctaacatatattccgcagcaaagcgcgaagcatcatctagttttataataaatggctgtagtttctattaaagtgaaggactagatcgattcaatctattataaaagaaacttgcttgagaattgttttgtcgccataattagtctcttgctcctgcatatataccccctatctatgttcttggctttcatgctgtcatgcaccatgcatgtcggtgctctcatttgttcgtcgtcaaatcatcaaaccggttgaacatctcgatcatggcggcagtcgcgttgaagacgaccggccaaaagtttctctcctgccattgattttaattttcatcaccagcaagcaagaattaatgaaccctagctaataacacgcgtgcagaatatatatattgaccattaacgaatgagactatccattttagtggcccctgccatggcggcaaggaattacgaaatgatcaatcacctgattattatatttatcatatactacagatcatgtacctaacctaccttgaaaatagaacacttgtacatgcacttttcaccagatgacctataggtattaatttgttagtatagtatacagtatacaatgtgctacttaaactaagttgccagattaaactaattaaataccggtcgccggagaacgctgacacgagcaactcaaattattccgcggcatgtcttattgcgtgatgcgtagcagtacgtacagctggatatggatatgtacagtttgcttgttcagactgacgatcgatcgactagttatttgaattgccatagtgaagaaggttgttctccatatcaaaagggttttaatttgcactcgattgtgtgatgatcaggtttaccaaaccgtgtgtggttatcatgtacggtaacctttatgtttttgaaaccacggtatatctcgttatatgcgccaaaccggagcggtaatcccatatcaaacggtttggtaaacaccgatgatgctttgccttctcttcattgcttccacactccatccatcagcgagctgtagtagcatagaggaattgaccctcgaccattcgtatagttactccaaaacgtatatacgaattcgttgatactccaaaacgcatataatttttcatttgtgggtatatatatatatatatatatatatatatatatatatatatatatatatatatatggtgtttaggaaggagggactaaactttagtcgctctcataaaaattttagtccctatgggagggacttaatatttttgtgagagggactaagtctctcttttccaaacaccaccataattactcgcattctgttgacaatcaaatttggcactcgaaaaggtgccaacacgttcaacttttaatgtgcaaaagcacaactatatatacatgtgcgtgtgcttctaatgaaaattctttacaagtgtcaagagtgtaaatgtggtgtacgtgtagtacggtgtatttttttacaatgaaaataacatctggcctctgcatcaactaataatataataatgattagtttcatgtgtccgatgaatagtttaggagaaaaaaacatttacaatttgctaataaaactgttacatgcatgtaaagagagcagcaagagaaaaaaacgagagggcgcatgtgaatatagtaggcgaatgcaacataatgtgcgtggagcgtccaattatatgtgaaatcatgtgatgattaatttttaaagatgagtgtttgttgaaaataccatgtatagtgttttcggtcggtgaacaatgcggtcggcactgggagaccactcgttagaccgggttgaccgacgatcataccgacagactctaagggcacccgcaatggttatctataggctctctacaagagatccatgtcagcatattttcctacttggaagagattaaatgaagagagagagcaaagctatctactaacctggagatagtctatagagaaatacgaggcaatggattagagagctatagatacccatgtagacataccattgaagtggtttactattaatctagtctattgctgagatgtacatgttttacagatatcaccttactttaccattacgggtgctctaagagggagtcggtttcgggttgtttcgtgtaaattatagattgcttcattatataacttttagacggttttctattcatatgtgatactattgtatgctgatatgagtcaagttggtgcgaacttgcacttggatgtagagtttctttgttgttcatgtgcatgcgttgcttgaggcaatgagagtatagccaatgatggatcgagactaagcttgggaaaagttgaagttcagacgatcaaggatatcatgcaaggatgctcaggatagagaataatgtacgtggaagtgaatgttttcatatggaaagtggagtcaaattttaattggagtccaagtttgggaagattagagtatagagttgtatggggatgttatttccctagttattttgttggggtcctatatgattaggagtcctagttctagttggattcgtggctagggacaaccatgttttgagtataaatagtacaggggttgaggctagaagtatacatctatatcaactttttgggagagaaaaaaaataggtttcgcttcgacgcttgaattctagttcgtgagtttagagatgaatgctttagatgcactttatgagatgcaataaagttgatccatcttcaagagcatctttggtgtgtttttctctgaaccccgacggtttaattaaccaacggcataggagcggtcagactagcgggaagaccgatgggtggtaggcggtctaaccgatggcatcactgcggtctaaccggcggctagggttcggcctaactagcttttatctggaagtttgactggtgcatctccattagattcgagggtaacctttatttgcactaaaagttcgatttttggtgttcctaccattcactctttctctagtagacttgattacttgtgtttaatcatacattatactcttcctaggtaagggcatgctcgatctgaagcattctccatataatttttgtgcatcttaattagtgcagagggaccagaacgatacatacttccattaccttaaaagatatccgctgttagctagcttgtccagcggtacactggacagtacacacatccattgtgtttgatgtactcctaatttgtacagagaccgaaagtgatacttggaggtacttccattatcaaaaaatatatatcattgttagcttgcttgaccagggggcatgcacaaagctcggggctcgcaagcctgctcgagcacgactcattttataggctcgagctctagacgagccaagcctaaatgtgccaattctcgtgagctttgttgagtcgagctagagcttatgtcgagcctaattaacagtacataatatttttttattatttattttttaaactagtagatcaaataccatttatataaatgtatccatgcaatgaaataggttgttttggtgttgtatatttatcttatttctttttctcctcattcattaatatgattaaataaaagttagttatttttattgatagaatatgtagcactacttatgacctaaactcaattgtcgagttttagcatgtctagaagctcgaacggttacacagactcagctcgaacttttgtctagctcaagcctagagagatgagctagttcgagtttaagcaggtgagctcgatcgttcgagctcggcttattgatagccctagctctcacattgatttttttataaaagaaatggatgatgagcactccctctcctagacctaaggtgtggcacactggcaatggggttatcatcattaggccaagctagtgtgtgtcgttgctgcccggttacgagtcgacggggccaatgattctgtcttccactgtacgccgcgcgctacgctagctaaccttacctttggagcgcacgcgaccgagaggattgcacgccactagcggtcatcgagagatggagaggaaaaatattccttgcatttggcgcgcgcgtgtttgttgcgtatagcatgcagtgcgtcgttgtcatggaccgcgagcatacgaggggagtgcgtctacgtctacgacgcgtgcgggggtagctgccaaattagacaagccaacataataattagccaaacaaaacaaattaggccgtgtttagttgcaaagttttttttttcaaacttccaactttttcatcacattaaaactttcttacacacaaactttcaacttttctgtcacatcgtttcaatttcttttaattttagtgtgaactaaacacagcctcagtgtgagtgtgtgttccggtgtttttgtttagtcttgtcttgctccgtcaggcaagctagctgaggtttatttatagggcaagcggattagctagcgtgcgagagatttgtcagtcaggtatccgctggtcgatctcgtgggcatcatcgtcagtggttagttgcagcaatgctggtgatgtgatcacacacgctatatatatatatatatatgtgtgtgtgtatgtatgtccgggttgtttgttttgttttgctgtgtgaatacgtacgtacgtgtctgtacgctttgttgtttaattcaattttatttgatctttccattttcttaaaaaaattaattgttttgatgaacgtgatggttaatgaatcgaccactcaatttaccacacctatccctcaaacttacaaaatgcagaaaaaaaatcacagcatgatcatgatctcacgttgaatcaattaattttcagttcctcgaaattagtagtatttgaatttacatatctataaagtgatatatcacatattaatctatcttgttaaaaaatttaatagctatttagatgacattaaaaaagacgagaggttatacatatcctctcaagattttattatcatttcccgattttcatggtgtgcagctgcatagtatgtttgacattatctatcttacatgcggaaaaacatgggatcatacagagtgtaatactagtactactatagtattattttctccgtttcacaatgtaagtcattctattattttacacattcataataatatgaatgtgtaaaatgctagaatgacttacattgtgaaacagagggagtagcatatatatgtactgtatgaaacaagatcaatcatgctatgtcatttgatattcaggtgagttattatccaagactttggcttcgatcagttgacagggttcttgccgagattgaaggtgatatatatcagatccgatgtatgcgatcggagatggtgatgtggatcatagatagagataaattagtacgggagaaaaaaactattcactattattgttcacttgttcagcctgttcattggttgacttcattcacacagccttcgctggcacgctttaattttcttctcttcttctttttcccgtttgcaagcttgggcttggcaggctggacttgggccaagaatctcgtaaccctgacaaaacacaaatggaagttcactttaggtaccttaatttgtcgcctgagtctgaaattcgtccctaaaccgaaataataggtgtagcacatcccccaactcacaatactgtgttaattttggtcctggcagtatggtggccggttttggctgacgtgacggctgagtcaatcatgaaacccaaatgtcaggacgccttacctaaataaaaaataaacaaaaacttgtggaccctacctttaagtgacaatctcctttctctatatgtatctctcaaccttttcttggcgacataggtgggagcaggggggcggcgcgccgactgggcattggtggcacggtggaaccacaaggcgcaactggcggtgtggaggagggcgtcggtagtgtgggagaggacgacgggcggcaagaaaggagcagggtggcagcgagcagtaggagaggagggcatcagcggcgtaagagagggagacgggcgacaagagaggagctgagcggcggcaggcgatgagagaagagatgggcggtggcggcgaccgatggaagagggcgacagacgacaagagaggagttgagtggctgtggcaagagaggagcagggtgcgggggagagaagcagtcgttggaaaattgttgttgacatcgccttctcaggggtcttctccggatggcggtagaaagacgctgccggtgccagtgcgatggcaggggagagaagcagttgtcggtcctcatccatgccgccgccaactttgccgcgacccatcgatcctcctcaagccttgccgccaccgccgccacctccactatgacagagagagaccccttcccatcgccttctcatcctatgctagagcggccgccaccactgtagtgccacccgtggcccctcctcctcatccttttcattgtcagtgggggctaagcgcacccttggggagtggtggggcggtggagaaggtgctaccttaacgctgctgtcatcattgacgatttgacatcacgctctgcagagttcgccccctccactcaatttccacggtgacagcattcaggcattggttggctaggacaaaggaagagagagaaagagagcggggaaggaagagaggggggaggggaagatgttgtttcaccgacattggggcctacaaaggttttttattttttttgtttttgctactatgccgcattagcgccacatcaaccgaaaccgtcatctaaatcacgttgggatcttatttgcactagttttaggagttgagggacatttcatattctgcggtgcaggaacgaatttcagactcggggacaaatggagggaccaaaatgaacttattaattacagattgacaaaacacaagatttgcctgtatctttcggaatacactgcgcaggattgggaattccagagaagttttagagaaaaggttgcttgttgtgcgacgcctcgaatcattcttctccctcgcctccaagccatcttaccatctcgacaactccgatccagggaaaagtgaatttcgtgaacaaatagcccaagatgttagtacaaccggaagcccagtatcgaagaaacttacgttgtatgggccaacatttcaagaaatataaacatataaattacaaattttgtcagtaaaatttggagggtcaaactttggtctcatgcaaaattttcacatcgtacactccttgacaaaaagaagaagaagaagacacccatatgaattctacgagaaaacaaattcgcataaattttaagatgtgtcagctcagtcttttggagatgtttttagatgtacgtagagaaaaaagtgagtgtgctttttagaaaaaaaattcgcggaaatttccttcacaaaattttgtcgaaaattcatcgaaaaaataatataaaatgattcgctgcaacttccatcttattctatgagaaaccgacttgatctaagccatgtgaatgcgatggcacattcatccggccccacatgtcagcgagccctagaagcgtccccccaacttcccatgcgtgtcccctcgtcttctcttctcctctctttcttccgcgccccgctccgttcgattcgattcgatttccgcccaaaatttcccaaattcccctccgattcgccgaaagcccaaccgcctctctctctctctctctctctctctctctctccattctctctcgccgccgcgccgcgccgcgccgctcgccgaccggatcccatccatggcgtccccctccctcgccgccgccgcggcctccccgctgacgtccctcgaccttgccaccagccccgccaccgcctcccgccccgccgccgccgccgcgtccgcgctccgcaagcgcccggtcctcctgctcgaccagcgccaccacccctccaccccgaatctcgactcctccgccgccgcggctgcggctgcggcggcggcgggggtggcgcaggcgcagccgccgcccccgcgacgcaagaaggcgggacacacgtcgtcgtcgacgcggccgaggtggcagaccgcgctcagcgtcgccgccaagaacgcggtgctcctcgccgtgctgctctacgtcggcgacctcgcctggcgcgcggcgcgcccggccccgccgcggccggtcgaccaggccgcgatggccggttacgacgcccgcgtcgcggacgtcgaggcgtccctcgcccgcgccttccggatgctgcaggtgcagctcgaggccgtcgaccgcaagatcgacggcgaggtcggcgccgtccgcggggagctcgccgcgctgctggaggagaagaggctggagctcgagggccagctcaagcgcctcgacgccagggccgacgacctgagcgacgcgctcggcgcgctcaagcggatggagttcctcaggaaggacgagttcgacaagttctggaacgaggtgaaagagagcctgggttcgggccccggcaccgaggttgacctcgatcaagttcgtgcattggccagagagatcaccatgggggagattgagaagcacgcggctgatgggattggtagggtagactacgctgtggcatcggctggggggaaagtcgtccgccattcggatgcttatgatgctgggaaacgtggtggtttcttttcttcattgcttagtggagatactgctgctagcccaaaaaagatccttcagccaagctttggagagcccgggcagtgctttccactgcaggggagcagcgggtttgtggagatcaagctgcggaaggggattgtccctgatgcaattacacttgaacatgtttcaaaggtaactttcttggtgattcgtttacggaattatatcatatttgcttccttgcgccttggttaattacttctctagcgcacaataaaattctgtgactatgtctgtctaaaaccaaatcatgtttgacctgaagggatgaccgatgagtagaggtgtgtcatttgttgggtaggtcttatgcataagcttgtagcattttagttcatagtagttagtgggggtgacaacaattttaagcaagacccttctttagcaaaccattatagagaatcacttacttttgtatcgctactagcattattgagcttgtatgttttgtctgcaactaattataattctatatgacatttgtttgtagttaccgaatcatcttaagcattacgtagtgtacccaccaaataggactcatatgacaacaatactgctgcttctatgaattctctctttgctgtatgttcagtggtaattggaaagacacacttttaactttaacttctatgtgatatgaagctgaatgcattctgatcccgcttgtgttatatgtctctctttttaatggtcaatggtaggcttcagttgctcatgaacaagcaatcttttttactaccttttgaatattattttagaacataaccttccgaattgtgagtcgacttttttctaatttggttgtaaaacattacaatacatctgatgattaagcaactgcaaagaaactcatatcttcccttgaattgctaagatggttgatcacttcttgtcatatgccggacttaaacctatgatgctgtcttttatttttcctgtttaatattttatgggcatcatttactttaattttttggttatctcaagttataacctgtagtttattattggaagcctgataacttgataagttataaccttgtaccgcctatttttatgtttgcgtagaacatgctccaattgaagtctcgttatacagttctgcagaatggatttcttactaaatacttgattttgcacactgagaggttttcctgtcacaaaaactattctcagatatttactgattaacttctgtcacatgacatgcaggatgtagcatatgatatgtcgactgcgccaaaggactgccgggtttctgggtggtatcaagaggcacataatgaggcgtattcaggtcatgctgcaagcgcaaagatgtatgtcttgactgaattcacatatgatctagacaagaagaatgtccagacattcgacattacagcaccagatgttggtatcatcaacatggtccgactggacttcacttcaaaccatggaagctccgcgctaacctgcattttccgcatccgggtccatggtcatgagccggtctcaccaggaatgtcagtttctcagtcctgatatgggaaaatgctttggttctgtctcttgttagtgttttggtttagggatctccttgtgcccttgctagttttcagcgtaggatgttatcatgtacactctgtaaaggtaatgattgttttgctgcaatcgtctagcccaatgacatcttttagatactaagagttagacattatgtttgttccatcaatggatggcaattgtggttagtaagatttatttgcgtatctgttgatggttgtttgggcttgatcattttgaaggtaaaacaaccaaagatttcttgcaattctacctggaattcttgtccactttcaaattgggaactgcctgatgctgggattgagtgaaatcatcctcaaatgttcttgttaacatgttcaccgaatctttgtctcacctctgagcttggaggggagtgaatcatctagttgggtgtagttaatagccgcattgttttcacagtccagtgttctcaaatctgaaatcgagacctgagatcgtaattttcatattccaataaatattaattactgtatttggtgatgatgtttgataatatttgattctattttcgcatccgggatttcttattttgattccaattccagaaaaatacatatataaacgaaaacagtaggctgtagtgcagtaggagtagtttccgtcctttttcgagctgttttcgcctctacttgcaaggatttgcagatgctgttgtttaaggtgccgtggaatggatttgccgacacaagggcgataccatacttttacttggaaccatttgaaatatttgacatcgaaaatcttctaaacaaggcttatatcttgtaagagaaaaatgatgggttctagtggtgatcggaaaactagcactttcaatcgcatatctcttctcttctctactacttaaaaaatacaaaaaatttacttcgtccgtcaaaacaaaaaaatagcaaaaaaaataaaataaaataaaagtccgactcccctaagatccaatccccccttaaaaacaaaaaaaaaagtccaactcccctgcataactgccctccggcatgaaaaacggagcgatccattagcacgtgattaattaagtactccctccgttttataatgtaagtcattctaacatttcccacattcatattgatgttaatgaatctatacatatatatctatttagattcaataacatcaaccctaacatcaaaacattgtgaaacggaggaagtatttgctatttttttttcaaaatggatccatatgattttcgtatataagctttttgcaaaaaaaagaagcgtttagtagtttaaaaagcgtgcgctacttaaaaaattgaaaaagtttccttcgtccgtcaaaacaaaaaaaagcgaaaaaaataacaaaaaaaagttcgactagatccgataccccttaaaaatggaaaaaaaaagttcgactcccctgcattcgtttccctaggctggccctccggcatagaaaacggaacgatctattagcgcgtgataaattaagcatttgctaattttttttttcaaaaatggatcaatacgatttttaagcaacttttgtatataaactttttgcaaaaacaaacaaaccatttagcagtttaaaaaacgtgcgcgtgaaaaacaagggagaggggtcgggaacaagcgaaaacgaacgcatcctaagtagatccgattcccccgtttagtagtttaaaaagtgtgcactacttaaaaaattgaagatgtttttgccggtactttggtaagtcatccgtgtatgagtcggtttttaagttcgattgcttttggaaatacatattgtatttaagtcggtttttaagtttgttcgcttttggaaacatagaaagagtcgtataagaattctcttttaaaaaaactcgcatggtaacttaagacgatcggacttctaattatagctcatgaatttctaataaaatatatatccaagtgaattcctacagtgaatttcaccttaactagaccgtataacaacaataaaattaaaatagcattcacccattgcaacgcacgggcatttttttctagtaaatataaaaattgaagatgtttttgacggtattttggtacgtcatccgtgtatgagtcggtttgtaagttcgtttgcttttagaaatacatattcatgtttaagtcggtttttaagatcgttcgcttttgataatacggaaggaataatataagaaatctgtttaaaaaaactcgcatgctaacttgagataatcggattcctaactacatctcattattttctaaaaaaatatatatccaagcgaactcctatagtgaattttatcttaactaaaccatataagattaaaatagatttcacccgttgcaactcacatgcatttttctataataaaataataaaaagaaaatcagaagctttatatttaaaaagtaaaaaaagagagaaaaaactaagaaaatagtcaatgacaaatacactcctttgtttctctccttccattgggagaaatttcagtatttaccatccaatacgatgacctttaaggagctgccacacaatacgctggcctttcaaaatttaccaccaggcacgcgaaattcttcatttggagccactccgtccgcctgcctcgccgtccatccgcgcgactgtctccgagctaggtggcgtcgtcgcccaggcacggtcgtcgtcacctcgcatcccgcccccgccgccgtccccatccccaagctcgttcagcaccgtcgccaccgccgtccccaacctccatcgccaccattcccatccccaagctcgttcagcgttgttgccatgctcgcgccccatcgccgccgtccctgagctcgtctgccactgtcgtcgagctcgcattccgttccgccattgctgccatgcccgagctcgcgtccggtcgccgccgtagtcacccccaagctcgcgttccgctgccgccgccgtcgccccagagctcacgttccgctgtcgccgccgtcacccccgagctttccgctgtcgccgccatgcccaagctctcatccgatcattgtcgccgtcgcccctgagttcgtgttctgctgttgaaccgccatgcccgcaaactccgtccccgtctaccatctagatgtcgacaaaaccatgtgctcctccgtccctatcgaaggtgcaacgtccctcgccggcaaccgcggccggagttagctcagggatgatggtcaagccttgagacgacggccgacaagctcggagacgaagacaaagacggacgacgcggacaagcagacgaaatggcaggaaatgaagaatttcgcgtgtctagtgatagatcttgaaaagccaacgtattgagtggcaatttcttaaaggtcatcgtattggatggttaatactgaaatttctcttccatcggtcccctccttttcctctccgtttccggcttccggc

SEQ ID NO: 23708 - DNA, 5709 bp, Oryza sativa
cccccccccccccccccccccccaacacacacacacacagcgcctcgcgcgcgcttttccgccgccggcgacctcgccggagccgcgcgggttctgtgtacgcccaccccctccctccgtctcccaccccccgccctagccatcttcccttgcgcggcgggcaacctcgcgcgcgcacggccagcagcgagcgagcaggtttggggggggagaggcgacgcggccgcgacctcgttccaccgcgccggcctccgtcttggctttgttcgaatcgaatcgaaggtatccgttcttctctctcgtagccctcctcctcctcctcgccacctcttgagccgggcgtgccgtagtggccgaggtggagatccaatacgaacttgatttcgtttcctccaattaacccttatccatttgtaatccatttgtttgaggatttctttgatgtgtagtgcggcgctcgcagcaatttcctccaattaaccgatgtattgtcatcaccaatgaacaaacacgctaggaaatttgatatacttttggaatgcttgtgttggttcttgcactagacctgacctatgccatgcggtatatctttattttgttgaagctgtgatgctttttgtatctgaacaaatcttccttctgcgtcgcagagatggccggaaaagggagctacgttccgcctcagtacattccattatatggcctggatactgaggaggatcgcgtttctgcggaggagaatgatgccgcgcgccacaagttaacccgggatcctacacaatggtcttcaggcatctgtgcttgttttgatgatccacagagctgtatgctactctctgacctgtgactccttgatttcagaaggaaagataaaaggtgctatttggttgcatgttaggatatggataagaaaataagcattgaacatagtttcctagttagtgttatcgctatgttattattgggtttatcattccacgaagcatgtcatgtgtgaagcactgaagccgtgaaggataagttggttgggtatgacatccaatattttgtactgtcaatttgccaaactggtatttatgccaatggaggcctgaaatgcaaagtagccaaccacctaatagttctgcttcattatacttaagtcttgagtggccattacagtattggtttaatttttagcacattcagggatattgcaagaagtataattaatccaataagcaagttttatcagcattctgatttctgaaaaggtcccttcactttgaagaaaacagaactatattcttatagcctcaaatttcctgatgatttttgtaggttttattggtgcaacttgtccttgcttcctttttggaaggaatgcacagttcttgggatctggaactcttgctggatcatgcactacacattgcatgctttggggccttctcacaagtctctgctgtgtgtttactgggggccttgtattggcagttccaggatctgctgttgcttgttatgcttgtggatatcgacaagcactaagagcaaaatacaatcttccggtacgagcttgaaacttactcttttctggtctttgacatttctcggatgttactggttacatgttttagatttagtagtcaatagaggcagttttttcacgacatattgatataaatggatgatatttccttactgcacaatttaatcaatagtgggatttatggtgaaaattcttcatagttgaactttagttgaaactgaaatctaccttacatatatgtaaggactgcatataaggcaatccttccactgttgctattagtctagcaatttgagctctgccatggtgtcttgcctaccaaagtatgtttcttttgcaagcagtacagtagtaagtgaatagaatctttaactgtcaattgaaacatgcatttggttgctggtttcagtgtcttgtgtgtaatttgattcagctacaaaggtcatgaccaaattgttaatctcaataggagccaatctaggcttccacatgactatgatttcttgatgtgttgtcgatgcattgttcataaatctacagtaaaacatagtaaatttatattttagttgcatgtatctggaactggatgctttgaaagcttacaagagcaagagctgggataaagggatctgtatgcaactggctatatttgataggatactggagtacatcactagggctgtatggttgttgagtcatggcaaatctagtttactgattctaacatgttcatttcaaatatattttcttttgcaggaagcaccatgtggcgatttaacaacgcacttattctgtcacctgtgtgctatatgtcaagagtacagggagatccgcgagaggacagacagcggctcctccgctccgaccgtcacgccacctgcaatacagacaatggatgagccttgaatggaaatatgaaatattgatgaacgcctctctatctgaattctgacgaatctttggttgttgctgcttgcgagtgtttgttatatcttctttgattgtgcttccacgggtactactacgaggctggttccgtagagttgttgtaaagatgatttttcgacaaatgagcaaatcacagtttgcaggtgtagctgtgtcattgaactgtagcacgattgttacatgtaacatttatcttttcacatattggaatatgatggcaaaggtaaagaacacacttgttgtccattgcctcagtttctttctcatattctgaggcttgtaatgtcttaatataatgatccgtagtctcctaatggctaatgttaaaccaacctgaggcccctgtggaacaaaagttcatattgtcttccgttttgaattatttccttagtgtgaaatccattcgtccaacaagggctaaaaactgaattgtacagatcatttgaaccatctatcgaatttaccaaatcactgattacaaacaaatagtacaaagtttgcatgagagttacaaactgaaattatttcggcaaatacagattcacaaatcacaactgggcaaataattttgttcctaaatcccttatttattcagcgagaggattgaccacatgcccaagaaacagtacggcgccggtgagctcctcgacgacggcgaacaagaacggccggtcggcgacgaagtccaccggcggcagtgagctccccttttgcatcataaccacggcggtggaggcggcggccacggtgccgagctcgtccacctcgatggtggcctgatgatacacttcggcgatgaagagaccgtccccgccggtcaccatgccggagaagtcgccgccggcgaaagctcgggtcacgcccagcttccgcatgtcggacttcgcctcgaacttgaacgagaacttgaacttggggaccatgagccgcctcaccggagcctccgccgccggcgtgtgcttcttgatgaactccggcgtggtcacggccatatcgtagagatcggcgagcttgagcgcgccgtcgccgtcggggaggagcaggagcatgtagaatgcggctcggggcacgccgtcgccaccgccgccgccgccgacgttcttgtaggggagcttgagcgccgtgaagccggggaaggcggcgacgtggcgctcgaaggggatctccgtcgtcatgaacggcgcgcgcacggcgccgccgtcgaggaggtggaacggcgcgtggaaggtcgccgacgggtggaacggcagcgaccacgtccccttgaagtggaccgcgttggcgaggacgaccaccgtggaggagtcgacggagttgggagggaggacgtcgcggatgagcccctccgtcgcgtcggacacgaaggcgttgactcgctcccgcgcctgctcgggctgggtggcgaagtcggcgggctcggcgacggcggcgtagcgcgacgcggcggcgtccgcgaactccggcgtgagcgcgcggccgcggtccacccacacgccgcaggcgaaggacgtgttcggcaggtggcggagcctcgcgacgagccgcgtcgtcggcgagcggtgaagctcggcgagcgacggcgagccgaggaagcccaggagctcgcgctgcgtctcgccccgcgcgccgtcggccaccagcgcgagcgccgcgtggaaggacagcggcgagacgatgaagttgcgcccctggccgccgcctgccgccgccgccctgcggccgacctccctcgcgagcggcaggcacgacaccttcgcctcctccgccatcgcaggaggagccatgacgtcgctccgcacaccaccatcgcctcccgtcgctcgaccagagaacggctcaccggcggcgagcgccgccatgggcacgcggtcccaggaggagaaaggacgaggaggaggcggtggcgcaaactctggcgcgtcgtggcgctgcaccacatgctcgtcccggttcgcccatgggtgcggcgccgcgaacgcgagcccgagccaaggccggccgccggaacggaagctcaggacctgaccggcgccctgctcgccgctgccgacgaggaggctcgccgcgcctgcgcgtgcggctccggcctccgcgccacggtaagggtggtggcgccggtcgtggccgtcacggcggtgagctgcggcgtcgtggcccatgagaaggcggcgatggaagtgaaacaagctttaagggaaactgttttaaacacttgggtagatgtccactcgtttcttgtatgtcatctaaatggttataaaaaattttcaaaaaaactaacatgataggttaatatgtaatatatcacttcacaaatatgcaaattcaaattcgacttctacaaattataacaaaaataataaatttgactgtgaatatacgtacactagttagagttttatttgttatttttgttacaacatgtagaaatcgaatttgaacttgtatatttgcaaagtgatatattacatattaatctatcttatatttttttaaaaaaattagtggtttcgtgagctagtgaacaaagcttggctctcaagtcaacgaccaggtcacgctttgacttggagagagttgactacaagttgactagctacgcgcagttgcttggaatcgcgactacaagattcatctacaggaagcacatgagctataaaagtgatactcgagctacaaaggcttaaattttgatttccacaacattacacgtccatctgtttgttcagacatctccttttaagttggctctttttgagacggagggaataagtgaatacatttttaatgacaacctgtgaagtagaagctcaccattaacttttgtttcttttggtccctccgtacttataaagaaagtcgtttaggacaatgtttaagtcaaacattggaaatataaatcatgaataactcttaagttgttaagtttaaaaatataaaaattatatgaatagatttgtcttgaaaaatattttcataaaagtatacatatatcactttttaataaatatttttatagaaacaagaagttaaagttgtgttttggagaccgtgtcgctgtcctaaacgactttctttatgagtacggagggagtacttcacgagactcgaatgattgacaacgtctatagcaattaatcggagtactgatagttaattaactatgtacacttttcatcctataatataaagcataattaaagttgacaatcttttaaaactaatttttaatt

SEQ ID NO: 23709 - DNA, 1697 bp, Oryza sativa
  unsure (1)..(1697): unsure at all n locations
tttgcaggcggccccccgcacagtgttaaactgcccttcctaagggcggcaagggggccgcctgcaaaatggtagtagccggccgttaggaatgagctaacggctgtttgccacatcacaaaaatcgccctttgggagggcgatttttcccaaagggcggcgggcgactaattttgtaaaattttgaaacacaaaattagttttgtaaatattttaataaaaaaataaaaataaaaaaaattctccaagatgcaacgcactggcctgcctagttatgtgcatgctgtgtgggccgtaactcactctctccggaaggcccaaaccgcagctcaacgcttctctcctctctctctctctgcagcgcttccacgctgcactgccgtctgcagctgtgctcaggaggataaaattgcggaggggatccacagttccagccgcgtgtgacagcggcgtgcggttgccgcggcgtgctgctcgagccgctttacgactgatccgagcagctttttccggcgatcatgtcggacgcgcccgccaccggcggtggatttcccgcgcaggaataccccaccatcgaccccacctcgttcgacgtggtcctctgcggcaccggcctcccggagtccgtcctcgccgccgcctgagcgcgcgcagggaagacggtcctccacgtcgaccccaaccctttntacggctccctcttctcctccctccctctcccttccctcccctccttcctctccccctccccctccgacgaccccgccccctccccttccccctcctccgccgccgccgtcgatctccgccgccgcagcccgtactcggaggtggagacctcgggggcggtgcccgagccgtccaggcgcttcaccgccgacctggtgggccccaggctgctctactgcgccgacgaggccgtcgacctcctcctcaggtcagggggaagccaccatgtggagttcaagagcgtggaggggggaaccctcctctactgggacggcgatctctacccggtgccggactcgaggcaggccatcttcaaggacaccaccctccagctcagggagaagaacctactcttcaggttcttcaagcttgtgcaggcccacattgccgcgtcggctgccggcgccgccgcggcgggggaaggcgaggcctccggtaggctgcccgatgaggacctggacctccccttcgtcgaattcctcaagaggcagaatctttcgcccaagatgagagcgtaaggaggccagcctgaagctggttttagtgtactctatttttagcattggtgtctaagattagctttatgtgccttgttttcagggttgtcttgtatgcaattgccatggcggattatgatcaggatggtgtggagtcttgtgagaggttgttaacaacgagagagggagtcaagacaattgctctttactcctcatctattgggaggtcacttagctgcttgaacctttttcttgtgtatactttggagagacatttcttttatgaattgagcaatccacattcatatagccttgaatgagacatatagtctatgagtggggtcttaagataagtttctcgctgtgtccctaacattttatatctgtttatttcaattttaacaggtttgctaatgcagagggggctttcatttatcgtatgtataggcatggtgagttgcctcaagcttt

SEQ ID NO: 23710 - DNA, 638 bp, Oryza sativa
  unsure (1)..(638): unsure at all n locations
ggcttcaaggaaaggctgttatttttgtaatttattttatttgaactcttttctaaaacgactaggtgagtgcttctcaaacgactcggatgagacagtgcgtctcgtccggtcggagtatgtgcaatgcatcaatctttagaattgaaacagaattggcacccggccaacagcttttcaaacggccacccgggccaacaacttttcaaacggccacccgggcctagctgatcccgtcagctgctgatttttcaaacatcgaaccccttttcacaacagcaatttcacaagcagtagtcaaacaaaactacgctaggaaacacctcacatccgcccatgaccatgggcacggctgttcgaacagtttgttaacctctgcagagggggtacactttacccacacgacattactaacccggatcacccagctcgtggggatcagccacgtcgggagacctccaagctttcatgacaaggcatttcgaaagccgatacaggtttaccatatgccgacgagaggtgtccccaaggaaacccccaannaacccaaaaaaccccaagggggttttttaaagggggttccccccccagaccatactgtgccaggaagcccaggggtcctccccgacaccaccccg

SEQ ID NO: 23711 - DNA, 5413 bp, Oryza sativa
gacttcatcagcaacgtacacatggaaagctggcgatcaacggccacaacactggttcggccaaaccaaaaaaaatgtcttcccggcccctcctttggccggtaggtatcttaatgggcccccaacatcatgcattatgtcaaagccctattctaagtggttttaattgagttatggtgcctccaatccgtgtaaacgcgtcctgatcgtgcagatgtgtattttgtcatgttgggtgtgttttctccttaaaatacctacatacacatatataccaacactagtggaaatgattagtaataaaccctaccactaagttgaatatattttattccaatatatgcatgtattgacggtaagatattatgatttaaggaccgtcaacacaaatcctacagacaattttcctatttggccttcgacaaagcattggagatttccaaatcctatgaaatttctatggaatggtttattgcatgtagattttgaaggaatgttagcaaaagcttcaacctgttagaaaatttcctttgaatgtaattctctcacccaattcctatatttttcctatggttcaaacacatggtcgttcctgtgtttttcccgcgttttgtaatcctctattttacacttgctttcttatcagaaacctgtgttttttcaattactatgcttttccgttgctgtgattttattttaccgaaacaataaagataattatgctatggctggcagggttttcctccctataacccagccccctaatggcataaccacaactcgatcatcaggtcaatataacacctggcgaatataattcccgaaaaagggagaaggcctaaacctgtctaaaccttattccatttactcgtcaaaatttagatctcgtgcgctagccctttttcattgcctatttctaggatcaacatagctggtcaattatatatccgctggattcgttttgtttccttttcttttcacagccaacctctttaacagagaggattaagcgctacttgatgccctttggtgcctgtttctcttttttttttttcattctcaactttgtatctgttttcaacagaggatatggtaatctatctatctgttatattgttgatataaaattcatcattcacacgaaggcctgggagatttacgtagctccagtacaaatcttatcaatagggtttaggatgtaccagttagtttgatcctagaactaataagatagatagatggatcgtataaaatcaaagagtcgattgggcaataagtcgatgggatgtagcgaggcaagctgatgttaatagggttctgatcaatcggctataataatacaaaatgaaaataagtattatattatcgtaaatcattgtacatcctctaagtgcacttaaggcgtcatgtgttacgccttgaataaaaataaaactttacaaactggaagaaaaatcatctgaccatcagtttccacttaaataggtagatccattactttcaaccaatagatatactttttagaaaatcttaagccccaatgtgttatgtcttaaaaattagaaaaaataacaaaaaaattgagaaaaaaatagatcatcggttttacttaaataatttagataaaatagcaaaaaacacccctccactttgccctctccccaaacatacgcacaacacagcactactcgtcccatcccttctcggcttgagctctccactctaccccttcgtgtttatatagccaaaagtaatcaaaaatattaaaacatgcataaatttgaagctatgcatctcatttctaatctaaatattgttgtatttataattaaaacaatgatttaaagatccaaaaatcctatattttgaactagtataaaatataaaataaagcaggtaatagaaaatgtaataagttcgtaaaaaaatgggttcttacattacactataattggaccaaccattgcatgttccattttcataacaactttaaaatacttagacattaatgatcttacatctatcctatatcatagcattatgagtttctccacatatcattatatatataaaccgcactaaggttcgcagtatatagttatttgaaaagttatatttgttagtattaaatttaaaattttggattcatgttaactaggtatatttttttgaaaaagatagtatagatcgcacaaatcagaaggaagcgaggtatatgacatgtctttattaatttatatgtaagtatgtaacaatttgcattaacttaaacctactagaagaactacttgatggtacaaataaaacatatttattaacaatatagttctttagaatttgtaaaaaaaaagcaagtaaacattctatcaaaaaaagggccaagcaccttacttctaatttacacttgattttttagacatgttttccaaacaaactaaatcgaacttccttctatataataaagagatcatagataattatttatacagatatattaaatatgatatatttttaaacctaataaatatcttggaaaaattatcaaagcaaattgcaatgtacaatcagggttggaaatttcggtcattttagacccctctgatacgatattatttcggccaaaattttggtaatatttgttcaaattcaactatttttttcaaaatttcgaaccgaaatttcagaaatttcggtgatgcatgctcaaatcagctaaaccgaaaagtttaatcccgtgtacaatacatgccggcgcgaatgcacgggctaccttcctagttaagtgaaaggttatatcgtgaagcacaactaacttgtagtcaagactacatcttatagataaagttgtacatatctaatcagagtataaaaatggatgtactactatgtaaggaagcatttgcatcagagcacaaaaactttcagagacacaccaatgtgacgcacagtagtttcgcaaagatttgtgtttgggcttgggttcaaaggctagagcaattaatcatcaattaattcttcttttggtccacaagctgctgcgcttgtttcacgagggaagcgagagtactgattggcttcaatgagcccagattacgaatgacttgaaatacctttcctctgtaataaccactggtgagaaacatagagccgtcgatatgtcagacatggtcttggaagcaagtgacagagactgcatcaagctctgcaagtcttcatccacatagctgccttcatttttcatcattgatatgaccatcttagtggtgtgttgagctattctaaggctgtcgaccttagggtcattgtttgtttctacaatctccttgagcttcctccaaacgctaaattatcaactccatggcaagtcgcatagaactgttgattcagatcttgatatgaaaatgtgaatttgtcacagatagtcacacaaagctgcaacaagaattggatgcattggctcttcatattgaaatttggtacgtgagatgacaaactgtcattatcttgtaaataatcacttgggttttcgatgtcggtttcttgtgctactatggacctaggttccgtttctgtttgcagttcttgtcctgttggcctacaatgaaggacttctgcaagaacctgagatggtaaggacttttaatctgacagtggtaataaatctaggcaggatcaggccaatttacatatgatgctaatcaaaaggcagcaggtctggagggaacttacctttggcattgccttggtcatcactcccttcaggttctggagacattcatcgtcttcggtgtaattggcacatagacgctctagaattactgctgtagctactctgaacaatatgatgttgtcacggtctaggagaatttttacgagattatcaacagagttattgtttgctttcatgatgatcatggcactaccttccattttggaagaaagcatcaccagtgcttcagctgctgccgccgctctgacgccaatacccctgctacaatcactgaacgcgcatagcagcatctggacgaattcttccctgcttgcgcaatccttacctgaatccacaatcgccagtgcagcgaggatctccatggctagcatttgcagcttctcgccgcattggtcacactcgagaatagcttccatggcgcttattgctttcttgttgcctaacatttcatggcgcaggtcggtgccagcttccccgggagcgtccacgagcaggttcataacttgcagagacttggacattatcttggaccaagcgccatggccgacgctgtgaagtaggtccaagctgacgggcgcaatgagcttcgcaatcagaccacgtgagttggccatggccgtgcggttgacgtcgtcgacggcgagggccccgaggatcaacatgccaaggaacatcatgtctttgcagtgatcatcatctttctcatcactctcaggcgaaagacggtcaggccgatcatgttcttgatcacatcctctactactcttccatgtctccattaaccattcgcgctcgtacggctccagaaccgtgcttcgaccatacgcctccggtagccaggctggtcgccggcgatcatgcgacaggcaacattgcccgtatgggtcaagcaaggaagatatgcaatggatccctcgtcggaactgctccaccaggatctcgccggcgacgtggagcacgatcgtcgcagcacactcccggatcctcctgttgtatgggcttctcggccccagcgtcacgagcagcctgtgaacaatgtgaccgaacgatgccgatgcagttagctgctgtctgatcagcacaagctgcccaagctgcacacgacgccgcctccggtcgccggagttcgccgacgtctccatgatcggcagcctcaacagcgctcccagtatctccaacccgcggacgtagccgtcacctgacttggactccagcaggtcgacggcgaacgtgaccaggttcctccccgcagcgaaggacgggttcttggcacatccacttctgatttcctgcaaatactgcagaacggcaactccaagatcaggttcatcgtattgcagcgacactgcatcaaccagactgcctttgaaatttgcaaacgtctccctgtaaccaaagatcacgccctgcaggagagctagcgtgtacaggacgtccagtgccgattgcttcagattgtcgccgccgtagtcgcgctcgattagccgccacagagaaatcccggcggagatgtacagtccatagaggtagatggcgaacagaagccacattacgatgctcaacatcgctgcttggatcttcatcaccgtgatgtatgtaaaatcgaaggtgtttttaattattattctgtgatgaacaattgggtattggagattattggttttgctatttagaatttactct

SEQ ID NO: 23712 - DNA, 1672 bp, Oryza sativa
ccaacaactacaacaagtcaaagggttctaaccaagggaggaagatggagaatcttaggaaggcttttcaacaagtttgcgccgctttcgagccactaagtgatgtagatggtgaaagtggagatgatgataagggaaagaacgtctccgatgtttgcttcatggcgcgtggtgaatctgacatagagtatgaagataatgaggtgagtgcttttgaggaagctattaatattttgagtgctaaaaataaaaagtgtgagaagatgtataaaaaacaggaatttatcattgaatctcttaagtctgaaattgataggttaaaatctcttattcctaatgatgattgtgaaaattgtgaggttttaatgaatgagatttcaaaaattagagatgttaatgctgcacatgatttgaaaaatagatcttctcttgcttgttgttttgctttgcacacacgcactttggatgagttgtttttaacaaaaaagttgttgcaaaaatatcaaattgcttttcatgctagtttgatgtttaacatgatttctgctaaaatgttaaaacaacatgatgttttggattgctcaacatgtaatttgaataagatgaaactaaaagatgctttaggtcgtgttgagtatatggaagatgttgtgaaaaaaaatgaagtgctttcttgccataaatgtcgtaaaagcaaaggtgtcatggtagattgtgaaaattgtgctaatttggaaaaagaggtttcttatttgaaaaattccttgctaaaattttctgatggtaaaaagaacctcaatatgattttggatcaatcaaaggttagcacaaataaccgtggtttagattttgatccttatgctcataactctagtcatcctcctgtcgtgttaggtgttagtgctagaagtggtgagattttgattaaacctgatacaaataaaactgtgtttaaatctgctggtatcatgtctactatgagtgcatcttcttcaaaatccaatgttgtgcatgcaaaacctcctgtttctgcctgtgttgctaaaagttctagttctaacaatgcgtctaaacaacgtgaaaaatatacttgttctttttgtgtcaaagatggacatattgttgatttttgtttcagattagctcataaacagaaaaaggagagagagattgcttttgcaaaatcaaagtggcaaaagtcgggttttccctcgaggaaaccggtcagaccgcagtgggttccgcggtcagaccggcgaccggtcagaccggctgcagagcctcggtcagaccggacaccagtcaaactggcagtacagaggcggtcagaccggcccccggtcagaccggccactgtacttcggttagaccggcctcggaggaatttttctgaaagttctaaaattgattttgcacgtggatatatgcctattggatcttctggtcgtgtgtctcagtactggattcctaaatttttattatctaaccccagtactgaggcttcgacttctgcttgtgtgtaggctttggtggcaaggaaggagaacgtgtggatcgtggattccggttgttcgcggcacatgaccggtgataaaaattggttctcctccctcaaaaaggcatccaagactgaatcaattgtctttgctgatgcttctactagtgccgttgt

SEQ ID NO: 23713 - DNA, 1943 bp, Oryza sativa
  unsure (1)..(1943): unsure at all n locations
tgcccaccttaactcgataaggcagtgccacatgatagtgcatgcatgcgtgagaattataatgtagacaggctacacctgacagacaatagagtatgtcctcaaattttcatggtatcacatgtgtacaactaggacttttttttacataatggaatgtaacatctcggcctttacttaaagagctacagccaattattacaaaactcacatggaagaaaactcacgcagaaagttcatgataccagaaagaaagctaagcaaacacaaactaatagacaccaacagaagaaaaagatcccctaactactgaattctattagagaacctccacccgaagttggcaaatagatgaataattgtcgtctcaagtttacgacattcatcatttattagcttgatatcttcatcatgcctttgtaattgagcccatccgcgaagccaatacattgccctgaaaagcacctgcaaataggattttgatggtgttttatcaaaaaccatgtcatttctactaagccaaagagcccaacatacagcggaagctccaacaagaataagtttcttgattaatttactaacacccacaagccaattcccaaacatatgagatatactatgtggaggataaaatccaaaagaaaattgtacagctctccaaagaaatttagaaaaatggcactcaaagaatagatggtgtattgattcatttttcatacagaagcaatatctcaaactaccattccaattccttctagccaaattatctttagttaaaacaatccctttgtcacgccccgaactagtcccgactggaactagcccgtgacgctccaaattaacctgttaatcgataccagtcccaggaaacagtgctggtatcacaggaagacagaatatcacagcaacagaagtctctttattatagagtagaagtacagtcatgttgggctgcggacagatcccgagctgacaactgcattacaaaagggaaacggaagccaggacttggaccacacaacacaggcgcgacttgggaactaggccgaaaccctaaaactcatcgtagccggcttgctcctggaagaactcctcatcagcaggatccgcttcatcttcttcagaaactgggggggattatttatatagagcaagggtgagtacgggagtactcagcaagccaggggaaataagtgtttattgcaggcttcaaggaaaggctgttatttttgtaatttatttttttaatttttntggaaaaaacccttttcttttttttttttcctttaaaaaaaaacgactaggtgagtgcttctcaaacgactcggatgagacagtgcgtctcgtccggtcggagggtgtggaatgcatcaatctttataattgaaacagaattggcaccctgccaacagcttttctaacggccacccgggccaacaacttttcaaacggccacccgggcctagctgatcccgtcagctgctgatttttcaaacatcgaaccccttttcacaacagcaatttcacaagcagtagtcaaacaaaactacgctaggaaacacctcacatccgcccatgaccatgggcacggctgttcgaacagtttgttaacctctgcagagggggtacactttacccacacgacattactaacccggatcacccagctcgtggggatcagccacgtcgggagacctccaagctttcatgacaaggcatttcgaaagccgatacaggtttaccatatgccgacgagaggtgtcccagaccaacaacaggttaggtcccagaccatactgtgccaggaagcccaggggtcctccccgacaccaccccggcgaatccacatgtctctcggcatcaaggctcccctgataagctagttactcagccaggggtgtcccattccacccatgtggtcgtacttgtcttatgttcggatg

SEQ ID NO: 23714 - DNA, 10979 bp, Oryza sativa
cacgcggcgcacgcgcgcgggcggggttgggacgcggtgcacgcgcgcggctcgcggtggacgcggatgcggcgggaccacgcgcagcctcacggctcgcggtggaacgcgcgcacggggagggaccgactggggtcggctcgacccggtctaggctgagctggcgcctacgtggctgccacgcgggccggcgggaggtagacgacgacccggtcgcgaatggacggcgggtggcggcggcgagcggcggagcgaaccacggtgatacaggcaaaagcgagcacaccgggcggttgcacgggacgaggggagacgagccaacggctcggattcgccggaggttgctcgacggcggcggattgcggcggcggcaaccggcggcgagggaagagggaaacggcgacgaggccacgaggggccgattcccggcggtgagaccatctacgcggcttcgggaactcgacgctagcgtcgggttgggcggaactacgccgagcgaggccggcgacgagcgggtgctacggagctagggcggcgacggcagcgagcacacggcgagcgacggcaatggtcggggcggcgccggctaactacggggaggctactcgagctactaccgaaatctaaggggaggagatggagcgaggaggaagaacggagggaggcactaccgtgcgggacggggcgctgtgacgagaggccgacggcgcgggagtaatctctccggcctcgggccggggaagaggaagaagaaggcgcggccaaagtcttcttccgcgtccttgctcgtgccggctcctccgacacgcgcgatgacgatcggcgacggcgaaacagagggcggcaatggcgcggaggcgaaaatgagagagtttggagggggagggcttgggcttaaatgggcggcaatgtcggtttgggagaggggaaccgacattgaacggtcaaggcgcgagcgggcgctcggcgcttgtagccaaagcggcggcaggaggatgacgcccgcgaggaggaaaaaggggaaaaggagggggagaaaggggcttgcccctttgccgattcgggaaaaaagggggaggggagcgggagcgtcgcggcagagggaggaggggcgcggctccgtcccttggcggcttgcgcgcggagtggcgggggccgggcgatgacgacggcgatgacggggggacggcttggagcggagcggcgacattggcgacaggcgcgtgcagaggctgacggcggcggcgaccgggcggtcggccactcggcacgcgcgcgcggcttgcaacgggcggcgtccgcgcgggcgcgcgcgaacacggcccgcgggaagcggcagcgagggagcggtgagggaggacttggctcgccgcgggcggcttacgcgtgctggctcacggggccgagcggaggggcacagggcgcggctctcgcgctcgcgcgcggcgcgcgagggaggggcgctcggcgcggcgacgcgcgctcgcgcgcgcggcgcggggcggagcggagggagagagggagagagcgggggcgcgccggggaaagcgaaagggagagggagatgggccgggggagaggggaagatgggccaagggaaaatcggcccatcgaccctgggggaggcagaatggacttttgcggaggaatttgatttggagggattggattcggaattgaactcgacgatagatcggggattgagatcttgagatggcacggacactagacaacaagcaaagaaacaaatttcgcaattagggtttttaagagataattttcccgctaggcgccacgacggaacgggcgctacagaccaaccccctaacaagaatctcgaccccgagattcagcacctaagggagcagctccgggaactcggcgcggagaagatcttctcgctcccaggttgcctcatcttcagaatgattgctccattggaccttgtagaacttgatggtcttccttcgagtatgacgttctgcctcttcaagaaccttgatcggtctttccttataggtcagattcttttccagctcgatattacctagggggacttgctcttctggaactcgaagacatttctttagctgggatacgtggaacacgttgtgcacatctgcgagaccttcaggtaactcaagctgataagccacttcgccacgtctggcggttatgaggtaggggccgatgtagcggggtgctaacttgccggacatcccaaacctcctcataccacggaggggtgatacccgcaggtatacatgatctcctttttcgaactcaaggtcacgcgttcgattgtcagcgtaattcttctgacggttctgtgctgtcttcaaacgttctcgtatcagcttaacttgttcttctgctgacttgagtatgtcaggaccgaataccagcgcttcgcccacctcattccagcacaagggagtgcggcactttcttccgaacattgcctcgttcggcgacatctgaatgctggcctgatagctgttgttgtatgagaactcagcatacggcaaacaacgatcccaagtgccttcgaaatccagggcacacgcacgtagcatgtcttctaggatttggtttaccctttctgtctgaccatcggtctgcggatggtaggccgtactaaaatttagatcagttccgagagcttcatgcaactgcttccagaaccttgaggtgaactgagtgcctcgatctgacacaattttcttgggacagccaaatctacatacgacatgggtcatgtagagttctgctagtttctttccatcataggtggttttcactggcacgaaatgagctgatttcgtgagtcggtccacgattacccagatggagtcatacccgctgggggttcttggcaaaccggtgatgaaatccattccgatctcttcccatttccactcgggaatcagtaggggttgcagcagaccagctagcctctaatgttctgccttgactctttggcaaatgtcacacaaggctacgtattctgcgacatctcgcttcattccagcccaccagaagtatgccttgatatcttggtacatcttcgtacttcctgggtgaatggagtaggcggactcatgagcttcctttaggatgagatctcttaactccttcttggccggtacacagatgcgtggaccgcaccaaactgtgccttgatcgtctatggagaaattggtgtctttcttctcctgtattctttttatcaactcttttatcccttcgtcgtctttctgagcttcccggatttgcgactctagggtaggatgtactgtcaagctggcagggacacctgactgtaccacggtcagccttaacttctctaattctctgcacaggtgatcttggtcaggccgtatttgagctacattgcaataggccttgcgacttagcgcatcagcgaccacgttggctttaccaggatgatagtggattccaagatcgtaatccttgattagttccaaccatcttctctgtctcatatttaactcggtctgtgtgaaaatatacttaagacttttgtgatcggtgtatacttcacatctgttcccgattaaataatgcctccagatcttaagagcatgaaccacggctgccaactcgagatcatgggtgggataattaacttcatgaggcctgagctgcctggatgcataggccacaacctttcgttcctgcattaggacacatcctaagccttgtcttgatgcatcacagaagatctcgaaatcttttcggatatctggcaaggtgagaactggggcagtggtcaaccttttcttcatttcttgaaagctgtcttcacaagctgcagaccattgaaatttcttttccttctttaacagctcggtcataggtctggctagcttagagaatccttcgatgaatcttcgataatatccagctaagccaaggaaactgcgaatctctgacacattcttgggcgggttccaagcaagtacagcttcaaccttgctgggatctactttgacaccgttggaggagatcacgtgtccaagaaatgctactcggtctaaccagaattcgcattttgagaattttgcgaatagttgatggtccctgagcttttccattatcaacctcaggtgttcagcatgttcttccccgttcttagagtatatcaggatgtcatcgatgaataccacgacaaactggtccaggtattccataaagattttgttcattaagttcatgaagaatgctggagcattggtgagtccgaaggacataactgtgaactcatatagaccataacacgttgagaaagcggtcttcgggatatctgcagatctaattttcagttggtggtaacctgacctcaagtcaatttttgagaaaactcttgctcctttaagttgatcgaataaatcgtcaatccgtggcaacgggtacttgttctttatagttacttcatttagggctctatagtcgattaccattctctcagagccatcctttttcttaaccagaagcactggggctccccaagtggatgagctaggtcgcacataacctttactttccagctcttcgatttgtctcttaacttctgctaactcattagctgccattcggtagggtctttttgcaattggtgcggtgcctggcgccagttctatggcgaattcaatctctcggtctggtggcattctcgttaattcttccggaaatacgtcgggatattcacagactacgggcaccgactccaaggaggtgacttgtaaactggttagaatagaccgatttgcggtaggagtgttaggggtaaagcggacttgctttcctccaggtccttgcaaggtgatggacttttcggcacaatctatctgtcctttatgcttagccaaccaatccatccctaggatgatgtccatgctttgcgagtctaggactatcggtttggctaggaagtcaacttcctcaattctaaggttaacttccgggcatatttgagttgcccttatattcctcccaggggaatgtactatcatcggtacacgcaaattttgggttttccaaccatttcgtttcacaaaagcttgcgatatgaaagaatgagaagctcctgaatcaaacagaactattgcgggtacggagttgacagagaacatacccatcacaacgtctggagcatcctgagcggtttcagcttgaatgtgattcacacgtcctcgaccaaagtggttggaagcacgtgaactttgtccacttgcctgagagctaggacgagacagagctgccgctggagtaggagttctagcagtgctgccattagcatgccctgagttggtgttggtaggattctgaggacactgtcttgcatagtgacccatctggttgcaccggaaacactgaactgctgacggtccttgcggtgacttgaaagaggtaacactgtttggcgcagtattgccactaggggcacgctgctgtggctgaggtgccggtcggttcatctgaggacgaggggcgtagcctggctggcggttagcctgagtgaccgactggtggtattgcatggattgaccgtagcgagggcgaggtgtgcctcgggaagaatttccctgatggttagacttgcgtttcttgtattcttcggtagcctcttttctggcatcctcaagcagaagtgccttgttgatcatatgttgaaaagtggggaagacatgagcaagtaactggagtctcattccaactgcgatccctttcaagaatttcctgatcttcttcttatctgtgtccacttcttcaggggcgtgctgagctaacttgttgaactgacttaggtactcattgacactactgttgccttgcttaagtctgttgaattcttctttcttcatgtcaatagtgctttcaggcacatgagctgcacggaaagccgtagcaaactcatcccaagcaatgttagtgggttcagggtgtgcattgcagtaattctcccaccaatctgcagcaggtcctcttagcttgtgagaggcgtagagcgtcttctcaaccggagtacactgcactaagttgagttttctatcaacatctttcaaccaatcgtcagcctcgacgggctcgacggtctgagagaactctggcggacgtgacctcagaaaatctgtcagcttggatcaattgttgcccacgtgaaggtggccatttccatgcgcattatgctgaaaactggctatggctgtggttagtccttgcaagatttgtgtctgaactgccattatgtgttgcatgttgttttccacatgaggtggggaagggaggcgttcttctccagaattgtgactggtagtgcggtgagagcagtgagactgtcccatctctgcatcacgggaaactgtgcgatgcgagcggttgctgcggcggggttgctcaacctctgcgttgcgggaaacagtacggtgcaaacggttgctgtggtgtgactgctcattagccgactcatgattttcttctggctcaactctaccatcttcaaaaccaaagcgggctggtgcacgggctgcatggcgggggcggctagccatctaaactcccagaagagggcgaggtaagagtcagacaagcacttaggagggcaaggagcaaagtaaatagcaactcagatagcacacactaggcataaactggatttttcaaatcataaaaacacctgatacaacgggtgtggacaagtcacagagctacgccgagcttgactgtgcgcacaccacctaggagaaccagactaccaaacaacacccacaacaacacacgcacgcactacctcgccacgactccaatagagttggcggcggaacaaaaggggcctaacacacggacggctgctgaagactgcctcctctactcctcgtcggcctggctgcctcctgtagtcggctcctcagtcgaagaaacgtcgatcggctggcgcgaagggaccggcggaacctgtcgagggccggcagcagcacgggccgctggcggtgggggagctgggtggcggaaacggaacatggtggaagaaccaacaacacgcttccgcgcagtgcggataaagcgtgggccacggcgggaggaagcaactggggtgtgtccgggggtgtaggaagggctaactgggtgtgggtagggggagtacactggtgagtacggcgcacgcgagctgggggagcgcgggccactgggagtgcgggcagagccgcgggagctgtgggaggacaggtggctggcgtggcagaggcggcctgagtcccaggagatagtgtcaactgaggtgacaccctcctcggccagacgggcctccaaggcggcgtagcggcgggcaagggagcggtaagcctcaaggagtaggtcgtgctgagtggcctgagcctccgaaagctcaaccatgcgagtcagcactagctgagactcgctgtacggacaagggtacctggcgtctgagtggccagaaggaaggcgtggaagctgccggaaggcggagcctccgagacggtggttgtagtcgtgggccaggcgatgaagcgcagtccaggagaggtcctggtacgcgatctggagagtgggcctggccacggtgaagtggtgtggacgaaggccggctccgtgtatacctccacgggggtaaaggtacacagagagctcacagtgagggggaacacggtccacggagtaccccgtgtactcgggacacgagaagccaaggaaacaggcgaggtcacgaagctgagcgacgtggtgaccctcaccaaaaccgtgggaactgaagctggcgctcactgccatctacaattttgaaagagggagaaagatcagtaaccattttagaaacaaactattgaaaataaagaaaacaaaagaaaccttagcttttcgcaagtagttttgaacttagtatccatagggtcgtcctaaacgtcgggtttcgccttagggccaagcctgtgctctgataccatctcttgtcacgccccgaactagttccgactggaactagcccgtgacgctccaaattaaccagtcccaggaaacagtgctggtatcacaggaagacagaatatcacagcaacagaagtctctttattatagagtagaagtgcagtcatgttgggctgcggacagatcccgagctcacaactgcattacaaaagggaaacggaagccaggacttggaccacacaacacaggcgcgacttgggaactaggccgaaaccataaaactcatcgtagccggcttgctcctggaagaactcctcatcagcaggatccgcttcatcttcttcagcaactgggggggattatttatacagagcaagggtgagtacgggagtactcagcaagccagggaaaataagtgtttattgcaggcttcaaggaaaggctgttatttttgcaatttattttatttgaactcttttctaaaacgactaggtgagtgcttctcaaacgactcggatgagacagtgcgtctcgtccggtcggagtatgtgcaatgcatcaatctttagaattgaaacaggattggcacccggccaacagcttttcaaacggccacccgggccaacaacttttcaaacggccacccgggcctagctgatcccgtcagctgctgatttttcaaacatcgaaccccttttcacaacagcaatttcacaagcagtagtcaaacaaaactacgctaggaaacacctcacatccgcccatgaccatgggcatggctgttcgaacagtttgttaacctctgcagagggggtacactttacccacacgacattactaacccggatcacccagcccgtggggatcagccacgtcgggagacctccaagctttcatgacaaggcatttcgaaagccgatacaggtttaccatatgccaacgagaggggtcccagaccaacaacaggttagttcccagaccatactgtgccaggaagcccaggggtcctccccgacaccaccccggcgaatccacatgtctctcggcatcaaggctcccctgataagctagttacttagccaggggtgtcccattccacccatgtggtcgtacttgtcttatgttcggatgaaattccaaggaaacggtccttaagtgcaagagcgggaaaccgtacacccggtacgttcccggtccgcggttttggaaattcatttaattcacaagcaccgacccaggtgtcgggttttccaagtcttttgtaaaactccagttttacccaagttgttactcagattttaagtttgaaggcgaccgtcgatactcgcacagagtgcacgaatatcgaggcgtaactgggtggttacaagggacatggtacagcaattaacaatggaaggatcaaatgcaacaagttaggtaggtccgccaatctgccttgcagacggaacaatagattaagtgcgatcctatcaatgcataatattttgcaagcaatctaattagatttcaaatataggctcaagatgttcaaaggtggcttgccttgctcgagatctggagcttgatcctcgaaatcctcgcactgcgggtcttcgggctccgaaactacacgcaaaacgggacaactcaacaaacggcagaaataaagccctattaatgacctctaagcgtgccattagatagatctcgagatttgagaaattttggaagttgaacggagtcaaacggatttacggttgggaagatattgaatttctaagattatcggatttttggtctaacggaaaaaggatttaattaaatcctttttggaaaagaaaaagaaaagaaaggagggagggaatatagacttttctcaggcggctagggtgcggcccaagagatttggggcggctcggccgagcttaacgggccggctggcccaagacggcccaagcgcgcgcgcgcgggagggaggagagagagggagccggtggaccgggctcaccacgcgtggtcccgggtgggacccgcttgtcagcggctcgactcaccgtgcggagggagcacgcggcgcacgcgcgcgggcggggttgggacgcggtgcacgcgcgcggctcgcggtggacgcggatgcggcgggcccacgcgcagcctcacggctcgcggtggaacgcgcgcacggggaggtaccaaccggggtcggctcgacccggtctaggctgagctggcgccgacgtggcgcctacgtggctgccacgcgggccggcaggaggtagacgacgacccggccgcgaatggacggcgggtggcggcggcgagcggcggagcgaaccacggtgatacaggcaaaagcgagcacaccgggcggttgcacgggacgaggggagacgagccaacggctcggattcgccggaggttgctcgacggcggcggattgcggcggcggcaaccggcggcgagggaagagggaaacggcgacgaggccacgaggggccgattcccggcggtgagaccatctacgcggcttcgggaactcgacgctagcgtcggattgggcggaactacgccgagcgaggccggcgacgagcgggtgctacggagctagggcggcgacggcagcgagcacacggcgagcgacggcaacggtcggggcggcgccggctaactacggggaggctactggagctactaccgaaatataaggggaggagatggagcgaggaggaagaacggagggaggcactaccgtgcgggacggggcgctgtgacgagaggccgacggcgcgggagtaatctctccggcctcgggccggggaagaggaagaagagggcgcggccgaagtcctcttccgcgtccttgctcgtgccggctcctccgacacgcgcgacgacgatcggcgactgcgaaacagagggcggcaatggcgcggaggcgaaaatgagagagtttggagggggagggcttgggcttaaatgggcagcaatgtcggtttgggagaggggaaccgacattgaacggtcaaggc

SEQ ID NO: 23715 - DNA, 13593 bp, Oryza sativa
gagaggggaagatgggccgagggaaaatcggcccatcgaccctgggggaggcagaatggacttttgcggaggaatttgatttggagggattggattcggaattgaactcgacgatagatcggggattgagatcttgagatggcatggacactagacaacaagcaaagaaacaaatttcgcaattagggtttttaagagataattttcccgctaggcgccacgacggaacgggcgctacaccctttaaggagataccacataaaaatcttaatcttaagaggcattttatgtttccaaataattttatttctctcaatgtaaccattattaattaaagctaagtacatagatcgtacaaaaaattggccattttgatgaaaattccatctgaaaatgtcatcctcgtctatgcacattgaaagcacacaaattatgccatattattagatcctgaccaactaatgctcttctaaaagaaacattaatactacagcaaaacaaccagctagagacgatctgcttactacgatttatcaaaccgtctgtaatgaactcaactaccgtataccacgagcacaccccgcaaatgtagctacgaaatgaagagacggggattaaaaccgtggctactcccccaccccacgtccccactaccatcacatcttttagaaaaaaaatgtttatatcctatttaattttggaacggagtacgtacgcggtcaaatccaaaaccctcgaggtggttccgcccaccgccgccgcttgctgccgccaccgtcgtccaccactgccgtttccccctgtcaccagccactagcgacagtccgttccagccgtcatggcctaccacccaccaccgtctctcaccgccgctgcccaccactgccgtcgccaaacgcccgccggcgctccgttgcagccaccagggcgtactggtcgccaccgccgcgccgttctatctgctgatttgtgggcgatttgggatgggatcagacttcaatcggctgattcaatgggccaaaaaaggattgatcttccatgtggagcctcgaggcagatcgatttagttgaggctgtgctgctacttcaacaaggtaatggggctgctttctctctccatcgagactgcacattggtccgagcatttgttgcaattggttgtgatccatgctgaacaatttgatttgggatccgattaattggttctgattagaggtggtgccctatattataataacctgttttgctgaagtaggaattattcgaacgacagcaatattactagtcagttatgttattgagttctcaatagtaaaagataatactgtttctgaaatctgaactgaatccattgatttctgaagtctggacagagcacaccaatataaatttgaatgctttatctgtatttttttatgcagggcatctcttagcagaatagaggaaaaacttgtggttctgttattttgacatctgtgttaattgattctcatgaatgttggttatggctgaagcatcccatgtaactacaaggtaagattaaataattcctaacaaattttgtgcatatatgatggctagtctcatgagaaacaaactctgtacatgctgcgcatgctatgttgatatatatttgggcagaccaaataatgacagtactgataaatcattagtaattttgtttcagtgttctgctgttccattgcataatcagaagacaattttgttcacagacttcaatgtttattaggggcattactgcaagatgaacctgctgaacttgaaatatcatggtattcttgatgactgaaaggtacactccttcgcgtccatagtgttaaatctgtgagatagttcatgcctcatttctttgggtggtacttgttaatattttgctcacaaattttttttttgttgctagcctcttcacaaacagtgatatattttcaattcaaatggccagataacccacagcattaattttcatatgctatgcgttggaattactatttccatgatcaatagtcgaccccatgttggtaaacttgtcaatcttttcttgacgaaaacattttattagtagtttttttctgctccacttatttttctgtagactaataaagtttctttatactgctgtttcattgtctaaaaggtatgtgaagatgatgataaacaactgaatggttcatcgaatctggagcaatggggagatgctatgcctgtttatgacactctagctgaaattgtactagttgaggaattgtagttataattgtacactgtttctataacaagttctattgtatgatgtaaattatcacttgaatgaataaaatgtgtgttttctttgatgtccctaactgtaattttttttctgatgctaaatgaaatgtaatggtatttgatattgcccaaaagaatctgtagatggcacaattgtggtctgttcccgtgtcaaacaatttcttccctagagacggttgaaggtgtgtctactctctcaaatgcttgaataatggatttttctttttatatccacaaaaaatggaaaataaatgtagagacggttttgcccatttctattgaccgtctctacctcatagtcacggttcgcacaaccgtctctcttttatagagacgggagcaatggcaacgcctctgagacggtttcaggttctgaaattgtctctagtagatgtagagacggtttaaaccgcgtctataggctactaaaaccgtctctacacgcagtttctgctgtattaagccggaacagaacccataacattagcaattgaggcatttttccttctaactatagaagacaatgaggggtacttttccttcaaagaataactccctagccatttggacaactaggactatgcatatattattaaggtccacttggaaaatcttaatatctcaataatttcttcaggcatgtactctgtgtattctataaatacatcctccctaccattgtttccccaacaaaatataggcaaatactgaatgggtggtctgtgtggcaccatgattaattcttatcttggccatgctgccagcaattctaactatggctgatccatactgtgactgtgattgttcccagcaatgtgtagttaagttgcagtatttcttggaccaattccgtgctggagcagaccatccaaaccgcaatgaataattcgtgaaacgtggaggaccttctgggttaggcactgggcttattcatgactggagtttaaccactggacttgaccccaatgtaaatattgttgggcgtgcacaaggatggcgtatcgttgccagccaaagttccccagttaattggtacctttctcagaatatagtatttcaggacaagtaaatgctactcactttttagatagactatatactacttttccattggcttgtatcactaattaaattgccatccatggcaccattatagtaagtatgcatggtctacactttaggtgatgggaatcatttaaggaagtgaagagtaagttggagagtggtcaattattggtgggactggcgaatttactaatgcgcatggtaatatcaagtatagggaacttgatattcaggtgttctacactccaatcactcaatcagatgcaagtttcttaagaagtactgctacaactcttttacaggttgtttggttggaacaatgggatatgtgatggtctacaaaattattgttatatgttacagctgggagaccgctgcctccaccgccgttgttgttgccgccctgtccgaggcccaccgtcatcatccccgcagtggcaagcgacggatccgctccgccgccaccaccctagccaatgctgccgccgccgtcatcgatgccgctgcctctctcactgatgcagccgcccccgccacccttgacgtggccaccgtcgccgggaatgggtagaggggggggggcagggggagagggaaagggagagggagagggatgggatgagtgggaatcggaatgggatcgagatgggaggagtgggaggatgggaggagcgtggtaccaggagaaaaataagtggggtaggtggggcggtgggctattttcgcatgcgggtcacttaaaggtccgcatgcgaaaataaggctattttcgcgtacggatctattaagaggctcacctgtgaaaaatgatttttccgtgcggtccttctgaagagccgcacgcgaaaatagagcactatttttgtagatgtgaccacttactgtccgtctgcaatctaaagtgagttttgtacaggaaaatcatctctactagtgcgacaccctcctggagtatgctagtttgcccgtcaggctacccgatcagataactccaacaccacatgtctaaccggcggtacccgctcagtgtgactggccacttagagccgataaaaccgttcacaatcgaaaaacactgttcaccgtattttcaactaacacttacctttcacaattgtttgtcaccaagattaatcatcacatgattctacatgtacatatatatgttatgtttgcgaatgacaggaatttactcgctgaaattaagtgattagctgatgccaatttagaaggtctggtatcctattttacgcatatcatcatgtgggcttggcgttctataaaaagaagatttcgccatatcagggtttgtggataacttgtatatttttagcttttcctgttctcaaatgaccagccatgagtatgccatttcttaggagggatcgtgagagttcagttaggggaacaatggggaataaatctgatctagtatattacttttcaatttctttaggagattttgcataataggccagtttggtttggtaccgtaccaaaatcttggcagtgccaaagtgttggtaacttttggcacaaccaaatttggatgggcaaaatttctactatctaagagatggtgttgctaaaatttagcaccaatccaaacatctagaaacactactgaagattgccaataaattagtagggcataatttggaaccaaaccaaagcatctccaatagatgcctaaaatttaactcccaaaaatctcagattggggtcatcccaaaacaatttgagccaaaaaatcacctccttgtccaagagcttccctatttttagttcccaaaagcattgaataatgccacatcatcgctggtgggtcctcttcaactgtttctagcaatctggtttctcatgtcgctactaggccgatcgttggcaagatcagggcatggcaggccgatcgcggccacatagtcgctagcaggctagcaggcaatcaccacagagacatgacggttaggcgatcggggcattgcagctgggagccggcagcccgggcagtgcgcggccagcctgcgacacggtgagggtgccagcagctagtaagtcttgcattatgacactatattgtggatctaggtcaagtaaagattacactatgacaaagttctggtttgacgaaccagatgtgctgaaactgagctctccaacaatcatggatcttgggatgactataattggcaaatgcttacaagctttacttgaatttgaaaatgaggacatagtataaccataaacagggatccctgaaatcgctacaaaacaaatcccttgaattcataatatccgtgaatatatctaggtgaattcctaacaaatacattgaatttctgaagttcaattatgattgccaacaaacattaccatttctagccctctccttccctgatttggtgtcacaaatcatcacaagaataaggctaggtaatgccctctccttttcccgagttatgtaaaaaggcataaaaatattattatttactgaaattttgactgtaccacacgcataatatggtttagattttcagactacattctaaaccagattattcagttcagcaatgtcagtactaccaacgccaaattattcagcatcaaagagttgataccttgcagaatctcttgaagcttcagtatgcaattgcttcatgacaggcagtgcagtgtagtgttgcaaattgaaaaacatcgagcaaactgaaaaccaagtaaagtgttgccctcatccgacaatttaacctcaaaataatgatttctcaatcaaccaaaacttaacaccatatttgtcattgtgtgcaagaaaaatagcaaatagacatccaccaaacaatattcagattcaatttgctctagaaaaagtacaacgatacacatagtcaaaattttctttaggttcattcagtactagggcttgagcagcttacagatcggcgggtggatcaggatgacctgccgatagtatgcagacggccttggtggtgctgtggagacgacccagcggcgtggagcggtgaacaaagatggccctagcggcgtggacgacaacggccacgacggcgtggatggaggtgtcggtctggacaaagacgaatggaacggagaaagcccgacaccggcagggtggcggcgtctgatgcgagctaggagaggggactgagcgacggcagcagggcacgacgaggagaggagggaggaggaagaaattggcgcgagcaaagaaatctacgtgtgatcgctgcgattgggaacgcccagggctgccccaaatctgactcggttttgggactggattgggcgtgggggatttttgggagcaagtttgggcagctgttggagctttcctttgaactaaaatcctaaaatttaatttttggggacctgtttaggcatctgttggagcaagtctgtctaatattttgatatgttgtcagtagtgttctcatatttgcttctgagtcagctagataggcgtatgccacttatttggacatgactagatagagaccgcactctatattgtcttaaccagagacttatcttagacctggttgcatactagtacaccaaatgatacatgtttttttttcttatagatttttcttttaaattatttatccgatttataatccgattacaccattgtgttcgtttaaattaaatctttacaacaagatcttacatgactatattttgataaaagaaatatctatgttgtaaattaattttattatatatgtaagttacttttatcatatatataaattacttttcgatttgattaaattacttattatacaatcataatgttgtgagttgtttattttattatcctttttagtcaattctacaatttgtgttgattaaatttagtttttagatagactcacgattttacctccataacggatctatttttaatgtcatgacaaagttacttcctttttgtcttaagttacttctataatatatgtaaattacttttatatgtgtaagaagtaatttagtgaaatctaaaagtaatttagatatactgtaaaagtaatttgtaatttttcatcaaaatataatgatgtgagatcttgttgtaaagatttaattcttacgaacacaaccgtacaatcggatcgtaaatcgaatgagtagtttaagagaaaattttatttgaaacataggtaataggattatattttctacttacttgatggggactagtactatttaaggcagatagggtctctcgttagcactaaaacgagaggcctcttgatttagattttgcccacttattagttattacgatgttgtccagcttctcatcttaagcaaaacaattaatggaacttttttgcttccttcttatctatttaagtggtcgaacaaaatactggaagtggccacatatagtagcctcctcaccgcttgcaaccttgtcgtgtacgatgctaatcgataagccatgcgctgacagaggcatagagcaggtgtacatgaatagctactacgaaaaattatcgcaaaacagagtaaaagcagagtgctatcaggattcagaaatactctctgataaggttgacattactgatcttgtggctcaatcaagaaacacagacccacacgttcaactgagcgagcagttctcagaaggctgcaacagtaatggcttccttcagatgtaggaatacccattcctgtatgtatagtttcctgatgcctctggttccaattgatggttagtgtatatatacgctgctgctgtattttctaagaggggttttacagtgcttgggaggtacctggggtacctcctaagccaattaataccaaccgttgattctgaaaggataatttaggaataagaaatattgttaacgcgggtagattagtaattactcaaccccctacccatcgactggccagcgacatcctatgccgatgctgagcgccggtgcatagggcgtacggcggttgatctaaaggtagcagatgcagagagaagaaagagaagttatccctcataggatctgaaccagaaaaggtacttgcaatggatattggtagaaatgagacgaggaggtgaaacatatatataaacactggtctagaaatccttagccaaaaaccgacacatctgagtcatttcccatcgagcctaagccatgcacatgtaggtggtgaaaatgaagaatcaacagatatatatttgcgtcttgttagataagcttttcaagatgtatcttataaaggcaaactctatattaaaattgtaccacttcatgagtattagaattagattagatttgtatagcctagatactgtatgtgcacatctaggcgccaccccgctctcgccgcgttctccccgcgccactcccctgcatcgtgccgcttcggccgtgttctcgctgcgctcccgctgtgctcccactgcgtcgtgactgtgccacgtcttcgccatgtctaccgggtccaccagattctccatgacttcgggcagcacggcatcaacatcttccggctcttctctgacctccgccgccagcaccggggagtccattggtgcaatcttcgtcaatccatatgccgccatcaacgtcaagactcacatcccaatcaccctggagctcaagcatcccaactttaccaagtggaaggccttcttcatctccatgtgcagcaaatttggtcttcttcctcacattgacggcaatgctcctcctcgacccgacaattcggcttggggacaagccgatgttgtgttcaaggctggctctttggcttcgtttcagatgccatcctcgacatcgccatggaacccgaacaaacatcccgcgatctatggctcgccatcgatgatctctttcatgtgaccaaggaaccccgcgtcatctatctcagtcatgagttccactcgatgacacagggcaacttgtcaattgctgactactgccataaggtgaagaccgccgtcggtgccctcctcgacttcagccaccccgttcctgagtctcagctcatcctcaacctacaaagtggcctcaacccacgtttctccagcaccgccgaccacatcgctggtgcccccatcctgtcgtccttcacttcggcgtgcaatacattgttgctcaaggaacttcgcattgctaatgaccacaaggtctagaccgaggcagccacggtggtagctgcctcctctgccaacacttgtgcctctggcacttgcgccgcctcttcctcgtcgcagcctcgcggtggctgcagtggctccaaaaacggacggaagcgcaaccaacgacgcaatggcggacagaacaacagcggcggcggcggcaccggcgatcgatagaactacgacggcggtggcggctatggaaactctggaggcagctttcagcagcagcagcaagtgttggcattagcttcgcgttaacgacccatggttctgctttaatccatggcccatgcagcagcagcctccctggcggccccctggcaacggtgccgggttgcttgggccttaccatcaagtccacacggactttgccggcccatacgtctcttcaccaactccgggctggcctcaaatgcagcaagcttagcccaacagggatcaaacaggtctggttgctgccctcaatcagttgtccgtgagcagtccaaatccctgggtgcttgacataggagctacttcacacatgtccaccatcgatggtattcttgttacttgcctccctaattcacatacttttattaccgctggcaatgatcatactattcatgttatatgtcatggcacatcttttctacctataggaaccactaagtttgctcatagaaacatccttctcaccccttctttggtttgaaatgtactttccgttcatcaattcacccacgacaataaatgttttattgagtttgatgagtttggtttttctgttaaggaccttcggaccacacgcgtgattcgtcaatgcaatagttggggtgacctctacaccctgaccactgccgcccctgctatcgccgccaacaacttcctcgccgaatcctccacattgtggcatcgtcgccttggtcattctagttcagctgtaatctagactcttctcaaattaactattcttccttgtactaagacagatcataaattgtgtcatgcttgtcagttagggaaatacacgcatctattttttctcggtctcattctagtacctcttctccttttaaacttgttcattgtgatgtgtggatctctcttctgtcttgagtacttctggctttaggtattatttagtggtgcttgatgattttagtcacttatgttggacttttccactttgccatatgtctgatgtacaccagcgtcttgttgagtctgttgcctatgataagaccctgttcggccttcccattaagtgctttcaggcggataatggtaccgagtttgctaaccaagccaccaactcgttcttcgctagccacatcaccatgcttcgcctatcatgcccttacacctcccgacaaaacggaaaagccgaatgcatgcttcgcactatcaacaactctatttgcaccctccttatccaagcatcatgcctacatcctaccaggctgaagctctagccactgccacatagttactcaatcgacgaccccctactgtagtctacaactccatcctgttccaaatcttgcaccgcaaagttcttgactattctaaccttagggtttttggttgcctttgctatcctaatcttagtgccacgactcatcataaacactctcctcggtcagctgcctatgttttccttctctaaccggcctctcacaaaggctatgagtcttcatatctcgtcatgtggttttcgatgaacaaacgttcccatttgcagctattcccctggccgctcttctgtcgattttcttctaccgggtgcttctacagcggtagctccgtcctccttggacgttgagcgtttgcgccctctgccggccggtccctcccccgaggtcaagtcgccgatctccgatgacttggccggccctgatataaatcagcttgtccaacacagcagacagatgccatcatcgcatactccggaccaggttgcctcgtcgcctagtgcgccctctggtgacgactcttgtcctacgggcaggagcatctcctcttcatcaccaaccagaacagtctacattgagctcttctgctgatcggcagcccgttcggcagcccattttgcatggtgttgctcctgcccgaccgttgatctctccgtatcgacatacgtatatatcatgttggtgttccagaacatacgtatatattcagaaacaatatatacggaagttggctttcagaaacaatatatatcggcataagtattgatagagagaatagatgtggaagtatacttacagaagtggaatacaagatgatgacaaaagagaaagagaattgtcacaatacctgtatttcagaacaaatatgaatagtagtttgccttttacttgaaaaatgatcctaattacaattcaggattagaagacaaatatgacaaattcagcattgcaagcaggcatctgaaacaataacaggcattttgttgggtaaatttgtgcagcctagtttgtttgctttgaaaataaaacaattcattttagcaaacagccattacagtagagtagcaacaaaaacaggcatcttaaattatggccttgcataaatctagctaggtatttcttgggtattgcacaacaattggatatacatgaatattcattggtcgttgtgttttgcagctcaaaattagttaagtacaataaccatgttattaattgccaatttgttgccagagaagctcagtatttggggtactattatagtcatcctgctgacgaaactaattaattatgattccatgtcctatcttacgtataaatctactagaaaatcgtgacaatattttactttgtattttttagttccttaagtatatatgattctggttttcagaatatgcatcgcatttccagagtatgaacatatgtagtaggacatatcatcatgtagtttcacatgcgtagccatcacacaattgtcagcttcgaaaatcaatagctgtgcataaatcatagatgggatcaaattattttagaattagggccaatgaaattgtttcacatcgggggcatgtgctatatatgtcatgccaaaaaggaaaaggttcacatacaaatatttagtacaactgaaagctaaattgagggtatggatttatgtatatattcagttgtttccttgctcacacatacttccatcaaacaggttaatttccccgcttgcgttacatggttatgtttatcctctttgtgcaaaaaagtccaatactgaatccagttgtcggccctgtagatttcttacataggagaacaaaattttgtattgtcaaaacacgttgtcaaaatttttgtttaccctgtatagccacattccaaagatattaaaagtactatcaggtggtggaagaacaaaagctattttagttgcatcccaaataaatttagcaaaagggcagtaataaatagatgttctcatgttctgcagctcaaaattaattatgtacgataaccatgtcgttgatgccattttttttttcgaatgattacatgtcattcctgtggggaaatgggagtaaacacatctagctacggcaaaaccatgataataatattttgtcaatgatcatctttcttacgtataaatgattctgatttcagaatgtgcatctcattcccccggtttatttgttttgcgaaacaagaatatatataagtgggtcttaacatcttgtagtttcacatgcgtagccatcacacgattgtcagcttcgaaaaccattggctgtatataaatcatagattagatcaaattaatttggatatggaaccaatgacatggtttcacatgggagacatgagctgtatatgcatgtcatgccagaaaaagaatggctcacatacaaatatttagtacaactgaaagctattccgaggataaatatgcctttttttccatgctcgatcatatattttttctgaaagccaacttccaccacccccagaaaataacatcctataccagcccattgtttctgatggcattattacaacatgaacagctagcttgtggcaccattcagatgggcaaaa

SEQ ID NO: 23716 - DNA, 1293 bp, Oryza sativa
ggagatggtgcagtaaagccaggcgaggacgacgcagtccatctgcttccaatcggcacgatgggggagatgttcgtcggagaggacatgttccgtcaaggcatacttgctgagggcgacgaggaagaggccacgccacttcgtgtagtttgcggcggcgacatccagtgtgacaggaacaagagccttcacgttgaggacgctgatggcctaggcgtgaagggcggcgctggtgtcggggtcgagcacaggcgcagcgcggcggagtgagatgggccgctgccatgaacgccatgcgggaaccctggcaggacagaaggcttgggccaggagtagtgggctggcgccgagccgggtggaggcaggccggctgccacgaagagcgcggcgaggtcgacgggtgtcgcgggctcgccggacggtggagccgaggtgccgaccggaagcatggccgtcgtggtcgtcgttggagcgtggacgtcgacgggcggggtcggtgctgggagagacgcgagaaaggtggagagcgcctggcgcgccgtggcggacgccttggccgcagcgccgtcggcgacgatggtggcagtgtcggcggcgatagagaggccatcgggggactggaacgccgcgcggacggcgttggcagcggcgtcggcggcggagtcgagaacagcggcggtgggggagttggtgtaggaagccgtgtcgtcggcggttgccatggcgagcgacgggtgcagcaggcgtgctacggaaggaagagagcggaagaggtggatcgggagtctgataccataaaagggaatgggactcaacgagatggtgtattgatcacggagatttacatatgtagcctcatcctttccttacacaagcaaccgatttatggaaatagtatcgggtggattaggaaggagagccaatcacacaaggttgccatctatagtctaacacttcttcatccacacgagcaatgacggggagaagagtaaggggctcacctgatgtctgcactgggaggaaggaaggcggcgccgggaaagtcagtggcggccgcggatgcgtctacaagtggctgctccggcagatctgatgtgaggcggcggcggtgtctacagcgagaggaggcggcgacgcgagcggatcggtggaaggcagcggcgcaggaggatgtggtggtgggaggcgccgtgtcaagccctcaatattcagagaactagaaatggaacccggaagagatcgatacgatatgtgtgcgccgcaaggacctaaaactagggttcctagatctaa

SEQ ID NO: 23717 - DNA, 1520 bp, Oryza sativa
ttcagatacattacatgggattgaaaactcattgacttgtggtggtgtatatccatacagggccttgaagggtgtcatctgaatcgcagtatgataggtggtattgtaccacaattcagcaagtggtaaccaagaataccagtttctaggctcttggaatgtcatgttcctcagataggactccaaacactgattaactctctctgtttgtccatcggtctgtggatggtatgcagtgctaaaccgcaaatgcaccccttttgccttaaaaatttcctggtaaaggttgcttgtaaaaattctgtccctatcagtgattatagccgtcggcatgccatgcaatttgtgtatgttattcatgaacacttccaccacttgctcaacagtatatgggtgagatagagctaagaaatgagcatacttagtcaatctatctaccacaaccagaattacatccttccctcttgatatcggaagcctttctatgaaatccattgtaatatgggaccatgccatgtcaggaattgctaaaggatctagtaaaccaggcacatgtatgtgttccccctttgtaacctggcatatgggacattcccacaccacttgctcaacagtatatgggtgagatagagctaagaaatgagcatacttagtcaatctatctaccataaccagaattacatccttccctcttgataccggaagcccttctatgaaatccattgtaatatgggaccatgccatgtcaggaattgctaaaggatctagtaaaccaggcacatgtatgtgttccccctttgtaacctggcatatgggacattcccttatgaacttatctacacttctctttaacccagaccagtaaaatagtgttttgattctatgataagttgccctcattcctgagtgacccccaaaagaagaagagtggtaggccctcagcaattctcccctaatttctgtggcttctcccacataaatccttcctttatatttcaacaacccagattccagcttatattcttgatttggatcaaccattgtcccaattatactgagtagtttatgtgcctacacatcccccacataacttctcttaatgtcttccacccaatctggaactacagtaataatagcttgacatggtatttgttctgcttcctgttgtttaggcaacctggacagtgcatcagccacaatgttttctctgccaggtttgtactcaatggtgtaatcatattccattagcttcagtagcaacttgtgttgtattccttccactaacctctgtttcatcataaacctccgactttgttgatcagttcggattaccaacttcccccaaggaagtaatgcctccatttcttaagtgcttccagaatggcaattgcttccttttcatagacagattggctgttagcttttggtctaaatgctttgctaaagaaggctattggcctaccagattgcattaccggccctaattcctgatccacatgcatctgcctcaatgacaaact

SEQ ID NO: 23718 - DNA, 3016 bp, Oryza sativa
atcaagagcacctcgttctgataccaattgaacgcgcagagatatagcctagaggggggtgaataggctttcctgaaattttctcgacaatcgcagtggttataataacagggcccggaacctcctggtgaagaacaccggaacttctggcagtgatgagcagcccggaacttccggagttcttgagccagaaacttccgggcaacagagaaaatcgaaatttggggaagcaaaacaggtcctagccagagatgatcagccacagagttgcacaagatgtaaatcacaagataccagcagattcaaacacagaacatgcacaagagagacaaaggcgattttttcccgaagttcggatcacacggatcctactctccgttgaggtgctcaaagagccgggtctcgattaaccccttgcctcacttgtggaaagatcccagaaggagtccacagccttcaactcaacacttctaggtcattttctagaatcgagtgaccaccaagatccaactcacaatttcttctagaaaagaccacaagtgcaagttgctctacctaggagaacctctgaaaactcagcacaagaatctttactcacttacctcgtttccttgcggagatgaggaaaaccttcacaaactttcctgggacgtccacaagatctttggaagctcacgggcgacacctaaccgtctaggagaagatctccaagagtaataagcccaagtgacagcccacaagatatccaaagtgctcaaacaaacctaatcttcaagccatctccaaaacactccaacactctaatctaatctctcaatctcacaagataggctctagatttgagtggaggaagcaaaggaagcttgggagtggctagaaaaccctagaacatgaaagagctgaagtggaatggccaaagggtgacctggggacaaaatccatagatataacggctaggtgacgtcatctagccgttactcacaagtttgagctggaagccagccaggaggttccgggcaaaagtgccaggaacttccgggaagcacttaggaaaattttggtgttgaaatggcgcccggaagttccggccagaacctccgggtagccctctctgtcccggggagaaaaatcatttttcaaaaatgattccaaaaatattttgactcatggatatgactaagatcactttgtataccctagaaccacacttgaaacccctcttaatagtacggtttttcctaaactcaatttcgaaagtgaaaaacctagtctaatcacctccggtgtttttcgcacttaggaacattcaaattggggggtctccttgcattcttagccatcacaacttgctttaggactaaactgctgtgaataaacttgataaacatgttagtcccctttaagcaccttgtcattaatcaccaaaacccactagggggtttaagtgcatctttagaagaagcaatcggaacccgcatcactcaaagactaagtctaaacctgcaagcaaaggttatatcaacagcacaagtcaatcctaacatactacatgtaaggcatatattcaaaggaagacaatatgtagttcaatttcagcataaagcaagttttgtttcgcaattcttttgtaaaggagttgatgcttcaactaacaaaacaaatttttaagtttcaatattaagttcatcttaattccaacataatcaatctcttgttgtcatcttttgacaacaagtcgtaatatatcaccacacacacacaactcaacacatttatcaattttaaaccagtcacatgttcacattttaaaacattgtctgtacttatgacacttcaccaaattgctcttgaccacgagcacggctaatcgattagtttaaagaacactgcagagtttgtacacctttacccacatgatgtgatagaagcccggaggctacactctagttggttaagtgccggccaagcaccccacactcaacattatgagtgcggactagaggtcacaacgaagcctttacactacttagaatctagcgttggaaatatgtctataaccgctaagtgccaggcccacgccttaaacttaacgccgtggtggcggacatgacggaaacccaccacatggcacaataccattgtattggacagacttagtcacctaaactatcacgttagggtaaaaaggaagttcctctgaatcatcgactaattccacggaattatcgactaactcatacacaccggcctaccagaatgcaagtttagtcctaaatagattactcagcttaggccactcaaaatagcacatgtggatgtacggataactttaaatgggtcacacaagttcggtccttacgacttgggcaaacacccccctattggtgtgcaactaacaccatatgcacaccacttgtcgcgcaagtataaaatcacattttacatattttagttcgcgaatacccatcatattcattttattccatcaagggttcatgtgtcaaaatcacattttaattatagatggaatgagttgtaacaccctaggtaaccacgtacctaaagtgccacaccaaaatacattcaaaaccactaactcctaaaattattagaaatttcagcagagcctcccctaaaaatacggacatccacgacaagcagttataagataactcaataacgatataatccacataatccaaaccatcctagctccatgaattccccgtgaaaataaggaccgaaactttaaatgacttttacaagtactacgcaaaacttatgctaagcagaaacataatctaaaactaaatttcaatagtgtgcaataataatgtgtagtccaagggtgctactcccgtcccatgccgatcaatatcattaggtacctaaaaaccaaattaaacataagagtgagcaaagaatactcagcaagtacaatattgaactagtaaaacatacactggtttaatgcaagaagaaaccaatatgaaacatttgatttcctttaatttaa

SEQ ID NO: 23719 - DNA, 17493 bp, Oryza sativa
ttatggaatcccaacacaatagggaccaacactttcttccataaagtacctcatatggtgccatttgaatgcttgcatggtaactattgttgtaagaaaattctacaagcggcaaatgatcctcccaactgcctttctaagaaagaatacctgatctcagcatatcctctagagtttgaatagtcgttcagattgaccatcagtctaagggtgaaaagccatattgaatttcagttatcaaatggctcttgcacagactcccagaacttagaagaaaatttaacatccctatcagaaacaatcgagcgacacacaccatgtaacctcactacgtcgcgtgtataaatcggtgctaagttactcgatgaataagtggtgcggataggaatgaaatgtgccaccttacttagacgatctacaactacccagatggcatcctttcctcgtgggttacgaggtagcccaaccatgaagtccatagcaatatcatcccaagaccatacaggatcttccattgattgtaactttccagcataactcttatgttcagccttcactcgctgacatactccacatgatgccacgtactttgccacatccactttcatcctcttccacctatagatcttcttcagatcatgatacatcttgttcttgccaggatgcacagtataaggtgttcggcgtgcttctcgcaaaatctcttccttgacttcagctttctgtggaacacataaacgcccaaggaatccaaagtgaaatctccagattttccttcccttacacgtttcttaactttttgcagcaaccgacgtgttgttgggcctctagcactcattgtggtatgacggactcaagaatgactcgtgactcggtattcgccactccggcgtagcaataggagatattcatccgttcaaaattagttatcaacaactcacagtcagaggaacgaccttacggcttagagcatctgcaaccacattcgccttacccggtgtatattgaatattgagatcgtaatctttaatcaactctagccacctcctctgccttaagttcaaatccttctaagtgaagatatatttcagactcttatgattagtgaaaatatcacaaaattctccatacaggtagtgcctccaaattttgagagcaaagacaagatcatgagtggagtaattctgctcatgcttctttaactgcttagacgcataagctataacattgccctcttgcataagaacacaaccaaggcctactcgtggagcatcggaatagacagtgaaacgcttaccaggttgggggcaaagtaagcaccagagcagttaccagcctcagcttcaattgttggaaactacgctcgcataggttcgtccactgaaacttcacatccttatgtgtgagcatcgtcataggtttagcaataattgagaaatccttcacgaagcgtcgatagtaccctaccatacccccaaaaaaaaaactcgtcacatccttaacattagtcggcctttcccatccgacaacacttaaaactttgctaggatcaactgagataccttgctgattgattacatgccctaggaaagccacttcaggaagccaaaattcacacttctttaatttagcatagaacttgttttcccgtaaagtccctagcaccatcctcaaatgacgctcgtgctgctctacatccttggagtaaatgaggatatcatcaataaacaccaccacaaaattatctagaaagctatgcaacatgcaattaatcgcctccataaaataggctagagcattggtcagcccaaaagacattactttatactcataatgcccatacctcgtggaaaatggagtcttctcaatatccccttctcgcactcgaatttggttataaccagattgcaagtcaatcttagaaaacacctttgctccctttaactgatcaaacaaatcttcaatacaaggcaatgggtacttgttcttgattgtcgcagcatttaaggcccgatagtccacacacatacgccaacttccatccttcttctcagtaaaaataactggtgcaccccatggcgacacactccgtcagattaacttcttggataatagatcatctaactgtttcttcaactcttcttggaaaggacgagctaaccggtatggggctctggagataggtcgtgtaccaggaacaagatcaatacggaactctacatcacgctcaggtggcatccctagcaattctgcgggaaaaacatcaggataatctcgcactacaggaacatcttcaatcaataaaggcttggatgccttctcggctaaggcccacaataaccctgtctttatagcaagctgtctaggaaacaaccttgccatcatgaaaagagaatgcggaggcgcgctcccttggaaaaccatatcgtcgcctgatggagcttccaaggtaatagtcttctagaaacaagagattacagtacggtatcggttcaaccaatgcatgcccaagatcacgtcaaagagcggtaatggaatcacaattagatttgccacgaattcttccccatcaatagagattgcacaacctggacatactactgaactagagattataccccctggagagctgacttggacagattgagagacctcttgactaaatagattagctcttttcgcaaacttgattgaaacaaaggaaaatgtagcaccagaatcaaacagaactagagcatcatgcgaatcaattgaaagtgtacctgtaaagacatccgggcgaccaagagaataagctgcaggcatgttgtagactccagccatagagcctgaggcctgctgctgaggtggagctaaagcagaaggatgcaccataggcggtgcaggcaactggagtggtgtacgtggagcaataaattgaggcgtggaccaatattggcctggtagtgatagtggtgggtaattatgtgtgaactgctggtgaggaagtggataagttgtcatcatctgaattgcaccatgaggactactagtggatgaacctgaacctcgagggtaactagttctcgaagaggttgttgattaggagatagacctttgccacgtgatgatagaatttggtttacgcttacataccaactctatgtgtccagccttgcaacacccacgacattccccagtaaacccacactctgcagaatggtgattctttacacacttaaagaaaattagcccttgccctggtacagggcgaattatctgagactctgcaagacgtgaagctgaataaaactgagaaacccactgcctaggtttggatgatgattgagtggcctgattttatttgtacttcttgaatggtggtcgttacgggttctcgtccccttcctgatgggctctctctgttcgttgctagtgacattgccaggacgattcttctatgcagtagtaatttggggctcaacctccatcccccgagcctcctcaactgtattgaggtatacagtaggcgggtttcttcccatcacttttgtatatcgggcattgagccctcgaaagaacttcctagccttctcatgctcatcactagccacgctaggcacaaagcataaaatattgctgaactcccgctcatactcatccacagtcttgcttccatgttggatattgtttagctcatcactcatcatgtccccaaatgattctggataatacttagctctgaactgctgaagaaaaacttccagagtaatagcaccacggtcagggttccacgcttcaacaacttcgtcccatcaaatgttcgcctgactagtcaactgaaaaggcgtgaaagcaaccttctcaggggtcattctagatccactcatgtacttctccatcttgcgcaaccagtctgcagcatcaatgggagtactagacccatcaaatgtgtctaagcgcacggatgtccatctagtgagtgtcattccccgagtagctcgagcagcatcattagatacaaacagccggtccatgtcctcatcttccatctggttcgatgatgccgcctcattatggcaacctctaccacggcctctagcatggcccctaccacgacctccacgattaggaataggggattctgcaaccgagttgttccctacctcttcatcctgattattttcaacttcttcattatggtggcccctaccgcgacctctacctccgcctctcctgcggcctcagttggctaaccgagcactcactaggcggcatagctatatcaaacaatagcatgcaaagaaacacaatcatacacacatatatgcagcagaaacataaatgctaggaatgacccatgcacccccatcctattgtgcaccagtgtgtcaagttttagatgattacatctaatccaagttttactttttattattttctatcctaagagaaatttttaattggataggaaatctagttcaaaattttatgtcgatttatatttgatgtaacccagtcacttcacatggacctaccgcctgctctgataccaactgtaacaccccaagtaaccacgtacctaaagtgccacaccaaaatacattcaaaaccactaactcccaaaattattagaaatttcagcaaagcctcccctaaaaatacggacatccacgacaagcagttataagataactcaataacgatataatccacataatccaaaccatcctagctccatgaattccccgtgaaaataaggaccgaaactttaaatgacatttacaagttctacgcaaaacttatgctaagcagaaacatagtctaaaattaaatttcaatagtgtgcagtaataatgtgtagtccaagggtgctactcccgtcccatgccgatcaatattattaggtacctaaaaaccaaattaaacacaagagtgagtaaagaatactcagcaagtacaatatttaactagtaaaacatacacaggtttaatgcaagaagaaaccaatatgaaacatttgatttcctttattttaaaacgaaggaggcaaagagttgtagttccctcccgggcaggtgtgaatatcctcttagcattaccggtaagccgagcaagcgtgatcagcgcttctcaaggatcatgaataaaaatccaaattgcactcccatgactacgcatggtacttgtataatgtaaacaaaaaacttccggaagaatgaaacatgaataacgtcgttaacttgaacatgaagtgaaatatgaatatgtagcataataccaaaaccacacaattaataataggaagcttcgaataataattgggtaaatgaaaccaacaaagcaacacagtttatccatcactcaagcccatcttgtacttgccttaacttcttcgataatccaactcaactcctccaagttggaaccctccacacctgtggagaaaaactacgcataaaccactatatccaactaatgattgttacaagggacatttagtaaaatcgaaacctagaatatataattttttaccgatttatattaaataacctatagctgttcccttactgttttatgcgtaactcacaaaccgtctaatgaaatctaagaaataatataacttcggatatctgtacaaaattgtctacaactttcatgttgggcgaaaattccgattatgcctctgcaaatcccagattaaggaaaacaaattgctgtcctgatttccggacccagtcagcagtactgtttctgttgtttctcccaaaccgtttatcggaattgagtgaaaccagcgccgtttgaaagatatcgacgatgactacaaactttatttaggtcaactaacctgaatcccgacggtttattactagatttaaaaatacggtttcagcctataatcaataacctcaaaaattgcacaaagggctatcgaataaatttctatttgaatcttatacttctaaggggtaaccaaaagtaccgttgcagcgtggatactagaatttgagaacaaacccgcaagccgcgaaatcaccgaaatctccaaaattccttcttcctcctattatcctcctccctggccacgcagcagcagcctgcaggctgcagcagcgatcagcggcagcagcaatcgcatgcatccgcagcagcagcaggagcaagcaatcgcatgaatcagcagccagcaaccaaataaggagacgacagcagcacaaagatcggcggcaggagctcaccaagaacgagccgagcaggaggaatcaagtggccctgatggacgacgacggccgaagcagcggcggcggcgcagaggcgacgtgggcaaccagaacgaccgcggcgacggcaagggcgcaggacggcatgagcggcggcggctagggttttgctggcgatcccttttttcttttttttttgttatataaagagacaataggagatctaacggcccatatcgattcgatccccgggacttcgttcggactccgattactataaatttatagtctattttgcacaactcggcgagctctacgcatccacgattcttgatcgcctattcgaataacggtttaaaagttgaacttttacgtgtttactaattcgaaattcggggcattacattcttccccccttcaatcgaattcgccctcgaattcatccaaccatactctagaacatggggtattacattcctccctccttcaatcgaattcaccctcgaatttgtccaattatacctcgaataactacagaaaggaactcataggtaggacttgtataactcacttggtgtgaacaactccgggtacttctccctcatttgtgactcaagttcctaggttacttctcgctctgtctggtgcgttcagagaatcttgacgtacttgatagttctatgcctcagttccctctaagattcctccaatattcgtacagggcgggactcaaatgtcaaatcttgctcaatggccaccggctctacgataatacgatgatcagggtctctcaaatttttctcaacatggaaatatgaaatacatcgtgtacacctttcatggactctggtaactagatgtgataggctaggattccaactctttccactatcgagaatggaacaatatacctagggctgagtttacctttcgttccaaatctcacaacgcctttggtaggagaaacctttagaagtacttgatcgcccactttaaactccaattcccgtcttctgacatcggcgtcgctcttttgcctactttgagctaccagcatgtgttgtcatagttctgctatccgttctgtgtcaaacatcaaggatcacaattatgcaaggtagggaatgcagcaaataggtcataactaccttaacccagtttcaaataccgatatagtctaagttcacatgcaagtttgcaaacaaacatttttcattcctcaaatcatgggattcgatgtgttcaaaggatgggaggagaaaaacttgccttgatcagagaaatgttagcacctaatccactccttcaccgaatatgcaattatctaaataaaggacacgttatgcaattaaacaccgaaagagctgaaaatccaaaatgctctaaaatgcatgatttatacacagtgattaggtactggtctaaaatgaatttaggtgaaagaatttctattttatcttattccatttgggagttatgaattttagaagttttatcggtttatagtagtatagtcttaggtagtgctacaaaatattattgcaaagtggtttttattagatttgactatacaggggcatagagatgtgttttgtaagactatcgcatttggtttcacaatttttggagttgtaatgattttcttatagattttacaagttacaacttattctaggcatatagtgttctatatgtgcatgactcttaagtcgtaggttcagaacatgctacatcatgtttaagttgaaaaaataagtaatttggttaactaaaatatttttagttcacatgtttatagtttttactaccatggttcatactttataaactagggatgctctagtctaagactagcaataccttatattaacttagaaattacaatatgagccaagttcttctatgttttggtggatagggatggaattatggttctactggtctataagttttatttaggtttattcatagctagagtgcattataaatagttctacacctatattttgcttaaccatcactaggtaattaactcctaggtcatctatttaaagattaaagctataatttgtataaaaggtgtcatatcttattttactatgttgaagctcactattttctggttctatagaaacttggttcatttcatttaggctaaaaatgaattttctacaaattttacaatttaaagtctgctataagttagtaaatccttacatttatttagaggcttttactacacagtaaatataaaattttatttcataacctgggaatacacattttggtgattctacagaacttaagtttactcaaattgaagctaagttgaattttatatgaatttctaaactttaactcatttataactagtcattttaaagataatagtttgaggcatttgatgcaaagtaagtaattacttttatttcacttaatcagagagagagtgcatgatgatgaatctgtagaatttgagtttgtatcaaaataagttaaattgaattttctatgcattttataagtttgtatatgctttatgtatgacctatcttagataaattttagagacaatatttgtacagtgagtgtcaagttttctattcctggaataaagttcataactttttgaatctttagaaactggaatcacctcaaaataagctatatttgatttcatatggattttacaagtttgtgcatttttctgctaaacatatatttgtttgtgcatttccttagttattttccagactttaaaagatggggtccacatgtcattggctgtaaatatgcagagaggcccctagagttctcaaaaatagaacccgcagtccttatacatgtatactatcaaattcattaagaactagtagccatgtagtcacgctttgcacgactttagatgcctgtcttgaaatcatatatatgtatatatgtatgtatacgtatgtatgtatatgtatctatgtatgtatgtatgtatgcatgcatcgttaatatgataactaggaaggtagcccgcgcatatgcgcgggcatgtgcgtaaaattttattacgaatgtccttgtgtggatggttttctatcaaaaatattctttcactttatcataaactaaaattgaacttacttaaagtgctttgaacgttggttacttacaatatataatattatgataaatccactttataaagcatctttgaaatgctttgatcgctgtaagtcgggatgaaaatataagtgggttgatcctacaacctggcatggggtaaaggcattatttctaaattatctcgctccaattaagtaagaaaaattaaaatagctgccttagtattttcttagcaaattagtactaaactggagcgtcatgtaataattacatgtttctagattgttctatgctatatgtcacaaattcatgatgttcctgtagcaagttttaccaaaaaaaaaggatatggtcttttaattcctatctttaggcttatatattgctgaggctacatcacgattgttttactcttaagattcctcggtgcaaccaacgtgctcaggacaataagtatgttgttcaactggccacgtgacttcgtagatcatatatataatttagatgctatgatcatcttaagattatttatatatctcctaaaatgataatttattgataaaagcatcaataccaaaatgtatgggtaatagctcctatatacaagctgaaaaaaagttgatagaaagacgttagatgtctaacgggatatataagtaatgggtctaccagttttataaaaaaaataagctgggacattttgatttttagtgaacaattttagtattttcttttatttagggtaaaatttgctataggacattaaaaaaggtgtaatcggccggaggacaccgcaagaacgcgtatctgttgtgggacacaaaaaaactggtaattagttattagaggcccgtgacattaatttataatatccaaaggaaatgcagagagaaagaataacaaaagtatgacttttccccttcctaccaagtctggctcacatacaccttcgacgctgcaaccgcactagccgccgatgaggtggctctctagagggggggggggtcaaggagggcctgtgcgcctgggcctttggctccatgtcattcccgcactcgtcgcgctgcagcgtgagggccatgccagcactgatgctctgccacacactgcgcttgggatgagcacaacgtggaccatctccagattcctaacgaggagggcgccgcagagcacaggctattgttgtcggtctcacagccatgccatgccacgctgccatacctccaccgcccatgtcatgactaccacggcgtcagagcgatatgcgagccacacatgacaggaagaggcaaaatcatactttcgcgattgtttctctccccttttcctttggatacaacaaaataatgccacgggtatccagcagctcatttaccagtttttttgcggtgtccatagcagatatacgttcttgcagtgtctcttagctaattatactttttttggatgccctgtagcaaattttatctttattgagtagaggctgggtccataatgttatttttttgttagcagttaaatatagtcaatatggacattaagttattgttttctcttaaagaataatagctggttagacctaaaaggtggagattcgtttgtggtcttttctttgcccataaaaataattttaattttaattatcatagagatattaaaaacaaagaaatgtaattccacacaccgcatgggaacggggatggaggaagggttgtgatacttattttttttaagaaaaaaaattgattgatccgacgacctaaaataatgtgtcgatgtttaagtaaaaaaccgttggttggatgttatttttttctcagatttattaggtttttttctaatttaagtgggataaatagcaacttagcaaaacatccatagggatggagaggaatggaagatggtttgggatgtttttttattaaataattagatacaataacgatgtaaaataatgtgtgaattgatttaagtggaaaccaatggatggattaataagatgtttataagatgtttaatggactttaagaatgtcatacaatgatttagaaatatttataagatgtttaatggactttaacacctatttttgagattattttctataaagataattttaatttaattgtgatagggagcctacaaattgatcactctatgcgtggtgcactgtacggggatgtgggatgttttggttttctagtatagatctaacgatctagaataatagtccaccaatttaaatgaaaattgacggttagatttctcaattttattagggtgctacatgatgacttgagagtatttatatggtgccatgtgatggtttgggagtgtttgtagatgtttaatggacttttagtatataatagatagatagtactacgtacatatggtttttctctttatcttatatggtagaaaattatagtttatatttttctcccaattatactatgtactttttttttgactttatcacacaggcattctttttcttccgacgaacggaacctaagcttccaaatcatatgtactgtagttacaatttttcgtttatgccgacgatacatattttcccttttataaggggaggtattaatatatacacctaatgattctaaagtaactggtccaccaatttaaataaaaattaactatagatatagatctaatctaatggtctaaaataacatatccactaattaaataaaaattgacggtgagatcgtttatagaaagtttaatgaatgatatttacgtaaatttatagaatagtatgttttatctttaaataatagaattaaagatcatcaatttttttcaatgtgtaggtttagtttttctgtacgtctgtacttgattgtttttttcagttgtacgcacgtttggagtacttgcaatcatagttctcccgcatatacatatagagattaatgaattagtttcttaaaataaaatatatctaatctaatgatttaaaatattgggtccaccgatttaagtgaaaatcgacggtcggattcgacagtgctacgtggcggcttagaagcgtttgtagaagcgtttataggaagtttaatggacttttagtatataatacatagataagtcaaagccaagtgaaaaaaaccctagctttttatataaccattttgaattaatttatttgcataatattgattggttggattttggatggaggtatgttttactccatgattttatacaattttcttcacatattgctaatttaattacattttcccaaaatagaatttattttacaatctttttgttcttataaatttggccttttggctcttaagattttagaacttaattaggtgaattattttcgtcttgtaaatgaattaaacttgtagtagaacttaattaaaatgaactattttgaatgtatgaaaacaataaccttgaatcatgtaaatttaaatgtctttgagaaatgtatatggacgtctagtttagatatttatatatttccagtgctaattgggtttaagatgctaatttataatattacacctaatctgaaatatactactaaccacatagataacattgtaatatttttaggactgttttacagtttaatacttacttagaggtttaatgcaaatcaaccaggtggggcccacaaggttaggcatgccgcatgcccactgacaaaggggtttcctttctattggtcttggctatgtctcccccctctctctatgttaattttgtgatagtctctagaaggttcttgaagacttgggctagcctcttttaccattctacatccaacgtcagatattggaccccttttacatcctacggctcatatttaattgatgatgtggctaaatgaggtttcaagaaaggttattcctttcgttactttagattcttgagttttgcagcttttactaatagatccttggtcccacatgtcattctaacatattttataatttagaccttgcaagttttaagctctctctaagcggaatcttcagcgcctaatgacgtggggtctgctggtcagtgtctcagcaagagagcaagggcagcagcagagcagcggcgactcggcgagtttctcgccggcgccggcgatgaacggcagccgttctcgcggtgcgaccaaaagagaaaacattcctaagcttcttgcgcatctattcgtagtggtttcatggtcggaggtgaccggaatcgatggtgacagtggtgtgagcggcggtggttctcggggtgacggtgcatgtgtgcatggaagtcgatcccgaacgaaagggatgcatgcatgtggtcttctagccttcaggatgctcaccgtgggtcaagctaaggttgtcgaggtcttggcagaagcgatgacttgcggaatggctcggcgacggcgctcctcctcgggtgaacgatgacggctcgaacgggacgacgagctgctacaagcaggcatgcacaagggtggtgaggtcaaggagatggtgtctgcgcgaggaatcgaacaatggctcaccggggcagcggtaatcgatgatgacggcggaggcgattctagatcggcgccggggaagaaaagatgtgttctccagagccggccggcgctcgttctctccctctcagtttttcttggtcggctgagggtgagggacagaggaagggcgagctggagaggctgccaggtggggccaagtcgatggaagctaggcttgggagagaggtatgggtaggagtttgggtagacttagtttttggacaattttcggaattatttcttctccctaactttgcaactcaatatcttaatatgtggaccggaagaattagtgcagattttactggtggtagatgtttatatctagattccattttctttagttggactaaaaaataatgggtagactgctcacataaattagataaaaatgggctatttaaaagttagatcaaatttttaagagacctaaacagaagataaaaattctagaaaaattatatttattcatgataaataatctagtatttgaatagattatttcccatgttcacttatgagcagttaaatgtacttttgaatgaagtatggcgttagccgattaaaatttaatttgatttcttttagttgtctgtttttactgattaatttgaggtgtcaaacttagttattaatttataccaatattacagtgaattacttatgctaaacatagtttacataaatttttccatgattttatctagattattttagagaattagaatgacctttctttgtatatgtgttcccactttgtaattgcacctaatattattacagggattacattaaatttcttttgggctgagaagatgatatttgagtttaatattaagtccatattttatcgcccaagatccactataagtctgtttagtaaattttaacctctttaggttatgctcatggaaccttttatgaaatacgagaccaaaatccaaatgcataagggactcgagcctaggcatgcattatgcacatgtctgctcatatgctcggtgacatttctagtctaatgttgggaatgaaaaggttttattttgttatcaaattttaatcatgcaatggtttaagttggtcatcacctaagttaaaacggaaatttttgggtcttaaaattggagaagttaacctctaattattttgacaagaatattttttgagtcctagaatttcgggtatgttacattaggcatcctcttgccaaaaccacacgagcaattggtgcaagcacgctctagattctcatcctcttgtggcagcgtcctagtttctacaagttggccatattggagggcatagggggagaggtgttccatcttctctctcaccctctctccctaaatctggaagacgtggatagagttgggctttgtgttgattgtaagggcgttttttaggcgatctcgtctatgttccattgttggcctagcggcggccggtccaattctagccttctcctggaccagtgtgttggcgctgtcggtgtgtgggtggtggtatatttttttccttttttcctggttacgaccctccagggttgtaatcttatagttttttcatgctctatcaatagaagttcgcaccgtcttgtgcgagtcgttcaaaaagaaacaaatctatgtgaaataaagaaatcaagcagatattctattagtaaatttctatccatgcatgcttggcgtttattttctatcaaagtagactaaaaagagaatatgttgttcttacatggccccatcctcctctttttgcaacaaagcctcatactaatccagtgcgcatggtgcctctgaagattaccattaatattggctacagttttgtgttgtcgaaaaagatgttattgtgacttagccgtataactcaaaattgagcgcttatcaaaaccaaaatttgattctttatttaggccatgtttagttcccactcaaaaactttccgccctgtcacatcgaatgtttggacacatgcatggagtactaaatatagacaaatagaaaaactaattacatagattgacaatatgtagttctacagtaaacatttgctaatgatagattaattaggcttaataaattaatctcgcagtttacaggcggaatctgtaatttgttttgttattaatctacgtttaatacttcaaatgtgtatccttatatccgatatgacacgtcaaaacttttcacccctgcatctaaacacaaccttagctttttgtttaccccatatagctactattagaaaaacaatttattgccacgaaaaaaatcgtagcattaatgctaaaattgtggcaataggtacatgttgtcacaatcttaaaatcgttgctagccgtggtaataaatagcatggtaataggttgttgtaacgacttttatttagttgtaacaaattttgatattgccataaaatggatgtggcaaaaaaaatatattgcaacacttcacatcgttaaaataaataactattgccaccactccatgtgtggcattagttctatgtaccaaattaaatgttttaatattaatttatcatcttaactattttttttatatcttgtcatggttaggatttgaacccaagatctttccctcacgcgcgctctttattaccaactcacctaggcatcattttttttaaaaaaaatgcatatcatttcatttgagcgtacctatctgagatttaaatcgtgaatttgagtatttaaaagatttcaaatgaaaaagttaagttgtagagctctaaatttcatacaaaatttatcctaatccgtgtccatataaaaagaataagtcaaattatgaaatcataaattttttattgcaacgaatttattgatcgcggcaatagaaaatagtgaaaagtaccatgtactatgcaaattgccacataaattaaaattgtagcgatagaacatgtttttttgcaatagtaaagttttttttttgtggcgatagctcattttctattgcaacaaaaataccaaataaaacaacgattgtaaatcgttgcaacaaaatatatttgccacaagaaaaattatcattgcgatagtacaatatattgccatgaattatttttcgttgtaataaattggtggcgatagcacaattatcttgtagtttgccaacattgtagaagtactatcatatgttggaagaccaatagctatttgtatttgaattgcacgccaaataacatttagcaaaagtatgatacagaacagatgtgttgtattctttcgttataattacaaatgcaacattttgaactataagtctatactgtccttttgctaaattatcttttgttaggagttctccggtaacatttggaacctttatcttgaggggaatttttatattccatatatagcggtccattatttgtcaatcctctatatatagaatgagctttgaaccatccatactggtgtaaaagaccatcaaaatgtgtcatattggtaattgagtcctatttcccttttttttatctacaagctcactatatctcttcgtaaagaatattttagaggtttataatttaaaacctctgtgactgttgcactttggttccttacaatgcaatatagcatttggtattgttggtttacatttt

SEQ ID NO: 23720 - DNA, 5936 bp, Oryza sativa
  unsure (1)..(5936): unsure at all n locations
gtactgttgatgctgatcgagatggtcctccagagaattctacttcgaccagtactgaaacagaatgtggatcaacttcagaagttgctgctcctctgcacattcaacgacgacatccgccgaaacaaattattggtaatataagtgagcggactacaaggtctaaggtaacggctcataatgtttgtgcaaattctgcatttgttgcttcttttgaacccaaagatgtgtctcatgcattaactgatgaatcgtggattaacgccatgcatgaagaacttgaaaattttgagagaaacaaagtttgaactttagttgaaccaccttctggacataatgttattggaaccaagtgggttttcaaaaataaacaaaatgaggatggtttgattgtgagaaataaagctagacttgttaatcagggttttactcaagttgagggtttggattttgatgaaacttttgctcctgttgctagaattgaggcaattagacttttgttggcttttgctgcttcaaaaggttttaaattgtatcaaatggatgtgaaaagtgcttttctaaatggttttatacaggaggaagtttatgtcaaacaaccaccaggttttgaaaatcctgattttcccaaccatgtttttaaattgtctaaagctttgtatggtttgaaacaaactcctagggcatggtatgataggcttaagaactttttgcttgcgaaactttttacaatgggaaacgttgacaaaacactttttgttcttaagcatggtgataatcaacttttcgttcagatttatgtggatgatatcatctttggttgttcgactcacgctgtggttgtagattttgctgagactatgcgcagggaatttgagatgagcatgatgggtgagttatcgtactttttgggattgcaaattaagcaaacacctcaaggtacttttgtgcatcaaacgaagtatacgaaggatcttttgagacggttcaatatggagaattgcaagccaatttcaacaccaattggttctacagctgtgttggatccagatgaagatggtgaagctgttgatcaaaaagtgtatagaagtatgattggatctttattgtatctaactgcttctaggccagacatacaatttgctgtgtgtttgtgtgcacgctttcaagcttctcctcgtgcttcacatcgtcaagcggtcaagcgaataatgaggtatttgaatcatacacttgagtttggaatttagtattttacttcatcttctatatgcttaagtggatattccgatgctgattttggaggttgtagaattgataggaaaagtattagtggaacatgtcattttcttggtacatcattgattgcatggtcttctaggaaacagtctagtgttgctcaatcaactgctgaatctgaatatgttgctgctgctagttgttgttcacagattctttggcttttatctactttgaaagattatggtcttacttttgagaaagtacctctcttttatgataatactagtgctatcaatattgctaagaatcctgttcaacactcacgcacaaagcacattgatattcgttttcactttttgagggatcatgttgagaaaggagatgttgagttacagtttttggacacaaagttgcaaattgctgatattttcactaaacctttggattctaatcgctttgcttttcttcgtggtgaattgggtgtaattcatccttttgacatggtttgagggggagtttgtacctcatggttttatcaagcaataatatgacaatgaaaaaattgagaaaagagagctttgtttatgcatatggtattttcttatgcatgctagcaatactttgaaggtttatttgtctctagcatagcttgtatgtattctagtcttttcatgagatttagattttgcttttaagggagatgatgtatgacacttaaattctatacttgaattaagcaaatatgcaatgttgatgctagcatatggtttgatttataaatgctctatatatatgctttattgacttgttattcctcaaatagctttaattgttcattgtaaaaaagagaataaaaatatgaaaaaatgaataccgaatccttggaaacagtcttgacgacaaggacgtattcgatgtgagcaaaataatgggtgccgaatccctggaaacagtcttgacgatagggacatacccggaataaaaaagaaaaaatatgagcaaaatggctcaagaaaagaaaaagttaaaaaattctcttggttattttgtgctagaggttatttgagaaagagtgataaatgcaataggtatatgtgtttcgtgtttattcttcaacgtatgtgcttgttaagatgttgcattataaatcgtatgaaatcacgaattttgattgttgattcaagcttaattgtaaaatctttggttcatggttatactttaattcatgcttgttttgttatagatgggtctatcttctttttattacaacacatgacttgatatgctatatgtatgctaagctcttgaacattaatgaacataattcctatgcttgatgaaatcattgtccaaagggggagaagtaatttgaaaatttttttggattttttgaagcaaagtgaatttttgaagagttgttgagaagagcatgttgttggttcaattgggaatttctttcttttaaaaaagagggagaagttttcttttggatttttgagcacgatgtgtacatttgtacgaagtgtgctttttaccaccaaatatcaaaacatttttatgagtttgccaatgtgttcatcaagggggagattgtaaaatcaaaggtgttttttattattattctgtgatgaataattgggcattggagattattggttttgttatttggaatttattctcgaagtggttttggagattattggatttcacnnnnnnnnnnnnnnnnnnnnnnnnnttatgtggaccggtcagaccgggctctggtagccggtcagaccggcgtgtaattcgcggtcagaccggcgcagcccgcggtctgaccggccgatactgtgtcggtttcggtttcgggctgtttatttggatatccgagtttattccatgattatgacttctatatggatactatacgtatgtaatactattgtttgctgctaatgagtcaagttggagatagcttggtctcggaatatagtttctttgtttgttctatgtgtaggtgactcgatgtctcgggagagtatttgcggtgatggaccgggagtcggcttggggataagacgacgtccgtggtggtcagagatcatgcgggatacttaggctagagttgatgcacgtggttgatggagattccatatggtatatgatggagttattgtgtgcgtatgggatgcggagtcgaatttggaaggagtccaaatttggtacgtttggttatgtaaagtttctttcttgtactagtgggtttcctaaggtgtttaggactcctagtatgagtttggttcgtggctttagactgcctacctcatgtataaatagagggggagcgtgaggcttcccggcatcgctttgtatcgcgttagagagcaattgagttgagttttgagttagggtttcgagtttagtcgaaatttttgtaaggagtgctattggtgcactttgtaaacacagagagaagtaattaagtcatcatccactttaagatttcttcgatttgtgtttcaccgggtttcggcggtctaaccggcgatctaccggcggtcagaccggcggcaagtggcggtcagaccggcggtgtacaggcggtcagaccggcggaaaccaggcggtcagaccggcagggcaactttggtcagactgcgatctatcgatttcgagggtaatttttatttccgctaaaagttttcggtttttgggtataccaaccattcacccctcctctggttggcttagttcttgtgtttcgattgcaaacgtctccctgtaaccgaagatcacgccctgcagcagagctagcgtgtacaggacgtccagtgccgattgcttcagattgtcgccgccgtagtcgcgctcgattagccgccacagagaaatcccggcggagatgtacagtccatagaggtagatggcgaacagaagccacattacgatgctcaacatcgctgcttggatcttcatcaccgtgatgtatgcactggggcctgcactgatctctgccctacttctgcagatggcaaggtaggagaacccagtgttgctcaactgcttgttcatgatgacattgaacaccctgttggatggtacggtttgagcagcatacgtaacacatggtttgaaatttcggtaatatcggccctcccgtcaagcacaaatctacccaaagtttttaattttttttatcaaatatttgtaaaaatttgttaaaattcagtcaaaatatgttaaaactttaaataatttcggccataaaaatccggaaatcacgaaatttcaaattttcggcaaccacccaaccgaaattgtaaaccctgatgtaacaagtggaattaaggtagaacgcagacgggttcactattttcaaatgcataatttctgggtactgaactttaggattttctgaggtaactaaaaaaattctaattcaaataacttgtgcctaaacttaatttctcgtaagagcttaaaatttttgcgagaagaacatcctacaggaacatccggtaaacccgaaatcttggaaaattcagtccaaaactgtgaaccctaacaagaacgtcatgttcaaaaatcgatctacttatgtactagttactctctccgtcccataatgtaagggattttgattttttgtttacaccgtttgaccactcgttttattcaaaaaaatttgggcaaatacaaaaaacgataagttgtgcttaaagtactttggataataaagtaagtcaaaaaaaataaataataattccaaaattttttgaataagacaagtggtcaaatggtgcaagcaaaaactcaaaatcccttatattatgggacagagggagtagacaagaacaccatgatttaaaccatgtgtttcgacagatgtgccgtttaactagtggctagtttgaagtctaaataggtaatgggaaaagaaaaatcagtcgtgaggagacttaaccaaatacctgaaagagggtgattaccgtgagacaccaaaagtccttcttccccagcatggagacgaaaccgccgaggaggacgaccgtggtccatgtaaccacgaggaaaccaagcccattcacggctattgtcatgtaccccataaggacgccatagctgttgatgtactgcacttccaaccagtcggtgtcgctgggatccagggatgggagacgccggcgagtgtttcgccgtttacggtgctcggctcgcgcgccacggtcatgcagccccagctctaccccgtcggccattcttgtcaagaccaagagaatcaagatgatcgcagggggcaccccactccgagaaatcagccagccatttgatcggacagtccatgggtgtagttgaataacatggaagcgaagtaaacgatatgttaatttatgccaagaacgaggttggatcagggagggcgagcttgttatttaattccagcagagaagatgtgcaaatatcaaaggtcaaggtgcgatgcgcgggcatcgtatatatttttatataaactaggatggtagctcgtacaaatgtgcatgcatgtatctcgtttatatgggtggagaattaaccggattatttatatcttgattcaaaagtacgatttctcttaaattatgcccatcaacattgcttggatattttttccaagctatttgataaactatgaaggtagcctacatattcacgcgagcacgtattgtagcctg

SEQ ID NO: 23721 - DNA, 4800 bp, Oryza sativa
acctctattacagtaataagtagcagggattaaattacataaattgaagctaaatcattaatatctacttgtaaagttcctcaattaacagcacatttctcaggtacatcacaataacattcttggtgcagcaaacagaagtccctgaaaaaacacatgagacggattatcactggaaagaaaactgcacaattcaaaggctgaaaaatagctgatcaatatgctcctatatggtcaacagccacatatatttccaataacgagaaagttttaggttatttagttccagaggttcaataagttccatgaataatttaggtttcactgtgaacatttccaattacctgcaaaagggaaagaatgcttatcttcatatgataatttgattacatcatcctcactatacagatcagtctatggcatacacatgttgatgtattatgtacaaaaaaaagaagaatattgtgtcacaacaacaacatataatagctactcctataaccaatagttgctaaaccacatgtttaagccccattgaaatagcttaactagcagcagtcaacagaaactacaggttaataaaaactacgtccaatagacaattcatatatccaaaacatcaactgcatgacaggcacctaaaaagtgtctaattacgggaataagatcaactgcatgatttctctatttatacacttctaaagatctggtgttggtctatgaattaatcaaaaaaagcacattgaaaggaaaaatggcacaatctacagttgtactcttcatcaaagtaaaaaaattcagtttcagagaactgaaactcccaaacctgcacatgatctgagactgaattttctagctaaatttcagcaacctgaaccataatttcagaatttcagaattcagaattgagctcaatttcagcaggtccccaacatatacactgcactaatgcgtgggtaagaaacacaagcacattcagagtgtatagatggaattgatgttcctactcttgtttgtttttaaaaccaaaagaattgcatattcttgggaagctgttaagaggaagatgtgatatttctctgatccatttccacagtgaaggacgcatttcacaaggggcatcctaaattcctaaaaatgatggcatcctttacagaattacagggtcatgggaatcaataatcatcttcagctttcgtggaacacgtgttgtaataacaaatccaatggccaaagcagttgatagacactcaaactaccagaattaaagggaaaaaaacaaaacagaaacaaaatcagaacaataccagattctatgctaactgactagaatatacttgctgtccaatttcagctaatgactctgaacaaacacatgtcattctctattacaaatgcatatatgccattctctagaactaatgcagagcaaatctgagcacccagggacagtagtaaaacttagtactatataaatctgagcactgtttaacagaacattatcgaaactcaagaacaattaatttaggcaggacataaacaatagaaactttaggcagaacatacctcacaaaagcacccaatctcatgtatatcaaccctgtcaatacaagaaaaccaggtaagacaacatgctctgaaaattcgtgtgagctacttactacactgcagggcttgcattgaaagctgaagatagcaatgttagctagcttttaagctaattaattagccaaaactagcctaattaacagtgtgaaattagaagggtaggtttgtttagtgttttgccgggtataaaggcttcaggttgggttaaattatgctgcttgttggggggattaacacttaacagccgcaactttagaccttagacacccacaaatgtatcttgaagctaattgtctgtaatgctgataattgacaagcatgcatgtgccatcttgaatcgtcgatggagttcagaagaaggatggtgtttgacatacctagctgatgtagcagaagatgctcctcgaggaggttcttgttgggaaagacccggcgtccggacagaggtgactgaacagagaagtaattgccaacggatcttgcatggagggatggcagcagaacataagcttcttgaaagagaatgggactcaacgcgatggtgtattgatcacggagatttacatatgtaggcctcatccttcccttacccaagcaaccgatttatggaaatagtatcgggtggattaggaaggagagccaatcacacaaggttgccatgtatagtttaacacccccccccccccccgcagtcgcaacgtcgctagcgaacattgagactggaacgaaactcggtgaagaccggagtgggaagcccgttggtgaaaatgtcagcatactgggaggacgtgggcacatgaagcacacgaatggccccgacagcaaccttctcccgaacgaagtgaaagtcgatctcgacatacttcgtccgttgatgttgcaccgggttggaggagaggtagacggcactgacgttgtcgcagtagaccagggtggcccgcgacggtggagagtggagctcatggaggagctggcggagccatgtgacctcggccacagagttggccacagcgcgatactcggccttggcgctagagcgggacactgtgtgttgccgcttcgaggaccaggacacgaggttgtccccatggaagattgcgtaaccagacatggagcgccgagtgtcggggcagccggcccagtctgcatcggagtagacggtgaggtcggaggtacaagaccgctggatgtggaggcttaggtccagtgtaccccgaatgtagcggaggatcctcttgagagcggcaaggtgaggcttacgagggtcatgcatgtggaggcagacttgttgtacggcgtaggagatgtccggcctggtgaaggtcaggtactgaagtgcgccggcgagactgcgaaagtcggtgggattggacactgtaggtcccgccactgaggagagcttggcacaggtgtcgaccggcgtgttgcatggtttgcagtcagccatgccggcacgttccaggatgtcgagacagtactagcgctggttgaggaggaaacctgacgtctgcctggtgacactgatgccaagaaagtggtgcaatggcccaaggtccttcatggagaactcggactggagcgcggagctggtccactgtaggagccggtcagaggaggccgtgagaacgatgtcgtccacgtagagcagcaagtagacagtgtcggtgccgcggtgaagaatgaacaacgatgtgtcggacttggcctcggtgaagccgatggacagcaggtaggtggcgaaccggctgtaccatgctcggggagcttgcttgagcccgtacaaggacttgttgaggtagcacaccatgtcgggacgggtgggatcaacaaacccaggtggctggatgcagtacaccgtctcttggagggtgccgtgcaggaaggcattcttgacgtccagctggtggacgggccagtctcgggagacagcgaggctgaggacggtgcggaccgtggcgggcttgatgactggactgaacgtctcgtcgaagtcgacgcccgggcgctgagtgaagccgcggagcacccaacggaccttgtagcggtcgagggagccgtcagcgtgaaacttatgcttgaagatccacttgccggtgacgacgttggccttcacaggacaggggaccagatcccaagtgcggttggcgaggagagcgttgtactcctcctccattgcgctacgccaattcggatcggcgagagctgccctgtaagtcttggggatgggagacagcggagtggcatggaggttcatgcgagtgagctccttgcgaacgccggccttggctcgtatggtcatgccgtggtcgttgatcacaggtgagacaccgagctgtgatggcagagccgtgatgccggggtggcgcgcagaccgagggcgacgaggaacatgcacagaggaaggcagcgtgggagcctggggcgctgagaaggccggctccgtgctgctgtcttggcgcggggaggtcggcccaggaccagccgaggggggctggcggggcgaggcaggcctagtgaaggccgcaggggacgaggccgaccggtcagggaagtccgcgcacggcccagtggaggccagcccagtggtggagtgggtggcagccgagcccaatgatgccgtgccgtcagttccagccgacggggagaagtttggtgcaggtccctgggcagcaacagactgtagtcggcgaggggcaccaatgggggcctgcacaggagccgagaagtcctccaaaaacgagagatcagcagcacttgtaacagtgttagtcaactcggcaaatggaaacgaatgctcatcaaacacgacatgcctcgaaataataacctggttggaaacagggtcaaaacactgataccctttatggtggacggggtagcctaaaaagacacacatggtggatcggggtgcacgtttgtgaggggtggtggcggagaggttaggatagcactcgcaaccaaagacacggaggtgtgagtaggtggggtgagtaccatagagggcgaagtgtggcgtgtgatggtcgagggttttggtggggtgtcggttgatgaggtgagtggcggtgtgcagggcctcaacccaaaaggagccagggaggtgtgcctgaaagaggagggaacgcacaatgttatttagggaacggagaatgcgctcggctttaccgttttgaggggaggtgtgagggcaag

SEQ ID NO: 23722 - DNA, 16701 bp, Oryza sativa
caaattttagccaaaaacttgaaatctgatatttcgattattttatccaaattttggaagtttttatcctaggggtattttggttatttcgacaaatttgtacagtactaacggaggctaactggacggcgatggtaaatcgtagaagttaagcaaaagtcgatggtatattgtagaacgtgacaaagtcagtggcaaatcgtagacttgtgacaaagtcagtggcatataatggattctctcatcctataatgcagagtcctattagacaactaatccgaatatattgtgggcccaaaatttggatcacatatttcattttttttcattgagttgttattgttgaaatttgagtcgtgcgaaatacatcacttatattctagtattgttaattacatggcctgtaatttgagtgatcgcttggaaaaatagtgctgaggagcttctaccaatgtgggagctaggccctcactttgagtaattgaacttgaggtcgccgatatcctagctacctagctttgagcaggtcgagatcacttcctagttgcttcgagctcagcccgacacgtaccgaaggtgtactgaaacacgcacgacgattaattagcagggagcttgatacatcccaaaacccagacagctaatccgccacgatagggagcttttacggtagtgacagctccggtcgctgtttcagcatagagcattttgctaggtctcgacgagatctgaaccattggatcgggcatgaattcgtgatgactctcaaccctaggtttttgtttttccttgagccaaagggcgggcaaagctctgaataatgcccaagccatgatctctcttttagcatttgccaaaatgaatttgaattaaataactgtaagatcgatgcgtgtttaattgactacataagacaacggagatgttttctatgggtatttttgtggacttggaaaatgtttttatagattcggagtatgaccatcaaaaggaatcattggaaaggatggctcatcacgatgttatatatagagttaattagatcaatgccattggaaatttgcctattaaaaaatatcattacaattcatctattcgtaaccgtgccactagaattttacaaaattataaccgtgccattaccgtcacatttccatctattccttcattttccgtcttctttccttctcccatcttcttactccaacagtgaagtcgagccggcggcggcgagcacggcgtccgtgcaaggaggcgagggccctgccgagcgcgtcggcagcagcggcgagcacgtcgtctgcgcaaggaggcgagggccctgccgagcgcgtctgcgccgtccgcgtcagcatcggccacagaggcggagctgtgcccgcccgcgcagagtgccatcttcggcggacgttgagcacctggaacgcagcggcgtcgccgaggagctgccgcggcgggtcgctgctccagtggcaggtgaggtcgaacccgagcgagcggcagcagccggcaccgatgctgaacgggaatggcatggctacgtcgccgcaggtggtcgggcagtctccggtcgcggcgccagcgaaaatgaatcctcttgcctcccattgcatcgatcgatcctcaaggcagcatggccgactgaagtgagaagaaagtcagaaaactttgggtgtatgtatctgcagatgaagtatcttcattctcaactctcggcggcggcggcagcagcagcagcagcagcacgccgtccccacacaagcggcagcagcagccggtggcggtggcggcagcagcaaccggcaaccgcagcagaacgctcttccggtccatggtgagcattgtagtattacatatattgaaaaaaccggatgtagtactagctatagcctgcctgtgcctgaacttccaagcctccaaggtgggcattgtgtgccagttgttgtgaaaataccgatacagatgtggtgttatatgtacaaattgtttaatcggcacatatagacctactctctctgtcaaaaaaaaatcaattctagatttgaatctagatagacactactccatccatcccataaaaaaacaatctaatactggatgtgacatatgctagtactacgaatctggatatatctctgtctagattcattataatagaatgtgtcacatccggtcctagatttgtttttgtgggacgaagggagtatgtccagattaaaatttaggattggatttttttttatgatggagagagtatgtgtctaatctagttctcccttatctagaagacttgcccaaattcgttgtactaggaaacatcaaatcccattctaggttagctttttatgagatggaggtagtattacgtagtggtatcaatgccgttttcgtgatggtggcgactaatctgacacctttggagcggtaatgattagccttccagtgatagcgatgttctctgtcccaaatcacctttatattagcaacttgcattcggagtttatctaatttatgaattgactgtaccacaattaaatctttaaaataaaaactcggatgattataagttttcgtttatttcatccattctatatccctccaaaatagtaagaaattagattatcctatccaaccaaacataaaaaagatcagatcactaatccaacaggactatatttcacgcataaatgactgtgaagtgtgaagcagacaccccattcgcccaattcagcttgttgtattacgtgctcttcccggtgacgacggccggcttattttcgtgtttctcggcctgtgtggcccattaactggatgagcgattggcccatacatagctctgtattgtactccaactatttgatagcatcacttatcccaatattttttcatttctttttatacaagttatatttcaaactgaaatttgttataggcttatagctattttatttctaaaaaaaactttggtgtcggatttatgtaatacgaactgatcttagagaacatatatatgaactcaagtcattcaaatcagggcataaatcaaatgaaaagtttcaacatactatttttttaataagaccacttgttaaacaatataaaaaatgaaaagcatcatgcatttaaaatcgagggagtaattaatcaacaactatatattggaaggtagtactgcacacttcatggtgagggaaagtgcctgcatgtcatctaaatagtcataaaaaaatttaaaaaaaattgaaaatatagattaatatgaaatatatcactccacaaacatgcaagttcaattttaacttctacaagatgtaacaaattttgttgcaacttataaaagttaaatttggtcttgcatgtttgtgtagtgatatatttcaaattaatctatgttgtcaattctttttaaaaaaattttaataactatttacatggcatgcaaacaactagagaatgttctctcgagggatgaaaatccacgtcctcatgattgacaacatgcatacatcgaaatcaaaatcgaagtctacatctcgagaaaaccacttaatttccaataaacatgactaatccgcgaggggcctgtctaggcatctgtcgtgtgatttttgaaaaaaaatcacccagattttttatcccctcagatttgcatccaacagaaaaaaatagtacacaaacaataagatcgggccaatacagactaataaaacagatacaatataggttgcaatatgctaaaattacagtgctttgtaactaaaattacagttgtaaaaacagtagatatggcatgtaagtgcactgtaattttagtacaaatgtaatgtaaaatttggtaactagaatatttgtcgttttagtacaaatgcactgcttgagaaatcgtccaggtatctgaagtgttaaatattgcatttataagtaaaattacagtgctttataactaaaattacatttgtaaaaaacagtagttatggtatgtaagtgcactgtaattttagtacaaatatattgtaaattttggtaactagaaaaagaaataaaagaaatagagagaagcgacatcagcgagaaaacatgggcgcgcaaatcaaaatatcgcacggagaccgtggtgaacatggccccacgcggcgccatgcatgatcgattttctgtcgactggaagctgagatactcgggctactgtctactgtgttactatcagcttatcgatcgtttcctccaccatgtcgcccgtgagacgtgtggcgctggaccgctttgtgcgtgtctgattcgtcgcgcctaatcgcggtgcagatccgacggttgaaaaaacgtcaaatacgaaaaaaaaaacaatcacacgagagatatattggtataatcacataaaattaatgataggacaaacataagatgacactagcttaatttgggaaattccaagcttagaacagcagcagcgaggcaacgagaggcacgagcatcatcgtcatcagcgacaccgccgccgccgccgccggtgcagtctcgaacgtcagccgcccggcgtcgacgtcgtagatcatgttggtgcccgtctgcagcagcgttcccagcaccgagccgccctgcgatggcagcatggtgaggcactccagcccggtgtcgttgtcgatgtagaagtagttcgccgccgacagatccatgtcggcgccgccgtcgaacaccagcgtcagcttcggcaccttcaccttcgccatggacgacgcgttgtagcacaggtcgagctccagcgccgccgagccgttgacggccggcaggccgatcctgctcgccaccgccgccctcacgacgtcgtacgccgcctgctcgaggtacgtcaccggcgtcgtgctgctgaggatcaccccgccggtgccgttggccctcaggtcgaacgtccccgccggaatggcgtccagcctgttgccgtcgacgcgtacgccggtgaggttgacgtagtagaagtccgggtacagggtgctcgacagcagcggcgtcgaccggccgcgcttcgtcttcggcacggcgtcgtcgccgaaccggatgacgctgtcggcgctgccgtcgtcggtggcttccggcgccagcagctggtacgagaacttgccgaactggagctgcgagatcagggacaggttgcctctcccgatgccgatgacgcccgacgcgccggcgaagtcgccgtagctggcgtcgctgcagccgaacaccacgccgggcacggccgtcgcgccgaacgtgaacgtgtcggtggcgaggtagcccgacgtgttcgccgccgacccgccgtacgtcaagctgtagctgtcgcagcgagcgccggcagtggcgttggccgccgcgccggcgaggccgcacgtctcccttaggacggggaggcacatgtcgctggagcaggggagcggcgagaacgtggcggagccgttgggccggaacgcggtcgccggcggcgggaggcacccggcggcggcggcgcacggcgcgcactgcgcccacacgaaatagctcgtgatgtcgacgaggccggagacggtctgcgcgacgggtgtcccgacggtgatgttgatgacgagcggcggcgcggcgccggacgccgcctcgccgccgagctgctgctgctgctgcttgttgcccctgttgcgcagctgcttcttgaggaatccggcgaccagcttggacacccatggccggcttttggcggagtagccgccgacctttggtctggcgcggacggcggcggcggaggccaccggcggcgggtggagtagttgcaggctgaggagagaagcagctgctagtagcagcaacgtcgacacggccatgctcctggccatgtttgaattttatgtgtttgcctatcaagctagctagctttgctgtttgtatgataactatgcaaaacttggctgggatgtttgatgaacatggctagttaaatgagtatatatagggtttttggtcgtcctgccatgcatagctagccactggcagaatttagaacattatgttgttggattgtgttgacacttgacctaattttatttcatcgtgctgaaccatatgtcgaactgctacatgtgatgtaacgaagcagagtaacacttagtttctgaatacatgacgttagatcctgaatggtcgaacttattattagtcgcctaattttttgtagctatcatgattgttttaaactctttgtcacctagagttgcaaacgtgtcaactaaactaatacaaggtgtacagttatttaaacatcaatctccagtagacgcagtggcctcccaccccctcgcacccaccgcgcataacgtaaaatactttcgtaaaaaccgaaccgaccaacctctcccagtcccatccataccacccctcctaagattaacctataaaaccaggcagaaaaaaaaattaaaccctataaaaccaatatattctattatttcaaataatagaaagaaattttgtcctttcctcgaagatttgcagccaattattacataaatcctttcaacggcaagcataaaccaacaagtccgtaatagcacacccaaaaaggcaaaaactaatgaccaccaacactagacaaagacaacaaagttactaaaacttctttgtgaatttacatctgtagttggcgagaatctgtataatctttgcctctaggttatgcataagtttgatatactcatcacacctttgcagttgggcttaaaaccgaagcgaatatgttgcgctaaaaaatatctgcatataagatttagacggtgatttgtcaaaaaccatatcatttctgctaagccatagaaccttacatataacatatactcctactagactaagtttcttggtttttttatcaatacccacaggccaattaccaaaaatattagatttactacatgaagatataaacaaaaagagatttgtactgatctccagagaaatctggcaaaatgattatctcaaaataaatgatatatatcatcttatttttcatgaaaaaattacatctcacactacctttccaattcctactaaccaaattatcattagttagcactactccttaaacataaaccacataaaaatatgaatctttagaggcatctcaaatttccagataacattattcctctcaatataaccaaaaaaaatttgaactaaatacatagaacgaagcgagaattgacgattttgatgaaaattgcatttaaatacatcatttccttctgtcaaacgaatatgcacaattaaaacacataaattatgtcaattcatcgagttatggtctactaattctcttgtgaaataaacattcaacggaacataactcataacatttgcagccggattcttctacgaactataaagtactaatacgggtagctgtacttaaaagaagtatttcctatctacttacctcctagaatcttagttgttcaccattattaactaactaggaacccatatctaaaaatctactcctaactttcttcataagtcccaaccaacaatgagaatactcttgtttcctctcaacttacttaaatgattcattcgttaagtattttcttttcaataagtcttgttgaacacatttctcatttattaacttaaaaaaaccatttgcttaataaaaattggttttgaatttctaaatcttcaaaatatatatacattgttaggtggcctaaatagtttgtttaactcgtatgctgtatacatattcaaggatctactaaatttgtaacactaattcaaggaggtgcaaaaagttatatattctcacattaataaaaaaatcttaatcagtaatttaattgagagaatctattatatgcaattcagtttatcacatgtctacgatttaccactcacttttgccattttctacaatatgacatcgacttttgcttaatttctatgatttataatcgccgtctagttagccaccattagtactgtacatttttttccacctgaccaaaatacccatgggacaaaaaattctaagatttggacaaaaacaattccaaaatatcatattataaacataagattggaaacattcaaaatttggccaaaaacttaaaatatgatatttcataatttttatccaaattttggaagtttttgtccatggggtattttggtcaattggacaaaattgcacaatactatcgaaggctaaccgcacggcgatggtaaatcgtagaagttaagcaaaagtctatagcatatattatataatattaaaaaaatcaatagtaatggaatattaatggattctctcaatttaatttaattattgcatgtatagctgaatcatatgaaatataattgcctacatgtacgtgctgatgtcaaatgtatacatcatgaaataatttttgtatttatagcagacaaattggtatttcgtaatatttataggtgtgaaatggaacttccactacggaagtatctactgcgccattcacatatcagctatcgtcgtcaaatttcgaaagattcagaaataactgtagaggatgttcacgagacacatgttatattgctagtattcgctagctataagttttgtttatatgctatatataggccctgtttaattcagcttagaattattataatttagattattaggagtaagttaaaacaaacaagtagattattatgctagattattataatctataagccagattactataatccaataatcttctctagaggagcttttttcagattattgagtggctaaaaacccactacccttagatacctctaataatccagagaaacaaacaactcgtagtttattttatgtcaacttattataatccagtttaaagtaatttgatttaataatctagattacaataatcttaagccgaaacaaatagggccatagtatatcaataaccattagttcaataatgccaacttttaggctcttagcgagtagtgaagacgacaaaaagaacaaaatatacgatcgtccgagtctgcgtgcgtgtggtcttccggccggcacgagctagtttaggtcaccctgaaattaagtcaatcgcgtcgacgtcgttaattaaagatatatgacatagagagaagatgacgatgctgactctgtctaatacgttcctctcagtgttacctttcgttaattaaagctgtgtgaccactgaccacgttgaagagtgaatgggttatactaattgatatcgcctcatgtattttttaatccaatataaattgctatatttttttaaaaaaaggatgatatataatgcaatgacaactcccttcgttttattacaagttgctttgaattttttcgtagtcatgttttttttttttacattttacctaattagtaaaaaaactatataccattttagcataaaataaatatattaaaaattagttttattgaaattaattcggttttcaaaatgttgctaaacttaattatctataaatttggttaaactatttttaagaagaaattgaaatgacttataatatgataaaacagaaagagtaccatttaagttcaatatcttgcgttcctaaattttcgtggtgtggatatatgtgttatgaatgttataaatctttttaagatttatttacatggatttatatagaagaaggatattaactcgagggataaaaatagctagattcccatcgcagaaaactgcatcttctgaccaggttcatccgttgcattattttggcatacatgcatgcaagtatctggcctacggcgactcgtctagccagcagagcgcttatctggttggatcatctatcgtttcgtccagcggcgccgctgtctacgagaggtgattggtgtatatagtcagcagttgggcgctgttaaatttgttcaaattgattgaccgggtgaagatgcatgtgctttcatcctgtgtgaaaaaggaaagcaagcatggatcagtaagtcaatcagcaccaactctatcctaaaatataaatttctaacacattattttgtttaaaatatagctatttctaagattatctactcctcaacgaattacaagtattattattgttattatgaatattgaaattttaatcatatatatgttaaatttgttggttattaattttgttgcagtcgatatgtagaatttgttttgaagtgctaatgacaacacaatatattataattagatgaatattataattagatgaatatagaatccatcctaatatttattctattacacaacttaatatggaatccatcctaatacattctttagacattattttatagggcaattgcttatttgaccctgtttggatgtctaactaccaatttgaccctactttttctactttgcgtttttggccttattttttatagacgacgctactctctgaccctgttccgttaaggtgagctaatggtgttaactttggagcaaatagtccattttgcccttgcttatttgattctgtaatatcttgcttatttgaccctattatgtcatattgtgtatatattaagatttgttgacatttttttaataaatttgacagtatttgctttaatttgataaatttgattcaatttgactacaatctgatagtttttttttcacaaatttgacaaattttgactttaatatttccacgcgggttccacatagcaatgtctagtactaattctcttatcctctctcttctctctctcctctcttcccgatccagggcaccgggagcccgggacgagcggcggccggcagggaggatggcacgacgggcggcgactggcggggaggatggcacgacgggcggcgaccggcggggagggctgcacgatcgcccctgaagtcgtgcgccgccgctccgcggcgcgacagcgccgcgaccgccgctccaccgtgggacgccgccccaaagccgcgcgccgtagccgccgccgcccctccgccgcacgacggcagcccgaagacgcgacgccaccgctccgccgcatgacggcgccaccttcctgggatgccatcgtcgccccgaagccgcgcggcgccaccgctctgccgcccgacggcgctgccttcttgggatgccgccgctgccccgaagccgcgcggctgccgctctaccgctcccgcaaagccgccgtcactccgttgtgcgatgccgccgccgccgccttccctctgcgcgccgttcgcaaaagatgaagaagagagagagatgggttggatagggttgaagaggctaagggtattttggcccgtttaaaaaataaatagattttttctttttcctaaatgaaaccgtaacggtgtgatggaaagagggtcagacggagtgttcgattttgaaaaacagggtcaaataagcaaactaggaaaaacatggtcaaattagtagttagactttgaaacggggtcaaataagcaattgccccttattttattgaattgtactaaactgtagacaattcttgcgcactgccttgaggctaacttttcaaaaagcatgtaaacacacaaataaatcttctagttaccattatccgcagattctatagatgttctatatgacagacgatatttatagagtattgggatcgttagaaccagggtatatgcgaaatacggtaaaagaaacaggagacctactcctgttggacgaacccggtgttgcctttatatatcaatatcatacaagcataatatttgggataacctaatctagtctacgtcggcttagcggcaaggagctctcacacgtaatccacgactagtgtagtcttctcctcgaacataaaccttgcaagattggaggtagttctagatcccttatatatgtcatgttctatggttcctacgtacattgggtttgtcctgatctgtattggcttatcttttgttggtgcacccccttccttctatggggtattctatttatagcaaaaatcatcttcctctataagtagaacttggagatttagaacaggatatggaccaagaatactttatcttctccgactaagactcttaacaccttctatttcgggaagataattttcttctttacctgccgcatttccttaatcaaataatacattatggtattatactaggtatatggtatctcagtattggaggcatgtcttattcttgacaataataggttctaataagaaaatagttgatattagcactactagaaaaagcattttcgccaacgttaggtatttattttcgtaggaggatatgacccttagagtcaaatagccgcctacaaaaaagcaaattggggtgaagggcgttgttcgcctgcaaaaatctattttcacaggcgaaccacttaagcggcgcctgcgaaaatcattttcgcaggcggaccacataaggtgcgcttgcgaaaattagcgtggtatgtgtcacttcccctcactctcctcttatcctctcccctccccttcacctctcccctctcctcactctcctcttatcctgtcccctccccttcacctccccgccagtggaaggggcggccggcggccggcggcgtctcccctccctccctaccctccagatctagccggagaggggagtgggaggccggcggccggcgggaaagggcggacagcgtcgggcgaagcgcggatcggctgccgggtggcggggcggccggcggcggctcccctccctccctcccctccagatctggccggaggggggtggggggaggccggcaaacggcggcaaagggcaaaaggcgtcgggcgtggggcgcccggcggcggctcctctccctccctcctctccagatctggccggaggggggtggggggaagccggcggcctgcggcgtcgcacgcgggacgacgcgaggcagctggcggcggctcccctccctccctccctcccagatctggccgaaggggtgaggggggaggccggcggcggggtgcattcgtgcgacggcgatgacgacttgcgtgggaaaatttgtgatttgatttgatttgattgtgaaccactatgatgtatgttaatctgtgatgtttctatgtatttgatttggtttgatgttgaatctggatgggggaatgtgaggagaatgggaagctactgctaccggccggaatggcggtgggcggtggctgcacatttttttttaattccaggtgctattttcgtaggcggaccagttgtccgcttgcgagaatcaactattttcacaatcattcggttgcaggcggtgaactggtccgcctgcaaaaatctgtttaggccgcctatgaaaagctgttttctagtagtgtagctaagcaagataaaacaaaattagtcaagaattagtaaaaaaaaagttaataatttcagagctacgagattttcattccgaagcaacgttaggaacgcccccacagatcgattgagttatcacatatgtgttttaatcttattggttaaatgctttattaatcaaaaattacatttatattgaataagtcgaattagaaactagttaattagtcaatcttagtatttaaatgctaaatcacatatcaactatgcaaatcataaaatagttatacccgatcaattggttgcaatcgtaaataatgtaatcaccgtgtttaaattgtggcataaacaatgctcctactgctcaatagctcttggtctcgcccaatttgtttgttatcttcccatttggttttctcatatgtattgatcaattacatatgtatcttctaatctgctcaggtatgatttggttgaaaatgataaatccaggcagcttccatgtgactaatttttcgtaggctgttggtccggaatatattagtgaaatcatctaaaaaattattggaaattttacacatagatatcaactgatatatttttatatcattttatctattcatatgaaaatgagttttcaaaatttaattgcaaagttgaatatttaaaatttgcagcaaaataatttaaatttattaacaattctaacaattaaattattaattaaaaatatgtactcccgctaatatgtgaatttattatttaagattgttcgcagaagcatattaaaataaataaaaatgaagaaaagcaacaaacctgatttacttgcaacattgactaagtaaggtcaactccttttctcctgatttgcatatgcgcagctacactcttccatggtcggtcatcttgtcgctaaactcttctaagtctgttttacgcatggccatgtcctcaagtgcgtacaagagcgacatgtcgacacacatgcatggagcaccgagcacctcataattaaacacaaatagagatggcctgtttttttctttttgtgaaggatgggtttgttgaggatttccaatttcataaaaatgaaaaaagaggccatttttttcaacttaagagaagatcatcaacgttgataagatcattattaatccctccgtttcatattataagtagtttgactttttttttctaatcaaactttgttaagtttgaccgagtttacagaaaaaattagcaacatataaaatatcaaatgtaatgttgaatatgtttattttgtgttgaaaatattactatatttctgtaaacttagttaaacttgaaaatgtttaaccagaaaaaaaatcaaacgagacggaaggagtatgtttcctgccgttaatttttttcaccataacatcaccagccaaacatctgtattaaagcctcccaccccccccacccaaacctggcgcaagaaatatatgcatgggtgtctacatgaacatcaaaacaatcgaattagaatccgattaaccgatcttgacttgtgcggtttgccttcgctagcttttcgttcacgaattcaatcgtgcatgcacgagatggaattttagttattatttttaattatttgcatacaagtatttgcgtctacgtgaattgagcgtagctcaactccctctggtggaacaaactcacttgggtttaagttctagacataacattccaactataattttgataaaaatgttgtgcaagtaaatatatattagtcactaccaggatgcgaaagtttcccgtgtgcctataacacccaggaaactaggtgaaacacccgggaaaaatcttcccgtgtgtcaacacccgggaatgctcacacgggagcgttgaagctttcccgacttggattcccgggtatcaggaaggcagcgctcaggaaagctctagacatcctgggtggttagagcagcacgggagaaaaatctaacgctcgggatgttcaacggaacggaaacggcaacggaatacttctcgggtgttggttcttttgcaacacccgggatgtttcagtactacagctcaacattcttcccgtgtgctaaccacacccaggaagtttcagtcctacagttcaccatcacccgggtagcaaaaataataagcaatgtaatagaattggtacaagcactcaaatattcagcaatgtaatacaatcagtgcaagtacaaagcataaactgatctgtacaaatgttgataccagatatttgttttagttgcacacatacatattcaaacagccacaaccaatctatggaatacacacgaaagtaatgtttgctccttcatataggtagatttttttctaacatcataagtaccagttcttgaataatatctgggagtccattggataggtaggaccaaaataacatgaactacatccaaaaatcattgttccagatcttgatgtttggatggatttctgtagcaatgaatcatggctggcaattggacgcacttgatcttagatgatggctgaaaaattatagtgtgttagaaggtgctgataaatattgtatagaatatattgccagataaatattgctatagcatattatgaaagtttaagagtgcacattgttagattcatgcctagatggattagaatcacaagcccaaagacaattaacagtacaaatgtcaagcatgccatttgtctaaccaagtggttcctacttgtcctgtacaaagagcccagttagcacaaaccaggtagaagatacataaagaactagattgaactacagctagcaactagatacatgcatcaaatgtaattagtcttacttcttaggtacctatgcattttacctattcagattaaactatgtgttatatctcaggcaactgtttacatattgaatgcattcagattatatgctttttcgaagatggaactatccggtaaaaaggtcattaatgttggtataagattgctcacctaaatagacagtggggcatgttggggccgctggtcgtggaggcaaaacattaagtttcattgcagattgaagcgcctgaaatttatttacacataacaatgcaaatagttaaatttatacatgttgatgaattttaaaattaataagtacataaaggaggcaaaactacaagttaccagctgtatcgcagatgttaagtaacatgtttcatgttgccaagccttaccatcaatgggttatttcatcaaatcaggacttgcaccatgcttttccttaacaactccaaaataagcttcctgcatgataagttgggtgtttattcaaatggaaagagattaaaaagttgttgatcaaattttgtgcaagctagagtgcaactactta

SEQ ID NO: 23723 - DNA, 1076 bp, Oryza sativa
gaaagtttttcaaagcattccaaatctcttgagcagtttcaagatgtgcaacacgatcataatcagaacgagaaataccactcaaaagaatgttgcgagctttgcaattttgttcaaaagcagttttttcagcagcagtattaataacctcaggaatcacataagcatgagaaacttttctccaaatatcataatcttcagccataatgtaagattgcatcctactacaccaatgagaaaaatccgttccatcgaaaacatgaggcttagttgaaaacctagcgggagtagcaatggcaaaaactttagatcgataaaaatccaaagaagaaaacgaggctttgataccacttgtagtatcgaaacacaagaactaagccaaccagagagggggtgaatggttggtatacccaaaaaccgaaaacttttagcggaaataaaagttaccctcgaaatcgatggatcgcagtctgaccgaagttgccctgccggtctgaccgcctggtttccaccggtctgaccacctatacaccgccggtctgaccgccacttgccgccggtctgaccgccggtagatcgccggttagaccgccaaaacccggtgaaacacaaatcgaagaactcttaaagtggttgacgactttattacttctctctgtgtttacaaagtgcaccaacagcactccttacaaaaattttgactaaattcgaaaccttaactcaaaactcaactcaattgctctctaaagcgatacaaagcgatgccgggaagcctcacgctccccctctatttatacatgaggtaggcagcctaaagccacgaaccaaactcatactaggagtcctaaacaccttaggaaacccactagtacaagaaagaaactttacataaccaaacgtaccaaatttggactccttccaaattcgactccgcatcccatacgcacacaataactccatcatataccatatggaatctccatcaaccacgtgcatcaactctagccttagtatcccgcatgatctctgaccaccacggacgtcgtcttatccccaagccggctcccggtccatca

SEQ ID NO: 23724 - DNA, 643 bp, Oryza sativa
gtatttccccttgctcttgttctgggccttgtgcacaacattggcactggactgcccaccatcgcccttagacgcggcatctttttcccgagctttctcctcaacatcaagagacgctatcaacccctcaacggagtattcctgtctcttgtgtttgagtgcagtaccgaaacttctccaagatggaggtagttttgcaataatgcacccggccacaaatttgtcgggtaagacacacttaaggagttcgagttccttagccatggtttgtatctcatgagcctgttcgactacagaacggttgtcagccatcttgtagtcatgaaactgctccatgatatacagatcattgctagcatcagtagcaccgaatttagtattcagtgcatcccacaactccttagcgtcggtcatatgcatatacacctcgaccagacgatcgccaagaacgctaagaatgcatcccacaaagagagtagtggcttcctcgaattgcttctgctgttcagcagtaagaactccttcaggtttgccagtactcacccagaagcatttcatagctgtcagccacagagtgaccctgatctgccatctcttaaaatgcacaccggtgaatttatccggcctcagtgcatcggcaaaa

SEQ ID NO: 23725 - DNA, 5535 bp, Oryza sativa
gttctgttggattagtgccaccgctttggtgttggttaattaaaataaatcacatggtgggctgtgggtgcatggttttgctggtcgcacccatggcagttaaggaccggttcgcgggatgccctggaagaacttatcgtacttaccacaagccagcgtgggcaacggctgggcttgtagtgtagctttcctctagccgacgcatccaggcaagggtgggcgtgatggagtttggataggccctgcgacggcctatgcggcttccggattcacctagtcacgagaggggactgcccgctgcctcgcgaggagtgggggtgaaacctgaggtgtggtgtgcttggttagagggggttatgcgaatggtcctgtcacggcctctttccggtatgtcgtggtggcatgtcggcgcacggaaacgtgtcgtggggctgtgtcttgtgggtacagttgtacacctctgatcagagtaaaactattcgaatagccatgcccgcggttatgggcggtcaaccagattcaccgtgattagtctcaccctagtgtaatcttttgaaattggatagtttaggtggatggttgggcctgttgcaacgtgggatcgcgttggacagtggatagttaatactaattaattattacaactgtttaaatttttcaacttctgtctataaatgatcgctttatgcaaatgaaccactctagctcttctttgataattccgtgcatcatacccctattccggtatgacttgctgagtacagtgggtagtactcagtcttgctctacttttcccaacccccagagttcgagtatgtgtcagatgaaggtttctccgaggagtaggcttcgtccgtgccgtcgaggatgtctgtggagtggtgttcccgctgcagttctagtcaaggcttagctcctgttgtctttctttctttccgctgcatttatgtaagacttttatgatgtttgtaagacgtggatctgaatgtcaacattgtcgtttgtgtaccccggctggtcctggacggggattttaatgcacattctgcttgaaattctattcgggaatttctgggcgtgacaagttggtatcagagccgaccttgaccgtaggacaagccaaatggaaaaacctaagagccctctgaatccttttcattgcatatgttctttgcaattggatttgttccgggaaaattgggatctgttcttgtggttcaagggaaaaatcttggtcgctcgtttaagcgagatttgtcaaaacaagtcagtctagggttttagtaaaactgttgagatttattcatcagtcagtgggatttgatgggtgaaatgcattaggtcctagctcaggaacatgggttgcaaggtatttatgctcttactgttattattagtatgtatctaatttccccattattttatcgttatgtgagtctgtcttatttattcgctctcatgcaaaatgatctatgcataaaatttcgctcttattcgattcgcttatttgagtcttttattgctttatttaaatttggatttgagcatgcattgatcctactcctttgtcttctctagatggccggccacccacccaaccaccgcggagaaggcatgattgattttgtggcagagttggcacgcatgacgctggtggtgggctaccccaacgcgccagagtacacgactgttccaccgctcagtggcgagcttcctcaccgtgttcgcttggaggtccacggctacgtgggtacctgcctagataatatggtggttgaggcatccggaggcactgcagatcacgcttgtcaggaggcagcatacctgatgatggccagactacgggagcgccacaactacatcttccacgacacggcgtaccgatttcacccttgccgagccagcggtggtgatgtcagtactttccgtccgacagccggcgagaacgacaccacctttggtcacatgtgtgctgtgatgaggggattggataggatgcactcggacctgcacaaggcgaccaaggccttgaatgatgggaagctcatgaggatcgtcgctctgaaggacgagatagcgcgcctgaagagggagaatgctcagttaaagggtcttcccgcgccaagaggagtccggatccgcactacaccccgcaagacgacgacggcacccgtgcgcatccagcttgcgcccaggaacccacctccatcagcagctcccgcagcacctccagttccgcccgcagttcctgcagctccagctccagctccagctcccgttcacatgtcagctcccgcgtccgctctctcctttgctccagcatcagctgccaggagtccagccagtggcaacggaggttggttgtctgctactcccattggcagccgcgatctcagcagcagcagctccagtggctcagagtcgggcagcggcgagacttatctgccaggctccgggagtcgctcagagggacctggtgacgagcaggaggacgccttcgactccaccgaccgcaggagccgttccgagcattaggctcgttttccattagtttatcgactgtctagcttttgtttgttagtttgtgtgtctaggttgcttgcttgtgggtcagtcgacggtcgatatcatgtgcctatgatatggctgtcttaataaggatttttgcttgctttttaagtgttttaattcagatcagaacaattgcagtttaaattcctatgtaataaagcttagttcctgagcatctgtttttcttctttttccccgcctgcttttccctccagatggtctacactaggaatggtagccgcgcaacaggcgagggcagcaacggcgaagagcgcactgatggggtgcatcccaacagtgattccggcaatggtccgccaccacttcccgagaatccgacactagcccaagtgatggcacatcagactcagatgatggcagccatgatgcagcagatgcagcaccagcaccagcagatgcaccagaggatgctgcagcacgctgaacagcagcatcagcagtttggtccccctccccctcagtctaagttgccagagtttctacgtgtcaggccacccaccttctccagcaccaccaaccctatggaggcgaatgactggctccatgccatagagaagaagctgaatctcctgcagtgcaatgatcaggagaaggttgctttcgccacacaccagcttcaaggtcctgcgtcagcttggtgggacaatcacatggccacccgcccaccaggtactgaagtcacttgggcagagttctgccgtagcttcaggaaggcgcaggtgccagacggggtcgtggcacaaaagaagagggaattccgggcactccatcagggcaacaggactgcgacagtgtatctccatgagttcaatcgcctcgcgcgatatgcaccagaggatgtccgcaccgacgccgagaagcaggaaaagttcatggcaggtctggatgacgagctgaccaaccaactgatatctggggactacgctgactttgagaggctggttgacaaggcaatccgtcaggaggatcaacgcaacaagatggacaggaagaggaaggctgctcagttcagggcagatcagggaagtcaccagaggccgcgcttcactcccgggcagcagggtggacctaccaccatgatcgttcgtcagcaccgcccgttcaaccctagcaactttccccagggcgccagtggcagtcagaaccaccatggaggtcagtccaaccgcggtgcagctccacgcccaccaatggcaccggcacagtcaggcccgcccgcgcaagccaagaaggagactggagcaaaaccagggtcctgcttcaactgtggcgagcttggccacttcgctgacaaatgcccgaagcctaggcgtgccgggccaaggtttatccaggctcgtgtcaaccacgcatctgcggaggaggcacaagcagcaccagaggttgtactgggtacgtttcctgttaactcaatccctgcaacaatactttttgattctggtgcaacgcattcgttcatttcaaagaagtttgtcgggatgcatgggttaaggaaagaagagcttagcacactaatgagggtttataccctgggaaatagttcaacctcagtcagttttagcccttcagtgctaatagaaattcaaagatcaccatttctagctaacctcattcttctcgaatccaaagacctagatgtcattcttgggatggattggttaaccaagtttaagggagtcattgattgtgtgaatcgcacagtcaccttgaccaacgagaagggagaaacggtagtgtacaaatcaccagactcaccaaagcgaggggtctctttgaatcagattgagacggaaatcccagtggacaccgtggagaagaacttgagaaaattggaagatatacccatagtctgcgagtatccagaagtgttccccgaagacctcaccaccatgccacccaagagagagattgaattccggattgacttggcaccgggaaccgctccaatttacaagagaccgtacagaatggcggccaacgaattagccgaggtcaagaagcaggttgatgagcagctgcagaaagggtacattcgaccaagtacttcaccttggggtgctccggtcatttttgtggagaaaaaggataagacgaagaggatgtgcgttgattatcgcgcactcaacgaggtcacaattaagaacaaatatcctttgccgcgaatcgatgatttgtttgatcaactgaaaggagctaaagtgttttctaaggtagacctgcgatcaggctaccatcagttgagaattcaggaagaggatattccaaagacagccttcaccactcggtacaggctatatgagtgcacggttatgtccttcggacttaccaacgcacccgcgttcttcatgaatctgatgaacaaagtgttcatggaatttctggacaagtttgttgtggtattcatcgacgacatacttatctattcaaagtccgaagaagaacatgagcaacatctccgtctggtactcgagaagttgaaggagcaccagctatatgccaagttcagcaagtgtgacttctggttgacggaagtcaaatttctgggccatgtcattacagctcagggtgtggcagttgatccattgaacgtggagtcagttaccaaatggaccccaccgaagaccgtgtcgcagattcgaagttttcttggacttgcgggatattaccgccgattcatcgaaaacttctccaggatcgcccgacccatgactcagttgcttaagaaagatgagaagtttaaatggacagctgagtgcgataagagttttgaggagctcaaaaagaaattagtatccgcaccagttttgattctgcccgaccagatgaaagacttccaagtctattgcgatgcatcccgccacggacttggatgtgtcctaatgcagagggcagggtggttgcgtatgcctcgcggcagttacgtccacacgaagggaattatcc

SEQ ID NO: 23726 - DNA, 1554 bp, Oryza sativa
ccaggcagcagccaaaatgtatgcaagacctcaaggaaaagttttggtgggtcagcatgaggagagaaatagctgaattcgtcgcactctgcgatgtttgccaacgagtgaaggcagagcaccaaagaccagcaggtttactccaacctcttcaaatcccggaatggaaatgggaggagattggaatggactttataacaggactgccccggacatcatcgggtcatgattcaatctgggtagtcgtggatcgactcactaaggttgctcacttcataccagtacataccacgtatacgggcaaaaggttggcagagctctacctctcgagaatcatgtgtctacatggagtacccaaaaagattgtatctgatcgagggagtcagttcacctcaaaattctggcagaagctgcaggaagaattggggacccgtttaaatttcagtacggcctatcacccgcaaactgatggtcaaaccgagcgagtcaatcaaatcttggaagatatgttgagagcttgcgctcttgattttggtggagcttgggacaaaaacttgccatatgcggaattctcgtacaacaacagctaccaggccagtctacagatggcaccgtttgaagctttatacggccggaagtgccgcacacctctcttctgggatcagacaggtgagcgtcaactgttcgggacagaggtattagcggaagcagaagagaaagtcagaatcatcagggaagggttgaggattgcccagtctcgacagaagagctacgcggataactgctgaaggaagctcacttttgaggcaagggattacgtgtatcttcgtgtcactccgctccggggagtacaccgctttcagacgaaaggcaagttggcaccacgcttcgtgggaccctacaaaatcttggaacgaaggggagaagttgcttatcagttagaacttccatccaatatgatcggcatccatgacgtgttccacgtgtcccaattaaagaagtgcttaagggtacctgaagaacaggctgattcggaacacattgatatccaagaggacctaacatacgtggagaagccggttcgtatacttgataccagcgaaaggagaaccagaaacaaggtcacctggttttgccgagttcagtggagtcaccattcagaagaggaagcaacctgggaaagggaagatgagttgaaagccacccatccgcacctcttcaccagctcctccgaatctcggggccgagattccgtttaaggggggtaggtatgtcacaccccgaagttctcctcccaagccaaaaatttaatttataaatgaccccaagaaaatacaggtgcaaagcaagagtaaacccttttaaatcaatgcagataataatcggatttggcatgtggaatttttcttgagttctacatgtcgaaattcactaacaggatttttagtggaattttcagagctctagaaataattttaaccaattaaaattgagcaagcaatattttaattccagggaaaatccttttccctttttctttttgctttttcctca

SEQ ID NO: 23727 - DNA, 1082 bp, Oryza sativa
aaacaatagagcatttgcaatataggatcaacatgttcaagtgacaagcatgacttgccttgctctgctgctggaggaacctcggcgactatttcgaagtacaccggagcgtcggaggaaccggaatctagcgacatacaaggcaaacattgcaaacaggctataagactactgaaacagggaacaaaaccatttttaatggattctacacatttttcttgatttactgagacttgaatgggcttaaacggagctcgaatgaattagttatgaattttagaagattcactgtgtttattactataaaagaaaaaccttaaatcatttattgcgcaataaatcccagggctgacgtcagcacggagggggcgcggcgccggcaagcgggccccaccggtcagcggctcagggggagcggttcaccgtggaccgggaccacgcgggtggtccaccgccggtccacgggaccgacggcccagatcgccctcgggccgatcggacgggcggcgatagaggcggctgccgggctcggctcggcatcaaagccgaccggccggccagggctaacggcggtgacacgcgcgcgtcgcttggccggcgacggcatccggcggcggaggcgacggcgcaaaagcgacgcgaaagcggcggcagcggacggcggcaacgaccgaaggcgacgacgagcgcgggcggcagcgacgcacggggaattggggaagtaaaggaaaggggagggagtcctcaccggaggggacggcagcgtccggcgacggacctcgacgaaggaggggtggacggggtggatctcggccacacgaacccgacggcggcgacggcgcggtgcggcggcgagcctagcggcgactagcggcggccggagtagcggaaacggcggtggcgggtggttgcacggcgcgggagcgatggggaccacgagggagttcggcgaagtggggaaaaagcgagagggagcaacggggaagcttaagtaggggaggggagggccggacgtggccgggagaggcgggatttcgccggccaacgtggggaagtgggggaggagagagaggcgggattcg

SEQ ID NO: 23728 - DNA, 12442 bp, Oryza sativa
tcgacatgtagaactcaagaaaaatttcacatgccaaatccgattattatctgcattgatttaaaagggtttactcttgctttgcacctgtattttcttggggtcatttataaattaaatttttggcttgggaggagaacttcggggtgtgacatctatgtctttgcatgcttaatggttagtttatcttgattctctatataatttttctttatttgtgtgattcttgatgtatttttttcctcaaaaatattaagagatttataatgtagatggtagtgctagctatatatttttgcatctatttgttttgagatgttgatttgagaaagcatgatgacttaggttgttttcttccccaccacactagctcacgatttgtggtcttcttcttgctcatccaaaagaagggggaggttttgcccaaaaatttcaaaagcatctctcgttttctgcatgcatactttccaaagtactaaacggtgcatattttccagtccgttttgcgtgttaggaaccctcactcctgaactcaaccttatccttgagtaacttacatattagtattaattgaatagatgtagagaatgttaattttcaatttgagtaatgtctagggtattaaatcatcgagcatttgagatataaaagcttagttctaatgatgcttgattgatctacagatttaattgatatatgaatgttagcggttaattttggaattttcgtagggccaatggatgaaggagagatgaatgttgcgaagcgcggtacgttggaatatgccaggagagtaaccaacttcgtgctcggggcaacaatttctagatcattgagcatgacagaacacttgctttgtccatgcgctgattgcataaatgagagagtttcctacaaatcaagttcacgagcatctcctaacaaggggttttatgcgtaattacgcatgtcaggacaatcatggtgaagatgagaatgacaatgtgcataatcatggtgatggaatgtacggagaaaatgcggagttgcctgtcgacaaaggtggatatgacagtgaagaatcagatggtttggattagatgttgtgtgatggagagacagcctacagtgatgaaaggcaatatgagatgttcaagtccatggtgcaggactcaaaaactccgctttatccaggatgcaaagaggagcactccaagttacatgtcgtcttctcgctgctgcagttgaaatcaaccaacggatggagtgacaagagcttcacagagcttctgcagttgatcggagacctccttccagcgggtcatgtattgccagaaacaacatacagagcgaagaaggttgtctgcccgctcggactggaagtgcaaaaattcattcatgtcgaaatgattgtgtcttatatcgagatgactatgcagacttggatgtgtgtccagtttgtaaaacaccgcggtataagggtggagataacgatgatgatgctaatgatgacagtggtggccccgacctaaagaaaaggaaagtgcccgttaaggttgcaataatccctcggattgaacgcatgtttgcaaataagaagcatgcaaagatgatgcgttggcaccacgaagagcgtaacaaggatgggatgataagacaccctgccgacggatctcaatggagaaagatagatagaaaatacaaaaagcattttgcgcaggagactaggaatataaggtttgggctgagcacagatgggatgaacccgttcggtgacttgagcagtcggcatagcatgtggccagtggcacttgttatctacaaccttccttcatggttgtgcatgaagcgcaagtatataatgatgccatttctaatccaagggcctaggcaacctggcaacgatattgatgtctacttcaggccattagtggatgatcttaagtttctatggaaccggagtgcgcagatgtgggatgcgtacaaaagagagtacttcaccttcagggcaatgctgtttgttaccatccaagattacccatgtgctggcaacacatccgggcaaacagtgaaaggtggttgtgcatgtctgcaatgtatgctggaaacagcgagtaggtggctaaggtactccaaaaagaccgtgtacatgcggcatcggaggtttcttccagccggccaccactattgtagcaatacaagagatttcgatggcactgtggaggagggtacagctccaacacaacgtgagggcagagacattttcaatgaggtgaaagatattgaatgtatatttggtaaggggcctagcagtacaagcgcaacgagtaagggtggtgagaaaccttttcggaagaagaaatctatcttttggggactaccatattggaaagatttggatgtccgccatacaatcgacgtgatgcacgttgagaagaatatgtgcgagactttgatgggaatcctgctaaacatacctggcaagacaaaggatacgttgaacgcacgaagagacctcgtagacatgaacatcaggcccgagctccatcctcaagaacgtcacaatggccgccagtacctacctcctgcatgctacacccttagtgctgcagagaaaataagcctgttggaatgcctgcagagtgtctgagtccgctctggttactctgcgaacattaaaagacttgtcaatatgaaagagaagaaaatagttggcatgaagtcacatgattgccacgtgttgatgacacaattgcttcttgttgcgattagaggcatcctactagataaggttcgagacccaatcataaagttgtgctcattcttcaatgttgtatatcagaaggtaatctatcctagcacgctagacaagctccaagaaggagcaattcttaccctttgccaactcgagatgtatttttgtaacatcttgaaaattaacaattttctaatcttgcatcatgctgattcttatgttcttattaaccttttaaacctaggaaaatataattagagagacctccaaagattaatttgcgtagaatctctctttgctatttaaaatctttcgtggtttttattctaaaatttatcttattaaaccaaggtattttctttgatttgattttgcaccttaaaccttcttttacaaaattcctttattttaatttaattaaaaacccttttatgaattatggtccaagaaaccttcccatattacccttgaacctaaaccaccgaaattccgattccattggaattaattgttaactcatcctttgatcttaaacctatcctttgattccaaacctatccgtaacccttccttgtgatctagccgcaaatttaatttctatggcttgatccccttctcggcacaaaaataatattattacaaatattatgaataattgctcttgtgctaagaaaatagattatatccttgtcatctaaattttcttttagcctcaaacaattccttgaaaacccatgtcatatattttagggctcaaatctctttttttgtctccacctattttcctaccacattcccaaaaatatcttgaagaattatattaattccctcccatttgagtgctttaatatttagaccacattattgcactcaaatatttaagaaatatctcttttagaaattatatccaaatataatttcctttcaaaattccctatcccattcaaatcctattcaattccattatctaaatccccttcaaaattagaaaagcatttatctgagtttgggccgaaaccctcttttcttcctctcactcccacggcccaagccggcccagcaagccactgccaagccggctcctccctcctgtgggcgtgcgcggcatgcgcacacgccaccgccgccatcgccgtgatttgcgccgccgccgcccacagtctacaccatcgacttgctggccacggaaagtcgacgtcgtgccgtgttcctccttccccgccgcccaactccctggcagccgacgcgtgtgcacgccgccattgccgaccaatgagagaagaaagccggcgccgtcgatcctctgtccacgccgtcgttgccgtattcccctcatcatctttctccaaaacgacctttgtaaccgacgttcgacacctataaatagagggtaagacttgccatccctcaccaagccgagctcttcaagctcttcctctctctctatctatgtcgaaccgtcaccggtcgtcggccgatctccctcactagagcttctctaaccaaatccttgcgccataggacttgcctcggtgagttgaatccatttttccccttttccctctttctccacctctaaattaaacctcaccggagctctctctctctctctcctcccggttcacggccttgcactcgccgttccggccatatccctcactccctcgacctaccaccgccgtatataggtgcgccacatccgggaacacctctcgctgccggcgtcgctgtcccccgtacactggagcgccgccgcctcaaccgcctcctcctctcccttctatcggctggaggaagaagacggaaagaaggaaagagaaagagaaaagaagaagagaaaaagaaaaagaaagagattcctgacaggtgggcccccgcgtagtaactttttataatttctccatttaattcaaaatccaatttttagaagcccatatctcctaaaccgtaaatccgattccagtgaaacttggacctaaattcatctaaattcaaaatctacattttgataccaaattttctattttaagattttatttgaatttccttaatttattcaaataccatttgaataaatatttaatttaatcttatatttgaatttcctatttaaacttatatttacctttcaaatatttctttttattctcgaaataccccttagtcactaaatgttgtcgaaacgataactgcatacgtcgaaagacgtggttactcaactgtgttggaaagcagtaaattataactctaagaattttttcccggccccctttacatggccctaggggtctatttataacactattacaggctcccctattagggtttaggtttttacaggggaatttacatggttgcccttataaaagggacatttacatgggtacacagtgtcatttgcatgcacgggctcctgatgggccaacagattgggcccggcctatgccgaatgggcccgtcaggccggagcagcccatgaggtcgcttgcatgccgaacccgtcctgacgaaggccttgcgccttcgccatgcacccttcgccgtatgccattcgcccaagatgcttttgcttcgcatggacccgacgcggcttgttagcctgcagcatcttcgcccatagccttcgccatagggcttcgccccattggctctgatgtctttggcttggatcctcgctggtccttgggtttcggcaggtccagccgaagggcctcatggcataccgccaacaagcccctcacgggcgagggtgagtaaggagcttcggtcgagaccgtgcaaactatgtggtatggtatgaggcgccccctttcggccgacgttcctaccgaaacctcttctccgagcccttcaggaagaaggtggacacttggtgttttcatggttttgttagtaaactttggcattcgccctttcagaaagggcgaaactgcactgctttgatttttggcccgaagtgcgacagtaaggggccctttgtgggccggtatgtccctcttggatttcggtctgtacagtgcggcctaggccgatgggaatttaccgtttcgtctgtccctggacacatgtcgcgtcctgattgggcggaagtcgaaacatcgtgggacggggttatataacctcgtctcgggttaccgcttttctcccctcaccttttactttcaccgctgctacgcgctcgcacccttagggttcgacaccttcgcttttgtgcgctcttgagcctttcgaccactcccttcctttcgccacggactcgatggctcctcgcaagcctacaaaggctggatcgactggcgaagaccctagcagccttggcgaagggtggtcgtgcttccttggcaaatcacttgtcaaggaggccgccttgggcgagcttgtcctttctggcgttctcgtggagggccaggcgacctgcgggggcgaagccatcgtcccttcgcccggtgacaaccagactgttgtcttcgccgccttcttcgctaccggacttcgcctcccttgcaatgactttctgctgtccgtgttgaaaatgtatgaggtcaagctttaccagctcaacccatcagcgttcccgaagttagctgtttttgcatggatgtgccaaacgtgtgggttcgatcccactgccgagcttttcgccgttctgtttatggcatgcgcgacgacgaaggacgtgagcacatcggccggtccaaagaggacgatgtttgggtgcgtgaatttcatactccgccctgagcgctcggacgcctagccggtgcctgcctcgatggcgaaatgggagcgaaattggatgcaaaagtggctttacatcaataacccatattccgccgaagatagcagggcgaactggcttaggttcgaacgcgctgctgtttcgatcgctgctaagccgaacgtgtaggtcgacggtgttcttgagtcttggcttatcctccttcgcaaggtcgcgcggcggctaagtacccgtgacctctgcgaggagttttgcctgcttcggatttctccccttgctcgcgaatcgggggtgttggttagtaaggacgaaaaggtgctcggacttccccgcctcgcttttcctccgggagtccaccgtaagttccttgtgtttatcagcgtcctttgtatgtatgtggacatctttcgactcattccgctttttttttagttcgcacacatggagacgctgaaaccgaggcgtcgaagatggttgggggccttacttcagccgagtttgcccgcctgctttcgcgtcagcttgacggctgggcgaaccgagttcactttggcgaactacccggtcgattgatccccaccaaagctattgacgacgtcggaacgtcgagaaagcgtaaacgggcggtcgcgaagggcgggcaagtgcgatctcgtcgcgccacgaaggacacagctgaaagtggtgaagaggaggaggaagacgacggggaggccgagtctgaggacgatggctcccgtggctatacccctagtccgcccccggtgaaatctggggcgggctctcgcgtttcacccgttcacccgcaagacgttgctatgacgaacactcttctggcgatctctagcactgcggcgaagccggtatcagtcgctagagggaagaagaaggggaaggtcgtctagattggtcgtgccttttcggacagcgaggggtccgacgggacaccgacttcgccagttctccagcgcggtcctcgtggggggtgcgcatctcctccgccttctagcaacgccgaagcggcgacaggtgggagtgcttcggcgccagcaatcggggcgaacaaccctcacaacgaacgggttgaggtggttccttcgccagctcgccggcgggaaggaaaagctccgacggtcgaagcgattgtgtcagacgtgacacttactgccccgcacttcgttcccgccgatttcgccactcggccagagatcaccccttttgtggatggggtgtgccaagttatcgcgcccacggaaggccttggtctcttcaccgagatgaacgagttcggcgagagctatgccgccgtggtgagcttgtttgttcgggtatgcttttttttttctttgcgcgaaattttcccttttctcttatatcatggcataattgttccggactcccctttccagggccttgccgcgcatctgagtgcgaagaagtctgccctggaaaggctggatggttaccggcttcggttgcggaaggccaaggacgaccttcgccacaaggaggacgaaaggcgcgtcgtggcggacaccttgtggagggcgaatgcggagaacaggtccctccgtgccgatctggaagtgtcgaacaggcggggcacctagcatgatcgccagcttgctgcggccgaagagaggatcaagtctcttgagacccgcctcgtttcgtccgaagccgctgcttcgactttagggctggcgacagaatccgccaaggaggcctgttacacgctcaggctggccctgaatgaccttggtgctcgcgcggaggacaccctgggagatgatgggacggctttcgacttttccgagtggacgcaagagtcggccggctcagttgtcgaagtggccggcgcttatggggattgttgtgctcgtgtttcggcgggcttcgtccttagcctgctacatacgcacggttgcgagcatatcagggattttccccgctatgtgacggaagaatggcctttgaactcgcaatgctctggggcggccttaaaggcgttccgaaagggtttctgggaggacggtggccgggattgcgcgaagaccagccttcgcgagaatcttgagaggatcgcgaaggaggaggaagctgctgccgtccatgccggaggagaccctgggtccacggagctagcaggcgaagacaatagaggccaagaccaccctaaggtgtgaggcccttcgccctcatatgatttatttaattttttttttgcgttagtagccctgctatatataggctctttgaatgttcggctctcagccgctttcgccttgtaattgttatgacttcttgttaatggaaaaagaaatcgtcgtttcgccagccttattatcgtgttggacagtggtattgatttcgcctggatttttccttttgtacttgttctttggtgctttattagcaggtttatggccggaaatcatgcattcgccccccccccccactactggttggcgaaaagagaacgagaaattcgtggcggcgaaaggtttgccgaaggttaagcgtcctcttcggcctatttactgcgagatgttaataaacggcaacagctaccgagtcataaaggttgccaagtggatgcgcgcacatccgggtcggaccatagaagattatgatcgccatcgtgtttcgtgcctcgagaacagtacaaacttttggcgaaactttaagaggtcgattcgccaagaggcgatcgcttgccgccgttatggcgtaatttgtgtttcgccccctctccccttagggtagtatacgacattactaatgatggcgaaccgtgttcaccaagtcgttccttagggagtggggattacttcgggggcgaagatgtaatttatttgtgagttggactgtgaagcctttgctttctatgcttgtagcatgttgtatggctgtaacctttgattatttttccgaaataaataaagatgtgttttatttccttttcgttgttttcgcattgtcacctttcgtgcattcgttaggtcgaaacatgtcggcccctttgcgtataatagcgaaataggtatgttgacttttcagttttcgacttccgttttcgatacgtggtattccgcactgaaagaagcgcttgtgttcacattgatcgagtacaacagtgttcggttagttatttccgaaataagctgtcgcggtttcaacgttcagtgagcaatgcttcggccgattcgtttcgcccccctggctttttcactgatcaggcgtttgtcttggggtttttccacgaattatcatttacacaggtaaagaggcgaaaaacacagattttatactggttcgggcctccaatgtggataataaccctacatccagtttttttttctttttccattttcctcttttattttttgcatttttgtgccgaagggcttacatatcaatatgtacatttttacaagttggcgatttgggtgccacccgttctagacatagaaacgcctaagggaagcagtgttccaggaatggtcgaactcttcgcctttcagtgtcgctaggcgaaaggagcctgttctggacctgtgcttgatgaggtatggcccttcccacttcgattcaagcttcccgacctccattgggttcaccttcttccttaggacgagatggccaggcaacagctctgtcggtcgaatctttttgttataagttgctgaagtgcttgtggcgtatttgtgcatgtgttccagtgcttcgactcttaccccttcaaggagttcgagtgacacatcgcgcccgtcttcgcctcccgagaacatcacccttggtgaattagcccctagctcagttggggtcattgcttcatcgccgtagaggagcatgaacaggctgaacttggttggccttgtgggggtcgttcgaagggcccaaagaacagataacatttcgtctggccatttgcccttcgctgccccctcaagccttttcttgagccatttgttcgttcggctgccccatttgactatgggtgcgcgaccgaagcgaacctgattttcaagtttagcccttcgcacgtttctctgaacttgtcagagtcaaattgcttgccattgttagtgatgaactcctttggcactctgaaacggcaaacaatgtttttccacgcgaacttctgtacggttgccgaagtgatcgcaccaagtggttcggcctcgatctagcgggagaagtattcgatggctacaattgcaaacttgtacctatttcgcgccacagggaatgggccaatgatgcctagcccccatctggcgaaaggccagattggtgcgataggctgcagttcgtgctgaggtgcagtttggcttcggccgtgccgctgacagctttcacacctcttggcttgctcgacacaaacttttagcacagttggccaatacaccccctggcgaaacactttggaagcaaccgtccttgtggcctgatgtgcaccgcacagcccctggtgtatctctttcgtcatttcctttccttcggtgaaagaaatgcagcgaagtaagggttggagcaccccggaacgatacagctggccggagactagcttgtattttacggctctgagctgtaagcgcttcgcttctgcttcgtcttccgggagccagccattcttgaggtacttgacgaacggtgttcgccagtcctctgggtctttacccagttctgcctggtcaattgccatgacgtccagtctttctgtgggcacacttggtgcgtacaagacttcaaaaaagatgcctggcgaatgcgggcctccacaggcggcagatttcgccagggtatctgcttcctcattctggcctctaggtaagtgttcgaccgttacgccagcaaagcacttttccaaagaccgaacggcctccagatatctcttcattccttcttctttcacctcaaaggatttgtcaacatgactagccaccagtttggtgtctgttcggataagcaaacgccgaacccccagtgctttcacctttcttaggcccaatagtacagcttcgtattcggccgtgttgttggtcgtatcgaactgcagtcttgcagcataccgaatgggcacgccccctggcgaagtgagtactaccgcgacacccacccccttgtgcgaccacgagccgtcggagtgcattacccaaggctgttcgacaggctcggggtcgggggcggacgtcggtgtttattcggccacgaagtcagctaggacttgggacttgatggcagtacgggcgacaaaacgcaggtcgaagggtgataactccgccgcccacttgctgagtcggcccgtgatttccttgccccgcagcacttcgcccaaaggatactgcgatggcacagtgactttgtgagcctgaaagtcatgcttaagcttgcgtgaagccatcactagggcgtaaacgagcttttccatttcgatgtatcttgtcttcgccccttgcaaagcttcagagacgaagtatactagtttctgacctgactctgtctcttggacaagagccgcattgaccgccacctgcgaaactgctaaatagagcagcagttcgcttcctggtgttgggctgaccaaggcgggtggcctttgcagatattgctttagctcgtcgaatgctacttggcattcgggtgtccagctaaactttcccgcaccccggagggttttgaagaagggcaaacctctttcggctgcttttgagagaaatcaactgagcgccgcaattcggccagcgagcttttgtacttcgcgtacgcttgacgggggcttcatttgccgaatggcatcgattttctcagggttcgcctcgatgcccctttcaaaaacaagaaaacccaacaacttgcccgcgcgaacaccgaaaacacacttctcaggattcagtttcatgctagccgcacgcaagttgtcgaaggtctcttgtaagtcggacgcatggtcgaaagccttgcgg

SEQ ID NO: 23729 - DNA, 4823 bp, Oryza sativa
tttcgcccccaattgcttgtaaaggaccttgtacaccagcctggcgaatgttgctccagcattccttaggccgaaaggcatcctgaggtggcagaaagtgctgaacggtgtgatgaaagctgtcttggggatgtcggccggattcatgtggatctggtgatagccggaatatgcatcagaaaagctcatgagctcgcagctggctgtcgaatcaacaagctggtcgatccgcggcaggggaaagtcgtctttcgggcacactttattgaggtctgtgaaatcgaagcacatgcgccacttgccgttcgactttctcaccaaaacagggttcgccaaccactcggggtggtcaatctcttggatcacccccgctttgagtagcttctgcaattcggcctttgctgcctcttaccgatcggcggacatctttcacagcttctgtttccttggcttggcattcggcttgaccaccagatggtgcgtgatgaggtctgtcgaaacacctcccaaatcgtcggggttccaggcgaagatgtcaatgttcttcttgaacacctccaggatgttttcaacttcctcttcgcctagatcgccccccaacaggacgagctttgcgggatcggcatcgtcgacttgcatcttaatcaccttgccatgaggtacaggcttcagcatgcgtttagcgtggtcatgtggttcggcctctacattgtgtactgccatgctgattgcggccatgtcgcccttcgatgtggtcgagggttgtagccccttggcgacgatcacacctgttgggcccagcatcttgagcttgagatagttgtgatgggagatggcttcaaacttgttcaaggttgcacggccgaagatggcattgtagttgtatgggatgtcaacgacatcgaacagtatttgctcttcgcgcctgttttcacctgtgccgaaggctaccaccagttgtacttggcccaagacttgaactgcttcgccgccgaaacctcgaagcgaggctggcgcctgggtgagggctagtgttgacaaccccatcttggcatatgcctcggcaaagatgacatcggctgaacttcccccgtccaccaggattcgccggacttcgaagccagctacctcggccgaaatcaccaaggggtcttgatgtgggaatagcaccccttcggcgtcctctggcccgaaagaagaggatgggcgaaacacctatggggacaagagacaccgtggaaggaaagaacggaggaagagagcacacgcggtaaaagtggcaagtgtggcggtgaaaaggaaagaggggtggggatatataccccacccgggcgacgtttcgcctacccaccactaataaagcgccacgtggcgcaagggtaggcgaaacggtaaatccccatcatccgagcagcacagtaaaagccccatcaaaggaaagcccaatactgttcccttcggcccggtaaaggtaagaatattttatttgcaggaacaatgtaggtttcggcaggagcatcggtcgaaagggggcgccacataccataccacatggtttgcacggtctcggccgaagcttcattctcacccttgcccgtgaggggcttgttggcggatggcatgaggcccttcgaccaaatctgccgaaacccgtggcgaaggttatgaaccaagaatggtgtgaggcgaagcgtcgcgtgagtaagccggaggcgcctcaggcgaagagtacctgccgaagagagacgacttcgccgtgtctagttcgctcccgcaagggccgaagaagcctttccggcccatcaagcctaggggctatagggccggcgatcgcccgacggcccatcaggggcccataagcccccttgacattgtgtatccttgtaaatgtccctttcataagggcaaccatgtaaattcctctgtataacctaaaccctagtagtaagaatctgtaatggggctataaatagtcccctagggccatgtaataggggggaggaagaaggagaaattccaaaaaaccaatacatttcgtttctttccaaccactgttgagtaaccacgtctttcgacgtatgcggttatcgtttcgacaacattttgcatgaaactttgcatgaattacattgtaaaaacaaaagcattgtaatttttaagattgattttgagaaagcttatgataaggttaaatggtcatttgtacaatagactttgaggatgaaaggcttctctcctaaatggtgtgagcgggttgcctcttttattcaaggtggtaatgttggtattaaagttaatgatcaaactggtaataattttcaaacatataaaggtcttagacaaggggatcctctatctccaattttgtttaatttagttgctgatatgctagctttactaattaaaagagctaaagataatggatctcttaatggggtggttcctcacctagtggatgatggtttgtctattttgaaatatgcagatgtgtcacgcccagaagttcccgaatagaattccaagcagaatgtgcattaaaatccccgtccaggaccggccggggtacacaaacgacaaagttgacatacagatccacgtcttacaaacattataaaagtcttacataaatgcagcggaaaaacaaaagataactggagctaagccttgacttggtctgcagcgggaacaccactccacaggcatcctcgacggcacggacgaagcctactcctcggagaaacccaccatcggatacatactcatattctggggttggggaaaatagagcaagactgagtactacccactgtactcagcaagtcataccggaataggggtatgatgcagggatttatcaaggaataactacaatggttcatttgcataaaacgggcatttataaacagaagttgagagcagtaaaacagttgtaataattaatcaatattaatcatccactgtccaacgctataccacgttgcaacaggcccaaccatccacctatactatccaattccattagactaatctagagtgagtctaatcacgatgaatctagttgaccacccataagcgcgggcacggctattcgaatagttttactctgatcagaggtgtacaactgtacccacaagacacagtcccacgacacgtttccgtgcgccggcatgccatcacgacataccggaaagaggccgtgacaggacccttcgcataacctcctttaaccaagcacaccacacctcaggtttcacccccactcctcgcaaggcagcgggcagtcccctctcgtgcctaggtgaatccggaagcgacagaggccgtcgcagggcccgccccgctccatcacgcccacccttgcctggatgcgtcagctagaggaaagctacactacaagcccagccgttgcccacgctggcttgtggtaagtacgaggaattcttccagggtttcccgcgaaccggtccttaatttgccatgagtgcgactagcaaaaccatgcacccacagcccaccatgtgattcattttaattaaccatcaccaaaacggtggcactaatccaacattaccattagaacctacagtctatacattaatattatatcccccattgtgtgctagttgaactaagcatggctaagcaatccctaatccaacctctagtcatgttgtaacccaagttaacaaaggaacggatatcaagcaaatagcatggctataacagtaggtaaacatcccataggtttattgtaaaacaatgcagaatttgaaagaaaacaatacaacacttgcaatataggatcaacatgatcaagtgacaagcatgacttgccttgctctgctgctggaggaacctcggcgactatctcgaagtacaccggtgcgtcggaagagccggaatctaagcaacaaaccaagcaaacaatacaaacaggctataaggctacttaaatagagaacacaaccatttttaatggattctacacatttttcttgatttactgagacttgaatgggcttaaacggagctcggatgaattagttatgatttttagaagattcattgtatttttactataaacagaaaaatccttaattgaattattgcgcaataaataaatcccgaggagagagagggcggcgccgacatgcgggccccacacgtcagcggctgcgggcgctggtccatggtggatcgggtccacggaccggggagaaggggcgcaccacgtcgcgcacacgcggcacacacgcggcggccacgtggcggccacgcggcggccgaactgacggccccaatctacccttgggtagatcggacggcagcagagagcgagcggccggcgcgcgcgagcggctcaagccggcccggggccatggcgcgacggcggcgcggcaccggcggcgaccggtggacggcggcgcggcactggcggacggcggctgagcggctaagcggctaagcggctaagcggtggcacgaccacggaaagggaggaggaagaaggaagggggaatcgtcctcaccgagggagcccgaccggcgaggagaggggcgacggcgaccggcgacaaggagcgacggagggaggtcgacaagcggcggacggggtccgggacgacctaaggaacgaaatggaaaggattagagagggagagagggaccatagagggcgggaacgccggccgaaggcggcggccatggcggctcttaccggcgcgcggcggggatgaggctccggcggcgaatctcgacgggggaggggtggacgaggtggacctcggccacgcaaacccgatgacggcgacggcacggtgcgg

SEQ ID NO: 23730 - DNA, 14164 bp, Oryza sativa
ggtggcccgatttcgccggccgacgtgggagaggtggaggtggagagagaggcgggattcgaatttcgaatcccggccatctcgggcgcgggcgcaggcgagagggagggggagtgggtgcgggaggtgcggcgcatgcgcgggcgtggccgacgtggccccgaggaggcggggatgtgggcgcggcggcggttgcgggcggcgcggcgcgggcgcgaggtgggagacgggcccgacaggtgggccccacctgtcggcgaccccgggtgagaggaggcaggcgactggctcgcccggctcaattgggcctcggccttcggccggcccagcgggaagggggagggaaagggagaatgggccggcggcccattcaaaggaaaaagagaaaagaaaaaaaagaaaaaggaaaatgaattttctagggattaaatattgcttgtgctcaattttaattggttaaaattatttctagagctctgaaaattccactaaaaatcttgttagcgtatttcgacatgtagaactcaagaaaaattccacatgccaattcctattattatttgcattaatttattaaggtttactcttgctttacactggtattttcttgagaccatttataacttcaatttaggcttgggaaagaacttcagggtgtgacaagatgataccatcatttttttggaacatgacttacaacaagcaaagaatttaaaattgatattgtctatctttgagaaattatctagcttgaaaattaattttcacaaaagtgagctattttgctttggtcaggcaaaggagtattatgagcaatattctaatatctttgattgtaagttagggttgtttccagttaaatatctcggtattccaatgcattttagaaagctttgtaataaagattggaaagttattgaacaaagaattgagaaaaaacttagcagctagaaaggaaaacaaatgtctgttgggagtagactagttttgataattttgtcatttcaagtttagctatgtttatgatatctttttttgagattccgaaagtggttcttcaaaagattgattattatagatcttgtttcttttggcaaggtgacgatcataagaaaaagtatagacttactagatgggttattatttgccaacccaaagaacagggtggtttgggggttcataatttagagattcaaaatatatgtcttttgagtaagtggttatttatgtaaagaaatgaaaatggtgtttggcaagaccttttgaagagaaagtatctttacaataagtctattacccaagttgacaggaaacaaggtgactcccatttttgtttcttaactacgagttcttggattgtgaataatggggaaaaaaagatttttgggaagataaatagctagaaaatatggcctttagagaaaagtatccatctttatatgctattgtcagaaggagaagttcttctgttgctagtgttatggcttctgttccactcaatgtttctttcaggagagctttagttggtcagaatttaacactttggcatgaattttgtgcatctattgttcatattcagttgaataatacttctgattgttttagatggaactatcatcagaatggccaattttcagttagatcaatgtacttagctttaattaacaatggttacattgatagaaataagttaatttggaaacataagatgccacttaagatcaagatctttatgtggtatttgcttaagggagttgtgttaaccaaggataatttagcaagacgaaattagaatggtaatttaagatgttgcttttgtaaaaaaaaatgagtctatccaacatttgttcattgaatgtcattttgcaaagtttatttgaagagcagttcagttttcttttggttgatatattcctactagcatatctcatattttttatgattggcttcaaggagtcataaacaaaaagatcaaactgatacttgttggagcttctgccttgtgtcgggctttgtggttgagtagaaatgatacggtttttgacaaatcacctactgttacttatatagaggttatttttaagccaacatattggcttcgtctgtggcacagttacaaaagtgtgatgaagatggagaattcctaattgttgcgtgtcgtatgcttgaaacgaggttatgcaattgtttgccaatcatgaatggagatttaccaatagactgaaataatgttattttgtgtagtttggtttccttttaattttggttggtgtgtttgctttcttttggcctgcactcttacagagtgctagtttgtaataattggctatagctcttttgagtaaaggccggaatgttattttattccattattaaaaaaaaagaacaactcccggcatcctgcacttaggcgccaaaaaagaaattaggacccgccaaaggataaaaaattgagaccacatcagttacgtctaaatttttcatcactcaaaaaaaatatttgttttacaaaaaaaaatactatcaccacaatttaacctacaagtcatggcaatagtactggtacattgcaacaagtccaaaattaacgcaacagtaatatattgtggccagagagaatacgttagttgccataaaaaaaactgttgcaaaaaatacccttattgctacagtaattttccgtgtggccatagcccgctgtttattgcaacaaaaaataaaagtataacaacaataataaattgttgtgatataatttaccaattgccacaagatgaccagacatggcaatagaataatgcatttgccacaataaaagtttgttgcaatattttcatggcaatagcataattctctcgtagtgagattgaggttctaatcacgacttaggtcaaactcaactgatgcagctataattatgaaaagaagaacaatatctagacaatcaagccgttggatgtttcatagggtggtagataccctatataatctaagtcaacattggtatttaacctaatcggctgccctctagcgatagatgttagccgactgaaggttaaataacaatattgccggagattatataggatatatgataactcgataacttacataaacaagattagagtgtcataaagatggaagcaataatcccgagaacgcaagccgccatgacaagtttacctctagctgaagatcaaaaccgatgcagctcaatccgaaagcaagaactcgtcgagatgaaacgaaagtaaaaagggtgacgatgcgccgagattattattgaacgtgtgttaattttattacatagggctcggggtctatttatacccgagattacaaaatatgtccatatcggacatgatttttatctctaacaaactctaaaataccataagtctttgcggcagacttttgcccaagcttatctctaagaaaattacataaaatatcctaattaatagatacaattatcttcttaggactcaatccgtgcatagcaatccatatgaagcacttcaacctaacccgatgacgtgcaccgagtcgtattgtcggaatcggctcaatcggctagccttgtccgacttgaactctgccgattctggtcgcagccgattcggactctgtttcctgaacgatctctatcttagattccgcttcggttttatctccatctccgatacttgaattatcaaatctggtcgttaacacggttacgtctggactatttgagaaaatgttattaacgaatacacgggagtcaaagacactacttagatctgatcgatgaacgactaccgtatctgcgcacggcgctcaggcgaaagtgtgtcttctcaaaactcaatcggaatttgcagccagaccgttgtcgtgccggaccaactattcgaattccagctcccaggtgtactgctcatttcaccgcggacagcaacgagtcgacgagacttctgcccgcgtacatggtgactccgcagtacgcgtcggtgcatggtgccctggccgtcgatgttcttcgtcgtcggtgcgaggccctgcgcgccgatgggcgggagccagtgcagctgcctcgccgtggggcttgtgtcgctcgcgcgcgcgtacgtaaatttgtcggcgcgtacgtcgtaatacgtcgtacgcgccctcgaggtacgcggccagccagcggagccggtgcgtggccgatatgattctcgacgacgacgaggggtgagcggcagcatatatacatggcgtctcaagccgacgatctcatcctgaatgtttgccgcgcgtgcgcgagcgaccgtctgccgtgccacctcgatcgagaaccaaccgtcgcgcccactgccgtgatcagcatcgatcacacgtacgacgtgtcctcgcgcccgaaccgcaccttcgaaaacgccaacgcgttccgctggccggtggcatcgtagcagcagcagcagccagcaggacgatgaggtccgagcacggcacacatatgaactgcgggtcctttcccttgccaatttcgaggcccatacggtgcagccactagcgtcccacctcgcttaccaaacataagtttcagtcctttataaactgaggccaggatgcacttgtcgagaaacaccttgtcgtcagctgagtataacatgtaccaatttgggaggggtaaagcaggcgatcgggcattccctagccccctcctcctttgcttgatgatcccctccctatgaatttcaaaccatttaaaaaaatagaagttaaaaaaatctaatacccttaaaatatattcttaaaaataataaatgtgcatagactttatatttataaatatatacagtaaactccatacataaaaaaaacatttgaatataaattttaggtatataaccttacacaaaaagaaaattggtgccaaaaaaaaggtaagtggtgaaaaaaacatttgaatataaattttaggtatataaccttacacaaaaagaaaattggtgcaaaaaaaggtaagtggtgaaaaaaaaaatctcgcctaggaaaggcgaaaaaaacatttgaatataaattttacgtatataaacttacaaaaaacaaaattggtgcaaaaaaaagtaagtggtgaacaaaaaaaatctcgcctgagaaaggcaatcgttgtcaggagatttgtgaacctccactattacgtcctagatacgtgtgggtccacttctcatttctcaaatatcagtagttctatttttttaaaaaaaatgattgacaacatatataaggatacaccatctcgtaaaaactcaagtccaaagtcaatctacataattattagaaacaaagtaaacaaattttatagcactggaaataacgtttctagacatctgcattttgccacagttgaatcctaatatctgtacggttaatttgacttccatggttctctgaagaagaaaccgtcttcttcaattcactaccaaatatgctggaatttggatcttcaacaataggagggctcatggaactaaggaacgtagagcatgcctccttgagtttgcaacaatggtgcttctccactagcaccaacatggttgacactgagtatgtatcaatgtggttgcacaacttatcttcgtagacaaactttaacctctgtaagccatacctgtctgcagcagcaagcaactgttgagccatagctacattgtcttttccatgacctatctctggccaaatgtctgtgtagatgaacccaagtagagccttgaacactcgtgctttcatgttgtcaatctgtatcgcatctatggtgcctttcttcgtcggcccgaaaagctctgccttgaagaccagtgaccgtgccgccagcaccaaccggtgcgccgcaaacatctcgccaccgaccaggaacttgacatcggtgccttctttgcttacgaggagatcaccataatgcagatgcatgttcgacggtggtacgacgacagatggcttttcctttgggatgattacatgggcagcaatggcaaagtagtcatcattgagatattccgatcgctctaattcgtctctcctaatgaagtttttgaacccccttgcactaccagaatatgttgaaaagttacggaatttggtgtgataggtgtacgacagcaccgggttcccgtatcgatcgagcaggctgaatgtagcttttgccagcacgtcctccgatcctcggtgacgatgccctcaagcgcgaggaagatggagatgcagtccttgttgctgtcgcggcatccgtttgggtagtagctgagacatgccaggtgtggcctcctgcgctgaacggacaggagctgagggggtagtggcagccggctttcaaggtgttggagtacccgttgatcttgagtacgtgataagcctgcgccgcgatggtcatgacggtggaccgcgacggcggggaagaaccgtcgccggcgctggccgcaagtgtcgtcgccgtcgttgtcgccatgcctgcagtcttgtgttggtaggccgttctctctcgtggaaaagattgatttcctactaacagactgcacgcctgcttcttgtaggacaaagtgttagaatccaattccagctgcaggttgctgggtgaagagaaagaacttcgatttgggttattggcagcttcgtctgccggaacggccggtgcctgtgcaataatctgcacgcgtccgtgtcgctcatggtcgttgctgactagcttgtagtgtgacggtttatgtttatcgttggaggatcatttcgcaatggttgttgcatatatactgtacttttcgtttgatggtacgcggctagttgatcgaaaaaagctgtcagtgccaattgccaaaccgcctactgcactgacctgcttgattcccctttcgtatccatacgtacagttcacacaaatatttccttcgcaaccaatgacagaaatactagtttgattatatcataacgttggttacgtattttgagatggcaagagtagatctgttggtaaggataagatatgaccttcgtccttcgttctagaatataaagtacttttttatatgaatacgggtattaaaaagtagataaaaataattggaggaaaattatgataggtaaagaaaataaaataggtgaaaattaaacatagaataattaagattggttgagagaaagtgaagttagaaaatagctttattttgaaacaaattacaatgctaaaatagctacaccatacgtcccagaaagaatcaaatcctggctcggtataaatctggacgtgctcactcaaattcatagttaggatttattttttactgatggtgtatattataggacagaataagcacttttctagctcgggctatgaataattagttcttttactagataatgatgaataattagttgtcactcgacatttgtcatatcggatcgatttgggggtggataaggtataagagatgagaatgacttgggttgattagcttatggttttatgcgtattattgtagtattcacattgttgcacaaacgatctacataactaaatcatcaattatacagatctaaatcatttcaaaaaaatacggatctaaacatatcttacaaattattcttatattatccaaatatatagcatgaaaaaaaatataatactcctatattatctaaacatttttcgtgctcaaaggctggtgtgtatatagttatttttttaccaaagtatatagttattttttttgtgtgtgctgcagtggagctccattgtagaccctattctttttttttaacttatgtttaggtaatggaagtatggattattcttgacacgcttcgaagtatgatctattcaaaaacgttcatgaccatttcttaatattttgtctaagttctttgttaactttataatcatgatattttattaatatattggttaatcagcttactagctcaatacaattatttgtgacacacttcgaaaggtatgatttttccaaaaaaccttgtaaatgacaattgcttaatattttcttctgatttatttattaactttataatctatgatatttatcaattattctatgtattagtttgttagttaatcagctcatcagctcaataatgtaacacctaattattttaagttttagaccgggggttactatatgggaacatttttgttagagttgcccaccaacaccactacatgaactaataaagggctttttgattgctaccaaaatacgacctaccattgttttggtagtttgaatagtacttatgcttagtttagattgaagcccatgctagatttgtcatcaatatataacattcttccctataattcacatgttggcttcatattggtagcaaaccaaatataaccaactgcaatcttactctaccaaagaattggtagggtagcaatccatataggcctaaagattaccctcgatagcttagtttcaaaacatagtacaacacggaatagatagcaaccacacgcttttttattggcacacttacgattgatatttctacaaagatacattaatagtgctaatgggcatgttcagcaagccgactgcagcggcagcgtctatgctgcttttgtgcaatactgttggtgtcggctgtggcgcaaccgcaaaatcagtagccaaacaggaccaatgcgcaagaagatgtgtttgcgtgagagggttggacttccttcttgattaaatacttgctagaaatcatgtggtttgaaagcctatacgagattttgtatataccactggtggacaaaccctttttaatcccggttcgcaacccccctataatcctggttacgaaccgggactacgaatccgggacttaaaaatgcccatttttagtcctggttgaaataaccgggactaaaccaaccgggactaaatctttagtcccggttggagttaccaaccgttctttagttccggttggtgttcttttttctttcctgctgcttgcatgatttcgagccccacaaatcattcatattatccacaaatcattcgaacaccacagatcattcacaaaatccctaaatatatcaagctgcattttctatccccaaatacatcacaaatcattcacaaaatcacaaaatcatctccacaaattcattcacacatcacacatcacacatcacacagatcagaaaaagaaatccacatcacatagatcggccgcacacatcgcacagatcaggaaaaaaccacatcgcagagatcgggcgctggccgtccgccgcctcgccggcctcccacccagacgcctcgggctccaccaccgcctggggagtgtcgcctcccgccgcccgccgcctcggctgccggtgcccgcccgctgccacctcgggctccgccgcctcgtcgcctcgccggcctcactggccgcctgcgcagccacccgccgctccgcactctccctgccgcctcgcgctgcccggcctcattggtacgaggaggaggaggaagagaagagaagggagaggaatgggagagaagggatggaggattggatgaggctgaggatggagaagggataagggaggctgtttaattaatgagaggggaggggagaggaagggggagagaccgaggcggccgggcggggcagtggtgcacggctcggttgatttttgtcccggttggtataaataaccgggactaaaaaagaattggggtctaactcgatccgataactttttgaaccgagactaaaaatgatgttaccaaccgggactaaagatcaaaaaaattttaaccgggactaaaaataatctttagtcccggtttctattcgaaccgggactattatggattttgagcgaccgagcaaagatggtttctccaccagtgtacatagggagatttttgcaaaatagaccctttcacgcattaacttctctaaagagcctaaaccaatgaagaaaatataaataaatggaacctgagatttgaagcttgctatgcataattatgtcatatcctctctctcatgtatctgtgtacatttaacttcacttcctaaatattccctccattctaaaataaattaatcttaggatagagtttaacataacatgtcatatcatactttagatatgtttattttgggaagaagggagcagtccataaccgttgcccccaagtcatcatacaatattgttgaaactctttggtaattggatgcccatagtccaactggattattcccatcagttatgtaaggaccctatttagatcgcaataatttaaaagaaatcctagttgatggtgatcagttccaaccctttgaaaggaactgtttgtgatgttccagagtttgtttatttcacaatggcatggacagcgtttacacgtaccgtcgcacacaccattacatgtgtatataaagtttgtattcttaatacacaccatattacacatgtacgtactgtaagtttaccttcttaatacgcatccagcgtagagtggccaacagacaaatatgtgaaccttagaattttttagtgaaaatacacccgtatatgtgtaattgtggactctaagattgaaaacttttagtgcgaggagtcatttttggcacactaaaaaaggagtttctcttaacagactgtctgagaaagataaaaaattgcagtggtctataatggtgccttcacggctgcatcatgtgtacatcatggaccagagagttggtgaaagataaaagatatcgtgactgagctgcggacacaacaaagaacagaacaggtcggctgtgatcttctggggtcaatgtcttctagaaggcgaagataccaaccaacattctgtggtatgccccgaaaagctgcaaaatggagcgttttgtgtgttgttgtgcttggaataatgctaccctctttcctttttttataacgcggtgatttgaagccaaagaaaggtaatcgcaaagtaacttagcgagaaaacaactatggaaattgaagggtctgtttgatccacattaagataaactgatcgtctcccaaaaccaataaaaatgttactaaaaaaaactacaagccataagccattttttatgagagcaagttttatatagtagggtgattactacatctcatgtcatctataaactaattaagatgcaacatgtacaatatgttatctccatgtacacaaactccaacattttctttaatcgattcattatttcattttctgtttgcactttttcttgaaaattatatagaggttgcctcttgcatgagaggtggctcatgctctctcttcactttctctcctccacctcatcacctaatcccatgtgacaattttagaagcaacacatgtgcccttatagtacttgccctaatacattttgttacacggtttcaacatttgttgccagagaaaattacaaatttccgttgttggtactccatttccttcacctacccaagctcatttagggatatgccggtacatgcaaatatacatttcaataaaaagaactttgcaataatttacacagatactgttgttataatttcttaattttcaattgaatcatttctttggaatgattctcacaaaactacattcagaagacccatgcttaaattgattgtagaaatgctaagaaactaagaatgatatattatcgtcttaaaatgcaatgtgtatttttggagttggacacagacattaaaaaaactagatgaataccccaccatattgctgcggaaaattaagttgtataatatatacaaaactaaaaacaatttgatacaattttgaacctaaaagtaattgagattgcatgtttttaagagagaagaaagaaaagacaatttagaccatagatctatcattcaaaggctataaatgattggggtgatgtggcttaatgagaaaagagagaaataacattaactatacttagtggggataaactatacaagtatataagatacgtgaaaaatgatttaggaaaggctgtcacttagtgaaaagaaaatgtggtgaaaaaattcaagggaagattaaaaaaaatcacctcagaagtcacttgaaattttaacattccttgcaaatacccgcatccctctcggttttgtttgaaaaacaccctagtgcgcacttgcttaaccaaattgatatgcatggttttgtaaaatgtgaggcgtctatatggtctttaccaaagtaaaatacttctaggagtatagccttaatttttttggatattgcataaatagaattgctgatgagagtttaaacgttgttgcactcaatttcggtatatgcagaaaagaaatcaatgaaacataaagaataagtctaatgcaaatactttgctaagattgactcggctagcttagcctatggtggctctacataagtgttaacaggctttattagataagcatgtacacactgggatggtttttgcacaaaattgagtaggggtggatatttgcaacaaagtgatttatgaggtggaatgtcaaacttcaagtggcttttgggatggtttctgcaactttcccaaaattaaatgaaggatgagtgcgattagctaagacgcgagcgtaagcgaagaaatagcttaattttaggaggagtaaaaatatataacttcatgttgagactgatggattatactagtcctatttaaggatgagtaaatttcataaaactacatgtactttgatcaaactattataaaactataaatttaaaaaggtatatcacataaatacatatttaggaccaaatttatcaaataactacagatttaaggtggaagatcaccaaactaccgatgtagtaataaaatgatcacaaaacgacatgttttgtaccatgttaaatacaaaactacaacatttataattctaacataacaatagtagtagggatttaaattgtaaaatctataattttgtgataactctagtattaaatctatagttttgtgatagttgatcttaaattagtagttttctaataaacgttgtgttaaatctatagttctatgatacgacgtcttgaatctatagttttattataatttaattaaagtacacataatttttgtgaaatttacactttaatgatgaattgatttccatcatccttgtgcatgaatctagccaaatcctctgcagtattgtcgatgcagtagcaatggatcagtatcgggcccacacgtcagtgtctgttactgaatgtgcagtactgtaaagtgtaaacctccttccttaaactaatcctctattcccttaaaaaaaatctacagtatattttttttccaactcgctggccgctgccttcctccggtcctccctgagctggcatttttggcaccacaacacaacccccccaccccaccactcttctccctatcgcactccacctccccgagacgcgacgcgagcacgagcagcgcggcggcccaactcccgaggtggtgtaaagccttctcctctccgctaccttcttccaagatcgcgttcctgctctctgaattcgcggtcagtccggggtggggcgcgcgagttcttgcctcagatccgcggcggctcggtttctgttgcggaattgtctaagatttgcgggggtgtttgtttgctgctgaattgccgggtgtttgtgattcgttggctgcagcttgctttcttggggggcgccgccgcggcggagttgggtttgaccggccggtgatggggaagggcggcggctgcgtccccagcaagaagcggcagccgccggccagcaccgtcgccggcgcgccgtcgtcgtcgtcggcgccgcgcgacgcccccgaggcggaggcgtcgggggaggcggccggggggcggcggaggctgcggctgtacatcgtgttctactcgatgtacgggcacgtggaggcgctggcgcggcgggcggcggcgggcgtcgcggcggtggacggggtggaggcggtgctgcggcgcgtccccgagacgctcccgccgggcgtgctggagaagatgcaggcgccggccaaggaccccgccgtcccggtcatcgcggcggcggcggacctggaggaggccgacggggtgctgttcgggttcccgacgaggtacggcgccatggccgcgcagatgaaggcgttcttcgactccacc

SEQ ID NO: 23731 - DNA, 8652 bp, Oryza sativa
ttcttcacaaatggattaattaagctgctaatcatatcatctttatattagtgcttgctatcatggatagtagtgattgattctttaaagtggactggattagaccacttccttttccattcataagattatctagttcttgggataagaaatgacatatactaggtgttttagatgttgaactgaaccttgaatgctgttgtttctactcagttcaaatttgaacatacccctcatcagtggactgtttttttttttttgggttagtgctgagtgcttgcaaccactttgttggttggtgatatagcatatgttctgtattggcagtaatttaggcactaactgtttctcttcttctctttttttcccctttttggttcaatatcataggtttaattttttaattgttccttcactccaattttcagcatgatgcttgctgttgcactcaatctgtctctgttcagtgagcgtgtgcgtttacctctaggacagatttataagtcaaatatagtaggtgaggatatctgagattgaaaggggttccaataaatatcagtcaaattgcacctatcttgacaaatttcaagtaattcgccctgggggcatcagcaagttaatgtcacatactaagatgtccttgtcatggtgcgttaccaattgtttggtagttccaaattgtggaaacgaggtcttattcttgtggctgttcaaaatccttacgcactacttcctcaataattaatagccatgattctgtactgtgagactattaacaacaaaggtagtgtggtcatggatgcatttatgaatagcaggatattgaagatgatttgtacaaaaagagatcttgatttaatgcacagcatgcatagcatcttgttctctagctgatcaggatctgctgtactccggctcaactcaggtgctgtcctaagcatttggatatgaaattcataaccaattgatggaggtagtgggtacaacacaatatttagtagtatctgtgaaaattttggatttatcattttcaaacccagttgggaattcagttcttgcctcgatcaaaatatttaatccacttcttacacgccaagtgtgaggaaaatagccattcacttgtttcaacccttcttgattttgagataaaaatgatgatcttcatcatggcatttggacatgtataagaattagaagatgtgtcacagttatagtactgttctttctgctcttttgccaggctatggttccttttattggtttatatgtctataccacccaacattttttttcaaagaagcattttaggttaatatttattttataatgaaagtttattgtggtggttttattactgctgagaaatggagaataccaacaaaaattctagagggagggagaggtatataggctttaatttggtggatctaagttaaaggcccagatatgatagttgtttatatattgattttctgaaagaaccacatctcaatcctgtcacttagggagatttcaaataagttggcactaattcaacagaatataatatcccaaatttagattccgtttgcagaagataattttaattcacttcacaatttgcacagggcaatcagctagtttactaagaataacatgtatactgctattttgcttctcagtttaagttggttttgaagtctatcttcaccctgctattgctgaccatgcttctctgttcattttagttggacggcaatcacccagatagtgcaccatggaatgctctttgtcccgattggctacaccttcgggtcaggcatgttcaagatggatgagatcagaggaggcagcccctatggcgctggcgtcttcgctggtgatggcagcagacagcccagcgagacggagctcgccctagccgagcaccagggcaagtacatggcctccatagtgaagaagcttgcccaggcttgagcctagaagaagttgaatcctcccacgacgccactgtgcagtccaaactccacacgatcgtccagtcgccattgatttccccctattggtttttcttcttctatatgtaatgtgcacagcctgatgatcctcagatcgtcgtcgtatttgttcgtcacagatttatctgtaaattgttgacataaaacattgtttggtgtccagttgaacactaagtgtgccatacggtgttgatcgaaataacatacatcacttgccatagatttgttatgcagaactctgtttctgtatccagaactttgtttctgtatcatgaatgaagggaatgcacatgcttgtacagtttgtactgatgaatatcagtctgaatttctgatactgcacagtggagtggcgtcaggctatagcttgcaggttccaactggcggattcgaaggctgagccgccacctccagcgccgacgatcaccggccggcgaccagcagggtgctcgtcgtgacgttggcgcgaggcagtgttgcttcccttcagaaagcgtattcggagaatacgccgtgttgcctggagccttgaaggggtttatgtggcgaaaatacgtctcttcgcatagaaagcgtattgggagaatgcgtattatggctggtaggtggattcaaaattttgaaatttgcctttctgcagggggggaaaccgcagcagcagcggggagagtttggtcgcctgaggtttttgcctcgccacgccggagtggctcgccgccgccgccgccgtggtggaaggagtccgttccggctcgtctcgccgtcgcacccccctccgctggtacgagattctcagattccaccccctcccctcccatccccgtcccctggcggagctccgatcgcacgcgattgagggcggtgaattagttcgaggtagcgatcacaaggtaggggacgctcgctcttcgattagggtgcttctcctccgggccggcgactgggctcaccgacgagttctgcacccttagggttctaatgttgtgttcctaggagtttgattaggctttgggggggggggggggggcgctcgcttgtgcaggtgtagcgttggtgttccctggtgacccaaaatctgctgggtaattgatgcgatacctcctctgttatgccattagcgtgttgatttctggagtggaaggggggatgatgggtctctgatatggacttgtagaattgtgctacatatgtctgaacaaaaagttctttgaacttggtggatttttccagaatgatttctggctgaaaactatcaaattggaaagattgtgcagtttggatagattttcctgggtctatacctttttcatctttatttattacacagggaaatcctataaggatgatcgatatttttgtttattccactatctgtttcagtgtcatcattgtacaggaaaagggcactgtctattgtatgtttacagcgtttagttgacatgtcgcacctacttttacaattttcatgcttctatgatagtcttggtatctaatttttctggtcatatctcctcacctgtgcataatttccaaatcttgttcatcataaaataaatgaattgatatggagtagtgaattctttgttgttgcaattgacttcaacagagcaaaacggaaccaatgatggacactctagagcttgcaagtgcaataccagaagctggagatgaggcatttcagattcaccgcttgaagcgatctgcatatgctgctgtgctgagagcgttctatgctcaaccagaccttctctcaggggtacttatttcatggatactttctttgtttgtacaagttcaattgcaaaatatcagtaaacaaatcatacataatatcagtaaacaggttcaattgtacaagttctatgctcaaccagactttctttgttttatcactcatcttgcattctgcattttttttaacgattgttttgttacaatgaattacctagaattacatagcttgatcagtgaatccaatctgagtaggttcacgtagccatgcgtcataattggataacacggcaccatggaataatatttgctttgaccattaccatatgtatattcttgttgttcattatcttcaactcacaggccaaggaaggtagtcttgcaaaactgagaagtgaattcacaatatttgacaccgagcacagagaatatctaatgaaggctatctcaggaagtcagtctttgaggtgcgcaaatcaagtgttgtttcacagaatataaaatatatgctgatagaatgatcagtgagcttacctgctctacctttccagattcccaatatctcttttatatttgatagtattgaactcatatttctacggttgttttagtgttggaaatttcagatctccttgactgtgcaaacatttctcatactgtgacaagtaccacaaaacaaatcaactgatattgtgctgcatttcttgttgcagtgttggtttgaacaaagcaagcatttgtaatattgaagttacaaaggattctctagatcttgtacccatgataacagatgctcaagatactgcatttcagattcactgcttggagcgatcagcatatgcttctgtgttaagagctttctttgctcagtcagaactcctctcacgggtataccgtatatgtgtcatccacttatttctataagttagagtatgatatatcactatacaatgcagcttccattttatagaactttcagttcttagttttgggagaggtgtatgatgccacattttcttggtgctggagaaataggctcacattattgctcattccatactatctttcttttgcgcatttatagtcattatactcttatggtgaattattttgatttattgtaactggcattgcttcatctttattttttttatttttttgccttacagtcacaggccaagcttctcactgaactgaggaaaaaacttagaatatcagatgcggagcttagagaagttctcatgaatgtcacttcaaacgagtatatcaagtctttgcggtgagcatatctacttattgcctcccaggaaacaaaattcatgttgatcaatcagatgtctgtatttctttgcacttagcaggaattgtagtttggcaaataactctggtcttaaggatcctacttttgatgcacgtgccatggttcctgataagctcgtcaaagatggacaaagcttcacctcattcacaaactgcatcagtttgtctcaggaatcacaaatatcaccgcgttcaatgctatctgtgaggtgattatgtttttgttttttattatttcacataagttaagattgctctgaaattaactaactgttggattttcagttttctgaacaattttcacttatgaaacaggagtgttgacatattacgtagctctcacaggaccaaaaagggtccctgtctttatccccatgcaatagttcctgctaagaagtactctggaaatgagtacacattatcatacttaaaatcctctccagctgaacaattgccagttgcagtttcctctgtgcaggtggtatgtatcggttctttcttagtagctaacatcttaaactacaatatgagtggtattctggatttatggaattttttggctcttctttttcctgctagtaattattatctccagatgatgtcatgatgagcttaatttcattaaaaaaatatccacagtattcagaaggtaaccacaattgccaattggtaatatgcccattcaaactattgtggttatgtacttatgtggaactgtaaattatgaaaaaccttcccttttaatacctctgtggtttagtaaacagcttttgccacttctctgcctgtttttatggtaaaaactcagttaaagattttctttaaataaatcacttggcactgatgaaggttcgcttctaataatctagcattctagccctatgtgttgattataatttttgacagaaacgtagcacagatgatccgcttgatactaagacattaccttgtgaagtgaagactggctgcactctatctcccatccaattaaagcacatccaagcaaatgctggtcatgttcctttgtgtattcatcaagacatgaaagcatcaatgaaaaggaaaactgaagtgccagaagtgacaggatctaagagcttgactgtcatcgtgtcaactgctggaaacatagaacatgattttgacatcatgaagcttgacctaactgccaacctcctgagcaaggtacatgtatcatcctgagtattaaacattggacttggctctagatggtgaactccccctaaattatgatatctgactgcttactaactcttttaaatattcttttttccggtgatgtttcttagaaattaaattttctttgataatattataccacttcctgtttagcattttctccctctctttgtgcttttatgccgtttatttttaagttatatcaaggtatcaagctatttggttaaggtgtggctttattccattacttgtgtttttttccctctctttcatgtataccattcgaccttgtttgatctgcaatgtttgctactttaagaaagaagataaggagctctttgtattataatgagctttagattcacattctcattttacaggttgaacaactgtttagagaaaagccaaacccagatgatttagagacagcaaaggcgatactcaaggtgagaaccctcttgacttggataactcagtatgtaagcattggatttcatccaatctccgcttgttctaagcattatgtacttcaatgccatttaaacttgaaccaggaacaagaaaaggtccttttagatgcagtccttaagctttctgaagtatcatatgttggtgagtcgctttttgtatacttttttgttttctcatagcttagaatgttagttcttttaagaaaatattttagtatatcaactacactactttagggggttctgcagactcttttcctttttttaaccaaaaaaaatattgcatcaccatcataatatattcctaccaatgaactactggatgagtcctcttagaagttaccaaaactcttagatatatatttagttattgtgatccgtatttggcataatagaatgtgctatgagactgcaaatataacaatatttttccacctgaaaatattgaatttgatgattgacccttatgaagaacggcatccatcaaatccctctgaaaacactggattcaccatttctattttttctatcttcatcaaatccctctgaaaacattgaatagcaccgatttagaactgacatccttctctttgtcccatctactccgtagaggagtgtttcagcaccaactgccagccagatgagttcaaccagcactatgagtatgagagcgacgacgagatgccgcagaagacagcgagcacaaacgacgccgagacgccaccaaaaccggtgagcccaagcgacaaggaggcgcctccgcagccagtgccaggacgtggtggtggcgccaccagcaagggtaaggcgaagccccgcgactccggccggagctccggcggtggcagcggatcaggcggccggctcgacgcagcggacgaccaacccacctccgcctccacgtgcacatcatcaagcacactgtcgccgcgatcagaacgagagggggaagccaaagcccagcgcgcgcgcgggagggtgtttgaaccaccggccaagcgggcccggcgcccctccgtgaggctctcacggtcggaatggctctggtggtgaatgcgcgcgcgactgtgttcagctggaagcccccgcaatgtgaattcgcttgacaacaacatcatgactgaccatcaccaactctgctactgcaaaatttgacagttttttgctggagacctctcacctctgatcaggtaaagtatagctctcgcctctgtccggcctcttaagctttaagcacaaagtggtacatagaacatagttaatgtaactagctagtcctttcttccatgcacatataggtccatcggtagtcactttcaattatcaaaacacattttgagacagtttcatgttcccactaggttatacagtacctaaaaacatttcattactcactatctgctatgcacttgtggcatatttttttgtgctttgccatggattggaaacagtgataaaattgatggttttgatagtgtactgaattaggctgcattctcaggcagctttaagatgttgcctgctagtagcatagtactatccctgcactgcagttctggaaagtggtcgctggctgtgcccatgtgagtgaagatggtggtaatgcctgtgccttgtctatcccatgcaattctccctattcgagctgtagatatcatgccattaggtacagagactcgagtgaacagcattagatctgaaaaacttgcattggccttttataactgctcgcagctaccactggtcccggtcacaagtacttcatgttttttgttggtctgtccagctccagcatggttaaactgtacattcatcacggttttgtgatggctgagtggcttactcatgcaagatctagttatgcagagacagggattggtcttaactcttaaacaaagtgtatcatcatgatgtgatcgtcgtctaatcaataa

SEQ ID NO: 23732 - DNA, 40678 bp, Oryza sativa
  unsure (1)..(40678): unsure at all n locations
acagcgagcagtgttgtgaacagcaattgcatccttcagtttctgaaactgcaagcaagaacagtttctgataagtggaaaacacacataaaagcagatataaacccttaatgtttcactacagaacactctctataccatcagaaaaagagaggaaatgtacttcagggaaaagaattatcaccaaggaaaacttgagtttctgaaattaacagtgactggccaaaacaataacgtgatattataaaatgagccttatatacataagctgcaggtggacaatttattgcattacaactggggctgttcaatccgggttcactggatcaaggaacatggttgaggagcatgagcggtgggttagcatgccgactgctggtacacacatggccagctaacccatgtcccatgagagggttgttcaaaaagtaaaaatgcctttttgaaccgactattatgaagaattgaagattaagtgattaactacttgaaaggtgaagcaaattaacttatgaacgcactggtgcatccttaccttcgccaaggaacatgagaacgcctccaattgcccgtcagctccacggtaaaaatggaagtaaggaaggactttcacattcaaccgtttgcacataggtttattttcatcaaaatttacttttaagaacaagatatcaggattctccacagctgttctgcagagctgcaaaacaataaagaacacattagtttaagcaacatgctctaaggaagtcctcgcaatataacagtcagctgggtgagatggaaatgttaaaactattttatccatgaaaacaagtaggacaagggcaaaaaaagatgcatgggatgagattataatgttccccattatcattatcgacgtccctaaaattgtctctctgagaacaaggccttcctaaaacattcaaaatacatcatgataaaacaccttgaagtgtgatgtagcagtccaaagggaaggttatttgttagccctagttgaatggccagagcaacatgagttgcctcgtgatggtaatgaagtagcctttttccttcagctagctagcacaacccaatcatggttctgagcaaaagaacctagttactaaagcacaatgcaccaagcttgccacactaacgtcatgcacagatgttaagttgttaacagccatcgatttcaacaataatccatcagttccatgctagtaactaaacacagaaagggcaatatgaaacctttatctggatgcaaagaaggaagagacctaattctgaaatagggcaaatgctctagagatatgataagatgacagttttggggaatactgttacacatgtaatatatggtgctcacaagtttcaagcacttcaggtattggcctttttattgtcacctggtcagcatatgggcagcataagcttctacaagaaggaccagagacctcttatttgggtatctgcagaagcattcaagttcagagggctaaaatagcctcccagtaaattaaaaaaaaaaaggaaaaacacaccatatgcaactcccattaggccgctgtatgtgctgctcttctatatggtccaaatgatacaaaaccaagtgcatggatgcaattatacaacctatgcatgtttgttgattataacttggaggccatatgactccagtttgggttcccttctgttcattagaggcattacacggtttacaaggaaagaaaaaaagggtattgaactattgattactcctaaacatttcttctgtatatggtaattggtaaataatgttgcattacccctacacctacactgttgaagcaatactaacaagatggtctaacctgcagaatataagtcagagaatagaagaagagctagatatagcagaagctagcatgccctggaaacaagccaaacatagttccccccaaaagcacaacatatattcgactatttgcagatgaattcccacattcgagcgctttcaccaataccaactagggaaacacatcaataagcatgagcatgggtgacaaccgcggatgaataggtaatttgtactctataaaacaagaccaaaagttcaaagcatgaaagatataaaaactgaataaagaagagtgagttcagctaatcatgtatgttcacaattcagaaaatcaatactaccctttttggatgactccatcctaattttgacatctcatgagaagaccaagccacatgattctttcacgcacttctttagagcttaagagtaccaatctaaacccatataatgctaaacatcaattattaatctaactatgcaaggaaatttgataaagctcacatgagaaatttcagaattgtatcaaggagaagatcaaaacggcaaatagttatactcatggcagcagtaggaaatgagaaatacccttgggaagagtgccctgcaagaaccacaccaagttccataaaactccacaattacaagcctgtcgcctgcatccctcagtgcatccaagaactcttgtgtagagtggatgtcaatcatatttggaccagcattcttctcccaccattttggttgctcacttttgtctgagacggctgcatgggcctagagcaagatcaaccaaaacgatcaaaacatcagcggcaaacttgtccaataccatacgaactccaaagcacgtaaactcaagataaactagtaggacatccacaaaaatctcaagcaaggacaaattgacacgttttgaaagttcaatagttagttcataccactcacagttgccaaaacatatataaaatcctggcagaaaaggagaaagatgttaattgttaatgtgattcctatcggctaaataaaacaagcacaatacaatatataacaataacgtataaacataaatgcaaagcttatgcatgttttgtcgtgaataaagtaatcgtggagcaaagtctaatctaaaatccacaaaagaatgatgtaagaacccatttcgaggtgaaaaactgcggtcttcaaaataccaagttgccatgcattttccatcataacatgtaccatttcaattgacatcaagcaacagagatactgtacaaagacccagcaatggcacttatggtatgctaggtgatgaagcatgcatgatttcgagagacttgtttggctcaatttcaagttttgaacccctcaaaagacataaaagctagtagtagtagtaagcctttccttccccaatccacaccaaacgcaaagccgtttgtggtgctatagcgatctacagggtcgcgtagaatcaacaaattgacctccgaaaaaccctacacaattagcgcgacgaacagaagagaggagaaagggggacagcacacgtaccttgaggcggcggtggcgcgggggcgagggggcggccaagcgcggcgggcgcgggttggcgcgcgagaggaggcagtgaggcgacggggacgtggaggaggaggcagaggagcacgcgggcgtggaggcggtgacgacgaggcgccggggcagggggaggagggcctccgccatgcgctccggctccgctccgggaccgtgccaacagcgagcgagcggctagagcgcggccgccgccgatgactcggattgcggcggaggcggcggcgggagcatccgagggcggcgaggagcggtggttgccgcgggaggggcgaaggtgtggtggtgggagatggatggatggatggatggattttctcttcgtcgcggcggatgaaggatggaggatggatgggggagagcactggactacgacctgacacagtgggtcccacactccagtgccacggacgtttctactactattccaaatataaacgcacaagatcgtggcttttttccttttcaattacagtttggtctcctcttttttttttctaacaaatatttacaagtgaactcttttttttcctatctccttatacacagctcaaacaacttttgttgggattgaaggaaaaaaaaaagttcaacggagcttctactatggtctaaattagtaagaaccttaaatctcacttaacacctattcttcgctgtcgacactctcatcgtccttcctttggcgtgggcactgtcacaccttcagtcctcctccagacatcctatatatatacctatacaattgatccagttattgtcagaaatgtttaaattgttatgtccgttggatgccagataaacatttgtgatttgttgagatgcaggctgcagcagatcgatccaacgctatatcagtacgtatgcatcatatgattccatctgctggacctctcaatgcttgatgcaacgccggttccccttcctccgattcccccactgtagaggttcccaccgcatccccgcctagcgcctgctcgcctccttcaggtgtcacaagaaacggaaaccgcccggctggcttcccgctcccgtttatccatctctgtcttttatgatttgtagtttggattattcgattttgttttcttcacttcttatcttctctgcaatatataagtacatcccagtgtttggtggtaatcatgtactctacgtcgtatgaagaaagcaattcggatcctctgcattagaggtactaatgcagaggatgaacagtaccacgcattagaatcacagtgttttgaatcctgtagctacagtaaatcgacactgttcatggcattagctaactgttcccctcacatgaacagtgctcttctgcattacggcagacgatccggatcctgaagaaaagcagtacaaaggttggcggtgctcctcctccgaacaatgaagttgttgtgggatccatcccctctgccaatttgaaggcagatccacttgatctccatcgtttccagtgcaggttaatccccaatcaagttaaatctatctctaatcaatattgtgactgatgcaggttgagcactcaaactaatttctttgcaatcaattgtcaatttccaacagatttttgtatcccaatttgctcctccttttttccccatactacactattgcactagcagattaattatcctatttcgcatgactgactccttgattttagtcgcaggtatttcttccatgggaaattttcttccttggtatgcacacaagaaatcattttctattgctaaactatacaattcgtattatgctcctttgttttccaatttttctgttctgtgattattcatgttaccttgcctgtatccaatagctttatatttcatattgcttctcattttatattgtgccagggaaaactgagcagtaaacttgcttcactgaatcattgcagataattcatacctgcgagcaagtttcaatgatgcattgatttataagcagcgcattttgtggacatgatctaataactcgcattaagcaacgagatgaagaattgctgcaggtaattcatggaagtaaaaaaaaatatggaaagttagttgatcctatagacaggcatgtgatttcacagagaactttaagatttagagaagcattgatttagataaagatatttttttttatcatatgcagcatggagtgactcgtagcaatttttttgtgcgatccttccagcttcagcagttttctatgtaaccagcaattgtaagtgccacatatatcctatagggtcctgtctccttggattttcattacaacaatgtcacttgagttcataattttagtaatgatagcatgatctcaacaacctcaaattaacttagtattaatttagtatttatacacctcatgtctatctatactaatataaaaaggaggagttcacccctccaacactacaggtgaaataaatccatctaatctcaaccgtccatctgcatctcatctaatcgccaatcccatcccaccgattccgtccccccaccacgcacggtgactccgtcccccacacgcaatgactccgccccccgcgcgcgattcccctcgctcctcgctcctctctccgtgcgcattctctctcctcctcgcttcgcccgaatcccggctgccgctgcattactctgctactatccccaccggtgacactcctcctcgctcctcctgctgccgccgccgccttcgaccgctgccctggccggtgccgagttctcaagccgccgcgggagccgaggtcttcccctttcgccgctgctttccaccactgcccctgtcggagccaacgtcttccccacccccatccgccgcggccagagccgacgtcttccccacccccatccgcgcggccggagccgacgtcttccccacccccatccgccgcggccggagccgtccccagtcgccgccggagccaaggtcttccccatccggcgccgacgccccagtcccctgttggaaattggcaaacctagcactcaaacctcaccactcagctctgtgtatcactcccacgttctgaagaaacgagagttttcagactgctacagtaactgatgaaactgaagacgaacagaggaaacagagtttggcgctgcgtaaaacctggccgcattttctcggttctcttctattatttatactccgaactccaggagtttgttacaactgaaaaaagatccacaaaactcgcttaaatcctaatgaatcgcgccatcccacgatcgatcacgaccgagtttgcaactaagaaataacatacgaaataacataaaaaacagttagcggctacttctacgttctgaactcatcgtgaacacagcacgagtcaagctcgattatttcgtaaatttgaaaaactaaattgacccagctacaagattacattcaacaaacaccccctaatattgtggctgtatctcaagcattccaagtctgccttgcagctcctgaaacttaactcttccaagtgactttgtcagaatatcagcaacttgttcttcagttctcacgtactccacttcaatctccttcttctcaacataacctcggatgaaatggaaccgcgtgtcaatgtgcttacttctgtcattcagtaaaggatttttgcacaaggaaattgctgatttgttgtccaccttcagaacaacacacttcttctcatcacctgtgatttctgaaatcaaacgagcaagccaaattccttggcaggctgctgtggttacagctatatactcagcttcacaggatgataatgccaccaccttctgtttctgtgactgccatgtgatgatattttcacccaatgcaaacaccactcctgtagtgctcttcctatcatcaacatctccacccatatcactatcacaatagcctgtcagtggcacaatattactctgctttcttccataccagcagccccatccaactgtaccggcaacatatcttagcaaatgttttgcagcagcgaggtgatctgtagcaggcttctccatgaaacgactcaaatacccaactgcataagctaaatctagcctggtgttcgctaggtatctcaaacttccaatgagacttctatactgtgtagcatctacaagagaattggtactttctttactcaacctcaatcttgcctccattggaacctgacacggattgcatccatccatgccatttttcttcaagatattcagagcatatgcagactggtttaaagcaattccagtcgctgtttgcttcacctgaatccccagatagaaactcagcaaccccaaatcactcatcttgaattctttttgcatttcaaccttgaaaccttggatgactgaaacctgtgagcctataatgaccagatcatccacatacacccccacaatcagtgtagagtgctcactgtttctcttgtatactgctggatcagaagtgctcccttcaaaacccatcttaattagtgtggcatctaacttagcataccatgctcttggagcttgacgaagaccatacagagctttgtgcagacgatacaccttagcttcttcaccagtcacttcaaagcccaatggctgtgagacatacacctcctcttccaaatcaccattgagaaatgcagatttaacatccatatgatgcacctgccatccctcttgagcagccagtgctagtaacgacctaacggtttcaatccttgccactggagcaaacacttcctcaaaatcaatgccatgttgttgcacataacccttagctaccaatctggccttgtacttcacaatgctgccaacaagatcacgcttgatcttgtacacccatttcagacctatcggtcgatgttcagcaggcagtggaactagactccacgtcttgttttcctcgatgctcttcacctcatcaatcatagccttgcgccagcaggcctgcacttcagcttccgtgaagcttactggctcatcggccgccagaaggcacagcccggagtactgaaactctcggacaggactggtagtctcgttgatgtttgcaagtgtgcgatagcgtcgtggcgcctcgttagatggttgcgacgcatcagtcggcggagtggcaaactccactcagcttgtctgcgtggtgctgattggtgtggagggagacgccggcgagtgcacacccggcgatgactcccacaccggtgtaacagcatcttgtggctcgtctgcgtcagggcgtgctccagagcactgttcatcatctaggacagagtgaaaagtgtacgagatagaaaatatatcagcagggtcagcttcatcatcaccggtcccggttgccgcccagtcccacttcgcttcttcgtcgaacaccacatctctgctcacatgaacgcggttagtcaccaggtcgaacaccctgtaagccttacttccgtcctcataaccaaggaacaccatcgccttgcttctgtcctccagcttcgacaagtgtggtctcacattcttcacatacgccacacagccaaaagtgcgaaaataatgcacattcgggcgcctgccataccaagcttcatagggtgtcaggccgtcgagcgccctcgtcggcgaccggttcaggatgtgcactgcggtgacgacgacctcaccccaaaaacgaccaggcatctcctttgccttcaacagactccgcgccattgccacgatcgtctgatttcgccgttcaacaacaccattctgctgcggtgaatagggcaacggtgaggtgacgtcgcacgccacgccctgcgcagtactcaccaaattcaaccgaggtgaattcacccccccccccggtctgtacgaagaactttcagttttctcccacattcaagtttcaccttcgcctggatgtccctgatggccgccggagcttggtctttggttcccagtaggacaacccacatatatcttgacatatcatcaacaagcaacagtaaatggcgtttaccacctggcgtggctgggctgattggtccacagagatcaccatggacgagttcgagcggctccgttgctcggtatttcgcctccgacgggaacggcgcacgccgctgcttcgcgatctgacagcaatcgcaaatgcgatccacctgttcgatgtcaggcagaccacgcaccatagcgccctgagccagccgacgcaaggagtcgaaattgagatgcccgtagcgtgcatgccacaaccacggcacctcttcacagctcgccaccaagcatacaggctgagccaccttcaaatccaacaggtacgagcgcccttcagtcctcgtcaccttcgcaactagagcgcgcgccctgtcccggatcgtcatcacaccatcgtcaatgtggattgcgcagccgttctcatcaagctggccaagactgatcaagttgctcttgagttttgggatgtaatacaccccagacacgatacggtgtgccccgttgtagcattccagggtcacgtcgccgaagccgcaaatgtcgatgacggagccgtcgccgaagcgcacgacaccgcgcaccgtgtcatcgaggtcggtgaagaattctcggtgacccgacatgtgattgcttgcgccggtgtctaggaaccagcgatccggggacaactgttcatggcggccaacatgcagttgggcgtgcggttcatccagcacgatcgtccctggcgcggccgtggtgaccatcgcactcgcggtcgccagcagcagaacaggctcctcctgagcctcagcaacatgcgcctcttggcgacgctcacgccgtggtttgcggcactccttggcatagtgaccataattatcacaattgaaacaacgtaccgatgatctatcacgcgacgccgccggcgcgccaccatccttgccggagctgccctcaccggagcacccttgtcctccgcgcttgccgcgccactgcttctttgagctggacgatgagccagcaccctttttaccaggagaggtgtcctgcggctccttcttcttcatgcgagcagtccattcctgctcggtgagcagcaccaagccacccagtgcctcagctcgccagacgcactgacaggcttataggattcgatggcggcaaggcgcccgaccagctcctccagtggcatggtcttgagatcaagcatctgctcaatcgacaaagcaagctgatgatagtggaatggtacaactcgcaacagtttcttcaacatgtgttcgtcggtaagggtgccacccatgtcacggatatcgatgacgagtgcatgcagacgaagggcgaaatcctccaccgtctcgccgtccttgaactggatggcctcatactgagaccgcaacgcctgctcgcgcgcttcccggacacgatccacgccgacgcgcatcgtcttgatcgcgtcccacacctccttggctgtatccttcttggacaaagggcgcagcatctccttggggactgcctgaagaagagcagccatcgcttgccggtcctccctgaactcggcgtagcctggatcaacagccgcccacaggccttgcgcctgcaaattcacacgcatcaacaacgcccagtcggcatagttggttctcgtcagcacggggtaacgcagtggcacgcatgtctctcgcggtgcctgctgcatcacaatctgcccgtcattgccggcgcctgagctgccgcttccgccggcggctccacgccgccccggcggggtgtaccgtggatttccgtcttcactcgacatggccacataatcggcaatgaaccgctctgataccacttgttggaaattggcaaacctagcactcaaacctcaccactcagctctgtgtatcactcccacgttctgaagaaacgagagttttcagactgctacagtaactgacgaaactgaagacgaacagaggaaacagagtttggcgctgagtaaaacctggccgcattttctcggttctcttctattatttatactccgaactccaggagtttgttacaactgaaaaaagatccacaaaactcgctccaatcctactgaatcgcaccatcccacgatcgatcacgaccgagtttgcagctaagaaataacagacgaaataacagaaaaaacagttagcgactacttctacgttctgaactcctcgtgaacacagcacgagtcaagctcgattatttcgtaaatttgaaaaactaaattgacccacctacaagattacattcaacatccccttccccatcgccatccgcagcggccagagccgacgccatccccatccagcgtcgtcgtcgttgccgaagttcaccgctgccgcaagtcgccccgccgaggtggttcccacagtaactttcaattatcatctgtttaggtctgtttatgtttagattatgtgcatgtgtgcatccagcaatagaactactgttcagggctagaaggaattcagttacaaaaagatcctcaatgatctgaaaaagattctgttacaatggtactgcagtcccaagatccagagcttggctaggtatgatgcacttggcaatgcttaactggttctcaattttctgcttcacgggtatgttgataacataattaaatggttgtaggtcattcagctttaaggcgatcagtgtaagaatgttggtatccaaccgggtggcatccgctttgcaaaaaatgtctatgtaaatgtaatctcatttttttatgcatggacattatgtctttttttatgcatggacataggtttaatctctatgtagattaagaagtattattgtctgaaaatatttggtagctgcctgaaatattatttgatggttatgttaataggatgtacagaaattatacttctcttatctggaattgcaacttcaactgtcatgacgttcaccatgcctaagatgttgctgactaagcttatgtcctaatctaggttctgaaattgtagctagaagtttgaagaaatagtattttgtgcaaatacaactgatgagcaactcagacaagaacccatatcaggtttgttttctcgagaaattgcatataggaaaggggtgagattagcagtaatgtttctttattcttctaattgcatatgcccgattgcaagcggtgttgtcacaagcaggaaatggtaagaactaagagaagtgtgtgtatatatgtacatacattatcagttactttaaaggtcagcaggtcacaaccagaaaattgattttctcaatgttcttgcaagaacatttaaaattttgcttcacattgtaaatttgatgtgtgattgagcttccagggtcatcagcttcaagtgattgagctgatatactgcatactgagattctgcggactaaagatagtatattctttcatcatacaatttatcgagcttcatttatttggctaatatttcttatggaacacacatgctgatttcagtctttccaatttgttctgccctttttggtacggaatttctgttacagcttaaatgatccttggaacacctggcaagttctttcctatggtcctatttaacaagaatcaatcacatattttgtgcaaatagaacatgtgttggcaatggcaagttcattggtctacttattacttaacagtaatcagtgaaatactctcagcaaaatttaagtctgaatttgttatatgttgaacactgaaggacaggggcggagccaggattaaaagccaccggggtcatcaacttaaagcgtttgacagaatggaaaagaagaagattaaagaagacatgcaaaatgagtttattgttagcacaagattaattgagtattagttattttaaatttggaaaatgtattaatatgatttttttaaaaacatttaaagaattttttttgaaaaaatatacaccgtttagcagtctaaaaagcgtatacatgaaaaagagagcagaattccggtatataaatgaacaccgctataattttgatttaactaaaagactaggtagatcattctgttctctcgattaatgcaaaatcttttttaaagttgttcttgtgttttttatcgatcaccagcaacgaatgaatgataattggaataggctaagagcgtttcctttcatcatacaaagaggtataaatctgaaattagctagtactaactgcttaacagacgaagcaaaagcacaacgaagaaacaattaataacaatgaggcttaggaaacaaaagaaaactgactcggactttatgcatgctaataaaagaatcattaatcaactaggatcgtaacaccaccaagtgaattgttttagtttcacgtactacgtgccagctgaagacgatggctggggtcatttaccatctgatgccggggtcacagctggtagaaattgagcatcaccgtgcattcgctggatgtcatcggtgtcagatgaccccggtcgttagactgtggatccgcccctgctgaaggacatgtacagcgagttagcaagctaattcagaactaaagtatagttgattactagaatgtactactttatttgatcagaataggttaattattcatttgctctttttagtattttactggagtataaaggtctgtgctattcttggttagcattaaagttgaaagcttagatactttcttgttttccttggagttgtggggttgtgtgagaacgatgtagatgttaaaatgaattgtttttctgattttccaactgtagacctgaactttaagttgctcatgcatgatagccatgggcaaacccgacatgcacattatgcagccaagaagaatgcatgctgactgccacagcgaaggagctagagaagtgctgccggaatcaaatagtttactttggttgttacatgaagatctgcttagccattttttctctgcttaaaaatatgtggcagtgtacgatgccgtgtgagataaaaatgtaagtgacaatttttggtaatttatttatcaaatattatgtcacatggatttcacgtgcaagtgcatgtttctctagaaatacacacggcgcatgttttttaatagatctatcaaaattgtcagtctactatagtctatgaaactctttatttacctttagaatttgtatggagtacacggcataaaaagttacatttattattctattatatatatatataatatcaaaacatgtcttgcacgtgcacgataactagtatataaaaaaaagaccaaatgaaagaaactgtgggcccacgcgagaaatcctaaccacagcaaattcctccacgcaaatcatccgcgctattaatcgcatcgctgccccactcgcacccgctccatcaccattcatgggttccccaaaatcacgcccgtgcctcctctctaagccgttgtcatcgccaatctctcgcctcacaccccatgcaatccctagctgtcccctctcccaccaccatgtctaccgccgtcgtccctaaagggagaagcaccatctccgtcgaccttacatcatcgacgattttaaagccggcccgccgcccgcatccttcggtccttcccccattgctcggcgccgcaacacagtaacagcaacaacagctgccgccggacccaaaatcagcgttgtccctgttttggtgttgtccgtctcgccattccgcggcttcgttggtcacgccgccgttgcacgaacgcaagagcgtgagggtccttctgcggcggttcgccatcagccgtctcgctgttttttatccaccatcacaatctggaggcctcactattttgccacatttgcaatctgaagcgtgcaaatgacataaacaacaaatcaggtttctaatctccctttctcaatctcacttgctatgctttttaatgccaacagatcacgctttcgtgggctcttataagagagcttccaaataatttacttaattttactggaagctctgatattcttttgtatggaaattgccaaatattttaggctccttttatattgtctttctttgcagatttgattaatatgcaactctgaagctggtttgcacttaaggaattagtaattgaagggaagaactttgccctctaattcatggctcactgctttcgaaacagctaaatcaatggcttgtacttgctagaatttagactccacattgcaaattgcaatgatgaactttgaaatttcctggttcactgttttctcctgtacttaaattgaaattatgaactttgttctttattaactctttcagcctctataagttggaacaccagtaattaaaatgttgattaagtttatttttgtcaatatttaaataaatatttgatttggtgtatttaccttctcttctctagatagcaccagtttcaattaaaaattagctgcaataatgtgctctgaattgatgtggaagctaggcaaaccaattgagtgttagattgttaatcaggttgttgatgtcgcttgcggtcactgtcatccctagcgtagcgtcttttgtcgcccagggttatgtaacaccacgattactatgttgccaacatacacacaattgttttcagcccagatatgttctctttcattgttccttcaatttatttaacccctttcaggatggatgtgtgtgcaagaaggataggaattcaggatggtagttggcgatctcatgcaggtatgaatctattatgttttactatcactttgtcaatcattgcaagcactctttttatctgaagctttggagacggagtattagagtttgtttcagtatctaaaaattttctcctaactatcaacacagtttatctgaagcttttatcgtacaagactcagctcgatcacttattccattttatgtgccatggaatattaagattgacagaaaaaaaatagcttgcatggagcaattcccctgccaatgcatctcacagtttaatttcttattgaatgttgactatccctaccaatccatcacacaattccttataactgaatgctactccattcaattaatttcatttgttgaactccttaccaatgatcaatctgttcataactaggattaatgggtgcaaagatattgcctagaccatctttaagaatttattgccttcttcgttcaaatttggtaatatatctctccccatgttggggaatcatgtgtcttttgtaccgactacacaaaggttcttaaactggccggattgtccatttcacttcagaagcttattacgttactttcttggctatatttcctgccatcgcattttacatttacaagtaggaatgaagtgatcaccagctagatagctaccttcttgatcactacgacgtgcatgcttcaaggatatgcataaatccaaggttattctcatcttacaaatctctctcgatattttccctagggatatagatattcgaaaacatcgagcattgggatcattttatacaagaaaatgtcgaggagatctagaagctattgtaagttagaaggtgtgttgtttcattaaatatatcatatgtgtatttctgaatatatcttctttgttttgtttttccaatctggcactcctccgctactattctaggtaaccagtccacaacctgcaatattattttgatgtgtaaaatttttattatgcatcataatctccatatcagcgcactgtcagattacctatataaaatgagatgtaagatgtcacaaacgcattgttaatttatttcatttatttgcttcttctttcagcaacttttacaggctagaagcagttctacaacagatggatttgccttaggtatttttttatactagagcacaaacctgaatttctctaccttttacagttctagatggagacatgaaatttctttaatggtaaaatatattggttgggtttgattagtgtatattgttagtcatcattgtattttattagcgaaagtattaatattaccatgtttcctacaattgatgctctacttgtgatccttatttgcctatgaagatttattgtgtcttggtgtttttgtgagatggactcaaagattctgctgttcgaaacgtgctaaatatttagacgttttatatttgcttttataattgttcaaagtacaaaaaaagggtaattctgaatatgttcatatacgttcaaccttattgtatcaagataagaggtcaaactgcataaattatctgacagaagccttagacaagatgagaatacaagtaatcggttgtttctgttgaagtagtatgcctttggcccttgccatgggcatggaaatgcaaggaattatgggcctgtgccctgtagtctgtacctgcttaagggcactacatttggctatgccctggtttcttgagatgtaagaatttttttctaccaccagttgtggtgaagccaattacatggattttgttcttagtcaggttagctgattgctaattgaagctttgttgtgttgctttctatctacattaaagagtgtagttttataaattgggatatgactctacaatttagtgttcaaataattccttatgaaaatatagaatgtttgtattttgtttctagattcagatgtaatatcgatggagacctaagctagaacctaaaccaaagcttttctaaagagctccaattaaccataattgtttcccttatttacaggctttcaactgagtgaattcaacgttgtagtgttcaagaataaattagaagggaaaatcatttattctgtattactctctctattttgtttaccttaccataataattatggatccttttggtcaggttcttgaatgattactggccattttttttactgaactactgtggactgccatgtctttttttgttgaactactgtcggctgaccatgttttcttagaaacatagaaatattgttccaaatggattatattatatacataggccgtgtttagttccttgtcaaaattttttttgacgtatacagacacacatttgaagtattaaacgtagactaataacaaaagaaattacagatttcgtatgtaaactgcgagacgaatctattaagcataattaatccgtcattagcaaatgtttattgtagcaccatattgtcaaattatggcgcaattaggttcaaaagattcgtctcgcaatttacattcaaactgtgcaatttaggtttttttcgtccacatttaatgctccatacatatgtccaaacatttgatgtgatgaaatttttggaagtttgaagggaactaaacacagccatattcgtgctttttgaaacaacagggtgttacaactaataattaagactgcacactttctcaaaacatgttaatagggcaatgcatgatggtggaaggcacttaatgtggaggccactcatcaaaatatgatctccgaacatcgtgctaggtaccttttgtaattaaagctcttgatcatttgtaaaacttgtcatttgaagaaccgcgggataatagatcaggcattaaggaatttatccttaaatttatctccgtgctattttcatgaacttatccatcttgcctcccaaaatgaactttatgtaatagatatctaccgattgtttttcaatcattctagcgccttgaagtgagtgcattggaaaccgtggaagtgaaaatgaaactcagtttatgtctttgttttgaaattgaaatgaaaattgtgcatgcctttttcactatcattttagatgaaaacagaaacagcctatgtctatgtcacatggctctcgagaatataatttgacacaattgggaaattgtaaatgtaaatcgtgaaaacgtgtattgcatgtgcatgattactagtattgataatattgcagatttggtgaattattcatgaatcccattttctcatatggtggtacttcaggttagccagtcagtttgcataatttagttcctgaaatttttatgtatctcggtgacttttgtttgtttctttttagatgttctgatgatctttagacttccatctaggacacgtataaataataggaattgtaccaaatatttttatattagcatcgtccaccaatgtcctaccctttgatcaacaataagtgggttctgttatacctgtcattcagcaatggtaatagtaataacataacatatgaaaattttcaattgttgccgctgcaagaataacaaatttgctcttttggtttaaccttatccctatcctatcggttcatcatgcttagataagttcctattttctgcaaagcaccattttggggctttatatattaattaggaattgatatcggtgctctcaaaatgccatgcgtgtttgtttctttgttatctattcattccttgcgaaagttgtacattcggaataccttctatattgcctcactttcccttcttttcttattactttcattagctcactaagtgtgagttgatcattaaaatttgtgtcaaatacatttatcccgcagcaacgcgcggtgtatcatctagtttttatggtaaccgacaccatccctctcctcaatctccggtgtgctttccttcaaaacccaaattgggttgtactgcagtcttaagctcacgtttccacgttgatgtcatcatcgatcgaccgcctctcgagcctccaccgctctgtccatccttttttttgcccaagcttagtcattgtgtcgttgtcccaagcttggtcaatgtgtcggcaatgtcgccaaccgcctccccatcctcttccaccctgtgcccaagctccggccaagctgcgtcaagggtcccttgcatggagttctattgtggtgtttgaaaccgagaatttaaatatggttaacttatatgtattagaaatattttatttaattaaagtggtattttttttctcttatatttcaacatacattttatgtggtggaaaattagtgagtcggatgagtggatcgatatgtgggctaatatgggtcgggttgcgccaattttttcttgaaatcaatcggtatatgcaggtacttgaggtcaactttaatcaattgcatattggaaccaaactcaaagggagttgtggtctaatatgatcaagaatggtatgtcatgaggtgtgatgtaatcatgtaaatgtacatgatggacggataccacgtaggagactgttgcaattcggtggcaaaatgaatgagaaaaagagaagagagaggaaggtggtctaagccaccaaggcccagctaagccggcttccctctccctctccactagctggtccaattcgccgttatatcactgaatttagatcaaattactacaaaaggcttacttcagagttgggcatgatagacagtggtggagccagcaccaccgtgaagccgggacgactagtagcattttctggtgaccaactgatatttatacgcgtcgatgactaacggcaatggagattgcatatgaaaatcagattgaaaaacatagcatatacaggaatttaatggcacagagcgttcgaaggatgggtctttccacaatgggctggataggtggggaatggggttgggccttaactgatgatcgaaggttgcacagtacatcttgatacacatcgctataaactcgttttcctgattttatcattatattcctttgaaccttttggatcaaatcatagtgctatgcaatcatcgtaatacggaaaacatatattgttcccattaaacggaaaacagtcaccaggaatgtcatacgaagtacccaaaaaaaaggacgcctaaaaccacagtattaaactgcagcaagatttatttcacctctagaaatgcaatattttcaaccaccgtcaccaccacagacacaggcaaaatgggaaaaatacaagatacagttttccgagatgtggcactccagcagggtacagaattttacatagtcaatagaccctgaggagaaagcagcatagagaacagaatctaagaaacggagaatccacagtgctttcttcacaatcggctgaatttatacaggtttggttcacaaactgaccacacgaatccatccgaacgctgtccactcttcagactagaatcaggaacttctgcgacaactccagatctccaggattatttgcttaaacgatatttacactaatgtgtgtgatacacgtgccatccatcgttgagtcctgcaaacacaggttgaacattcaagtttctaaaatcaaaatttagatcagtatttgcatatgcttctgatgagactacagtcagaaatagcaaccaacaagcaacaaccaggcaagcaacatatgattctgaccccaaataaaaacatccacaagctagctactttctgcatgttatccacagttctgtacctatcaattgttcggttccaagcagacatgcggggcgcagatgaggatggggatgttcaggatcttgtcataatatagtcgtcagcttgtaactgacagttcataacaaaaccaacagatatctcatgatattaaaaagccatgcggctaaggcatctatttctacataggtttctgagaattattgccaacatcagttctctactgtcctaactcaaatgctcagtttgaaattggatggtcaagcgatggcaagaatgaatgcgatataaatttcccaacaggatattaatgtttctattgacagtcaactgaacgctggatcttgattttcattttgaatgggcataccgaacacccaaaagaacagttctctactgccttatcctacatgaacccctgctaatgaccaaatggaataatccaaatcccatcaggatatgctactattttggcctcaatagctggcacaccaatcattgtgctctcacaaaaaagaaaaaaaaagagaaagaaaatcataactgtcactgaatttgaaacaaattgatgcgtacagtacgaatatatatttctgaacaaattggaattatatgtactaatagatatgatgcttaaagtttaccacattataacatgatattgtcagatgccatattgccacttaatagctgaaactgacgtgtacgaagttgatttgataaaaaaaagggtcagataatggcaacaggaggactacattatactagctaatgaatgagataattctacagcagtagtactgtataatagtacaggataatgaattttcagcatgaaacttaaacccatccagttgtagatgacttctacggataagtacaagagtctttttgctattggtcagagacaattaacaaagtagttggtttcaatggctcatatggctacacggtttagcccaaaaactatggtcacatgacgtctctatctctcttgggaacgtcaattttctggacaccccttgaagcacaaggcaaattaagctcgttgagtttgaccatgcaattccttcttgaggacgcattctaatcgatcccaatgcaagcaaacacatcaccagagccaaaattggctccaaattgatcacaagttctcaccaaattcatccaccacacaactaattccttggtttgtcactaatacatcatgtagaaattgggaatttgaaaaatgaaacaaacaagaacagcaattcacaaagtaaaggagcagcaatcaagaaggaagaagatgattggggaggcaactcacatactagtaggacggctgcggcgggacgggggtgtaataccggccggcctcctcgtcgatgctgtcggcggggcggtggaagacggcgtggaggaggacgatgacgacgccgacgagcagcgaggtgaggatgttgacggtggcgccggtgaggaggaggaggacgagggtgagcacggagagcaccgcgagaacggcgccctccccgacggcgcggccgcagagcgcgagcggctcgtcgcggaggaagtagaggaagagccaggcgaccatgcaggcgaggaagacgatgagggagaccgggtgccagagcagggagaggaacaccacggcgagcaccacgatggcgtagttcatggagaagtggcccaggttggcgcgcgcgcggcggtacgcgccgccgagcccgcgcggcacggacgccgcccgcgggtcggcgagctcccgccacggccgccgctccgccagcgccgtcgcgccgcgcgccttggcgcgggagatgaagtcgagcggggaggaggaggaggagcccgggggcggcccgtccgaggacgaggaggtcgggatggtgccatacttcgacatggcgcggaggcggaggcggcggacggtggccggcgccggcgagacgcggcgagggaggcgaagtggacttgacgtggaggagagggagggagtcttgactctggaaggggcgaagcgaccgcccaattaatggagaggaatggcatgggtggggcccaccgcgacagctaggtggacacgtggcggtggaggttacggcaagatcgtggccgttggtttcgattcgggcctagtgaagttttggttaggcaatagaaggcccagaatgaatgggctttttcctggtaactaaattggcccacacgtcaggcataggtccgttgcggcccaactagtatgggccgcacattaggcgagatccagtttcggcccatgtagtacgggccgccatgccattccggcctgatataaacggggctccagtttggcctggtcgcattctggcccatgttgtgatcttctgtttatcacctgctacgtgatgtgtgttgtgttgcctgcttgattttgcaagttttgctcggcaaattgagctgagattcaagttgagaaaaacttgcagtaccaattgttcatttgtttctatttactctctccgtttcacaacatgatatcttttggtctctttatctctggactaaattcactaacattcatataaaatatatatgaagatccatacatgaatctgtttaatacataaaatgtcttataatataaaacaaagtactccctccatttcgaaatgtttgacgctgttgactttttagcacatgtttaaccgttcgtcttattcaaaaaaaataagtaattattaattctttttctatcatttgattcattgctaaatatatttttatgtaggcatataattttacatatttcacaaaattttttgaataagacgaacggtaaaacatgtgctaaaaaattaatggtgtcaaacatttcgaaacggagggagtaagtaagtagtgatttactatgaggtgctatgctcatccaatgttgctcttcacaacgtcaatggaacccgcatccgaagaaagggatagtcactagacgattaaatctctatgtttgagttttagtttgcaatcttgctagagaggctgaaaattttggatagcatatgatctgatcctgtaagacataaccttccaaaatctgtattatggtatcttttgacgtggagcaggtctacgtacacatagaactcatttcacgcttatgttcttacttcatgtacaatatgaaataaaccatatatactacagttgtaatgtgtttgtttatatgctagctcggacctatatatctacgttattaacaaatagactatgcactacttaaaaaaacagccacgagagtctttttactactcggtcggggtccagtggccgactgcctgcagagattcattatcgtagatggcagattgaggacgtcacctacgataatggattttcacaagcaacatcataagccagccgcctatgaaacatagccactataaggccttctccccgagacacacacattttatccaaactctttcttctaaaacaagtaaaatgatgaaaggggaaggcttttaactcaaaatttttcgtggagttcgctatccttagaccctttgatttgtaaaagtagggaatttgtaggattttaatcctacttcccccatactaatacatcgtgagggttgctatggacaatattaatgtccgttatcagtgcaagctcatgatgtcctaatcttttcctcaagaacgtaacatatttattctggtatagattagttactataagcttctttactaagtaaccccctaccccactactaaggaatcctagcatcaagcatcaaatgctagctaatggtttccccaaaattatttgtttttgtttaagggaagtgcatggggactaatgatttcatcacttggcgccacatactaaattagttaaaaaaaacaaagctcctttggacctaacaaacttttggcgttggtttgaccactctgtataatgatatctttgatgcaaagttttgaacagaaccatgcaaattaagatatatgaaaagaggagaagaacctcagcatcagggcattgtgtaatcatactctctgccacctctaaacagagtgattaatttagaaactcgttgaaccactttaatggcatgggcttttggtttgggtactctctggtcacatcattgcttacagccagcactgtggatatactattaattactagctcactaattttaatttactccaaagtgctgtgtggtgatgctatcaattatgccatcagcggctacacatgtgtttatctgctctctgacgtgtcgacactcgactccaagaaaattaggagtagcacatgtagcctagtggttacgagagtctcagtaacatttaaggtcgttggttcgactctctatggaagcgaattttctaggatttaatggcattgtgctttcagtggtaggcgacgtacccgtcgaagcgaggcgtctgtggtgacttcgtcaatcttaaggatttgccaggccagtcttcgaagatgctcataggggtagggtttgcgtgcgtgcgttcataggagtgagtgcgcgtgcattgtaagtgtctacgttgtactgtgtaattctaaaaaaaaagagtgctccctccgtctcaaaatacaagaacctagataggagcggatgggacgtttcctaatactatgaatctgctcctatccgctcctatctaggttcttatattttgggacggagggagcattagggtctgtttggttggagggactaatgattagtccctccactttagccccttttagtccctaaagtcccaaacaagggtgactaaaagaaataaaagggattaaaagtacattagttcattagtcctcgtgggaggagcttgactaaaagggactaaaagtacattagttcattagtccttgtgggaggagcttgcagggactaaaatgttttctttccacctcttgtcccgctgcctccacatagccctatccttttctcatctccctcctttcctcctctcgaccccgcaccgccgccgccgcgccgctaccctgcgcaagccaccgcaccagcttcgcacaagagccaccactgccccgcgcaagccccagcggcgtagtgcaagccgccgctgcccgcgcaagccaccgctagtcgggcaacagccatcagccatggcaggcaacgaggaagagccggtggatatcttgtccccgtcacacacacatcaccttcgactacggcttctcgcaggctgtcaggccacgccggatctggcgtcggcttccactttcgggggagtggatccaggggcctagatctgaactcccaggccgacgccttccccgactttgcctcctaccaccaaatcctgcaatcggatggccatgacttacctccgattcgccctggcagtagatccaccggcgccctgtcgcgccctcctttcctaggggtgagacgcgacataagtcgtggaggaagaggaggacgaggccgcgccaggtccttgaccattggcgcgggatccgccagggggatgcggggattcgttcccccggctcagcttccagcgatggaggtgtcataggccatggggactatttggacagttatgtgatgaatcaattttgggactgggttgccgatggtttgtggagtttgaaacaaatgtaatttctggtttattggtcttgtggaacatgtaatttgtattaataagcacttgcagtaatttgaggaacttgtaatttgtattttgggactgcttcgatctatcaattttgttcatgttctagcgtgatgtttcaaacctgtttgcaagctgattcctgtcattgccgatcactgatgcagtgcaaatatgtgatctgatcagcaaatgtgtgttccgattcctgtccttgccgattgcatggttaggggtaatatggtctttgtacagtacaattaatgatttttttagtccctacatccagacaaacagggactaaaatttttagtcctaggactagaggatccaaacacccttcccttcaaaacgcagaatagaaaaaacacaggaatatgaaaaacgtaggaattgaaattgtatatttttctaatcctacaggaattgaaaacacaggaaatggagagaatagccctttgattataccacaggatacactcaacaaaggaaagtttcacaagaggtctaacctcttgcttattttcctatggaattgatcataggaatgcaatcctatggaagttttcctatcctcttccaatgaatcaaatggctctataggaaaaaatccttaggaaaatgaatcctccaaaattcctttgctaatcctccatttcaaaggggcccttagtatcacaatataaaaataaggggaaacatccactacaaatttggacgtggacagttaaacttatctatctagattcgtagtactataatatttcttttcgtatttagtgtccagttatgttttttaatttgatactagtttgaatttgctagtatattatatgacggaaggattagtttttccatttgttgacactcgaactgaaaccttactggtgtgtttagttcacgtcaaaattagaagtttggttgaaattggaacgatgtgatggaaaaattggaagtttatgtgtgtaggaaagttttgatgtgatgaaaaagttgaaaatttgaagaaaaattttggagctaaactcagcctctgaggattttgactggcaagagacaagatggattttgtttttcttgtttgagagtgagaagtgagaaggaaaggaatcttcaacttcctttgcatccccaccaccgaggtcccatctcagatacccgaaatcgttaggttcatgagtttctctatagttattcgaggacataaacgactgaattaactattataaatttgaatatgagttttataaaaatattacaaagaaaaaaatgtatatagaaatcttttacgcgaaatgtactatttaggagcttggaaagcatatatgccaacgaaaatctaaaattcagaatgaaaataaaatacaatgcctgtagatattagatgagcaaatttaatgaagctatcacaaagaactctgaagttgcaaaatagcgttacaaaggaaaaatgccattgggaatgacactgacgagagtctctctacctgtttacgttaattaaaaaaagaacttaccattcatataatggttataaaggcagagtatctctacctttttacttaaataaatggtgttatgtttttccatccaaaactgctgttattgcatttttttacagagagaaattaagttccacgaaagcaaacactaccgttgctttctctgttatatagtatgctacagtacgatccttttttttttgttttacatttgctacgattctattctatacgatgtgaaatctactctatactttgatatgtaataaataatttgttttcctgaatttattaagacaaattgagcatgatgttgaaaattcaactaacacagagagagacaggatccggccggccttctagtttttttttttttgagaaacacagtacaaacgcagacgctcacaacatgcgcatactcacccctatgaacgcacacacgtacaccctacccctatgagcacctctatgagcacctccggaagactgggccgacatatcttgagattgacgaagtcaccacaggcgcctcgctgtcgatgggtacgtcacctaccactgaaagaataattagccgtaaatgcgagcacccgtgtcaaatctaggatttgaacccaggtgggctggttccaccacaagaaacctaaccagttgagctatgctcacttcaccnnnnnnnnnnnnnnnnnnnnnnnnnnnnaccagaaaggaggaacatgaagatgtataatgtgccagcaagttgaggataggaatcatgtattttttttaaccgccccatgttaggtttgactggagcatgagttctaaacgtctattccgatcggctacttccttattctttgtgagcacatctttcgaactactaaatattgtgtttcatacttatgtataaaagtttctttaagaaaatcatattaacttaattttcaagtttgaaataattaatacccaattaactcgttttgtgtgttaccgaatagatgagtccaaaacgctccttcaaatgcagccttatagatgtcataggtttataaaatgggctagtgtacttttaggtagtcgtgtcaagatgattaagcaaaagttgagggtgagagtaggactggttctaattgcgagcttttactggggttgtggctaactaagaatggtttttttaggttgcttacaaattgttaatttgatgcagcgctaagggctcttcaggcagcctattcgacaatgcacaatataaaaggttgatggataatatgattcagcttcgccatgtggatatgctacccgacgatctagaaattggattgtggtgtttggtgtgtctagaaatttgatagtggtgtgtctttgtttttcgctggtccatttgttccaaggttttcggctatgagggtatgttagctcatctgatctttggctgcctgtgtggaaggttggagctaaaaacggtaaagctggtatccccagctatgtgttctttagctattgttctagtgtactccctccataaaaaaatccaacgtagaaaggaatgtcacccctcctattagtacaacgaatctggacgaggaggggtcatatcccctcctagattgattttttttaggacggagggagtaagactctgtatgttgttttggctttttaaaaagagggtactgtctgaaaacaacaattcaaccaatttaaatagtaggccaaaatagaatcaataaaacattgagtgaatttcaccttagaccgcctcttcttaataaggttctatttattttgtattttcacattaggccagcttttttcccctttggatttctccttagactacctcttttacttattttagttaggctttgcgtgccacccggttttctctctaggcacactcctcttatctatagcaccttaccgatgttcaccatctatatggattaagggagtataagttgaaacttcagtaatgaaatagagctcgacctgatatacacttagaataaaagaactaaatatacgttgtttggagtcttcaaaaaattaataatgattttaatttgaaatccctatagctatcactacaaaccaacaagtagagaaagaagagaggggggggggtgtcctagttggtttgtggcttggtgatgtagttttcgttgccttggaagggaaaaattgacgaaaatggtactcatactttacagttcaaattctttctaataaaatctagcagcttgacttttgtgccatggtattttacaacccatttagttcactgcaatggtactgagcagaaaatatttgtaatgtagacctatataacaaattagataaaatatttatttccttggaaaataaatatttttcctccttattgcacgaaaaacgaaaccatcgaattaagttaggatcgtataatgtatatctaagtcaaggttaactaactttataggaaaagcatagcaattaatattttttaacaccaaacatatattataaaagcatgtttaactgagaatttaatgaaattaatttagtattgtaaattaataactgtgttcttttatatgcttgatcaaacttaaaaaaaagttttacttagcacacaggaccaaaggacctcacacgaagggggaatctatttctgtgtgccactagctgtgggctattgtagatatcctgcccccctttatcattttctgggattgcatgcccatttgtacaatattatacagagtatttgcatttgtttgcatatgaggctgcaatgtgcatatgccctttttttggcgcatcgctgcctaggagtgctttctcacgtgctgtctggatacatccccttccatgcatgcatctaaagtcttggacctggaatcttgtgaaaatttctattatacttaagtttgacacaaaattaattagtagttggtgcttactctatcctaaaatatagcaacttaggacaagatataatgcatactagtactaatataatgtccagattcgtagtattatgatgtgttctaatcataggttgctatattttgaaactgatcgatgtagtaataatatatgcaagaccatcatgcacacccgcttaaaatataattagtcaataatatcaactaacatcctttgcatttcataatcttttcactggtgttagttacttaatttatttttattattacgagaaaggtgtatacgcacccacaccacaagtgaatatgagcaaacatatactcgaagggatatggaccagtgacaaattcctagccccactaaaattttattaaaaaacatccgcgtgcatgtaatatttaggcaaggaattgtagggaaggaaatgctaacagatgtatgggaggcaacataatcaaatattacacaaacaaacgacacaatctattttaagtaaatgaagacaacataaacgcacaacctacaaatatttcaaatattacacaatctatttcaacgaagacaacatacgacacacaaacgcacccaatctattttaacgtttcttcatgggtatctgtccacctaatctatattaagtaaatgaagtaattaaatacataatataagttataaacattatacttataaattattttaaaaaaaactaaagtgggtcattaactaatatatacatacgggtgataattggcctagctaagtccatcataacacatgagaaacataatctctccctctcttgctagctagataggacccaaaaacaactacatgatagctaactacccaacaatcatcacactatcaacatggggctaaactaatttctccaaaaagaaagagaaacataattgaaaaagccgtgtgagagactaaagggcctatttgttgttagcaaaacaacactacaatcaaattttgataatgcatgaattggagttatcaaaatttgacaacgtaaaagaaatggagataatatttgctttgaagccatatcaaaccttgggttggcattaaagagtcggagttttaagagttaacatttttttcataatggaattcatttgggcttttgctttaaagaagttacgaccaattattatagagactgtaggatgaacagctgcgaattaaaataattagtataccatcataaatttccattgtagctgtttctatcagcgacttactagttgcatgtactccttgtgttacttaaacaagaaggtagaatcttcgaaatcatagtctgattatattgtcgatcaaattccactcccagcatctccaatgattaatgttgaaccaaagcggaatgtatcatccaagagtaactaagtggtaaatcagtcgtttgtccatatcatgccgccaccattgcgatgaaatccaaccggttatgataccgccataaggatgcctcaccaattaagatggaacttccaacgcgacgccttcaagaaggttgcaacactaatttagaacatcgtcttcatcgctattccagaaatatgtgctgtcgccggccacctagctacatccaaaatatgtataattcattggcttcccaaattttaataggattgctttaggcaacaaacaaaacaggttccaatttcagagtataaagtattggatatgggacttacacgtcactctatttcttgccttcatgttctttgttcactattggttgactacatctatatatatcgaagtaattaaatatatatataggttttgtatctatagatacacattcatatatatgcactcgatatatatagacgcacatcttctcttccaaaagctggaatactcgatcctcacagtcacacagctagcaacgccggcggccatgcaaccactcgctgccggcggcggcgtctcttggccgttgtacgccgccaccgtcgcggcggcgctgctcgtcaccgccatcgtcctgcggctcgccgcgcggtcgacggcggccgcctgcaaggcacgtccccccgccgggtctctcggctggccgctcgtcggcgagacgctgcagttcatctccgccgcctactcctcccgccccgagtccttcgtcgagaagcgctgccgccggtgagcaccaccgccgccgccatggcaccggcagcgcgcgtacgtagtagctgcgtctgtggtgctgaaaatttctcttgttcttgttgattgattgattccgtaggtacgggaaggtgttcaggtcgcacctgtgggggtcgccggcggtggtgagcgcggacgccgaggcgagccgcgcggtgctgcagagcgacgcgtcggcgttcgtgccgtggtacccgaggtcgctgatggagctgatgggggagtcgtccatcctggtgctcggcggcgccctccagcgccgggtgcacggcctcgccggcgccttcttcaagtcgccggagctcaaggcccgggtcaccgccgacatgcgcagccgcctcgccgccgccatggacgcgtggcgcgccaccgccgccaccggcgccggcgcggccgtgcgcgtccaggacgaggccaagttggtacgtacgtggcatgacacgcgctgctacctacctagctatagctaagctaggctaacccaagagaatatgaggagtagcttgcattggagtggatcgtttgtccgtttataagtgtcttttttcttcaactaatagtgaaattcataggaatttcttcctagagaaacttcaacccctatagaaatggggatcagagcctagttatcatgtttatggtttacctagttcattattagtaatatctacggaagtactagatatcccagtatatataggattctacaacatatggaccgagctcctaacttgatgaaaaagtcttagcctagctagaaatatatccctttatgcaaaaaaaatatctcgataatattgcgtacaataatgcaaactatattaattttcttataaaatttctagtgtgtaagatgattgtatgtgggaaatatgtattctctatattatcttttttttgtttttatatatagtaataaattttattgtctacgtacgtggcacatcttattgacttcgattcaaaaagtcaaaaaataatgccatgcttatactgtacacttaattggcatttttccgtcgaatgtggaattatagaactccttgttctttaatttatttgttctgatgttgactggctaacttaatcattttttttttgttccatcgcttcatagattgtttttgaaatcttagtgagggcactgatagggttagagcaaggtcaggaaatgaattacctcaggcagcagttccacatattcattgccggcctgatctccctgcccatcaagcttccagggactcagctctacagatccctcaaggtaaacacatatattagtcaattcggcatgcgagttgctccaaatttctgaacaataatacccacatgacaacctctcaatttatgtttcttttttttttgtatatatacatctaggctaagaagaggatgacaagtttgatacaaaatatcattcaagagaaaaggaggaggatctttgaaggcaaggatctctgcgctgtttcgcgcgacttgatcgatgtgctgatgagcaacgggagcgacgagctcagcctcaccgacgagctgatatccgacaatatgatcgacttcatgatccccgcagaggactccgtgccagtgctcatcacacttgccatcaagtacctcagcgaatgcccattggctttgcagcaactagaggtacggtatatatatgctctaaaatgatttctacttttaattgtaactaaattcgggtgtttgagaagagaggtgccagggatgggatccgggtttgaaattccggttcaaaatttcaagaatttccttgtgggaagtgcctccggcaaaaaaaaagtttcaaatttgtttgaatttagcaaaaggttgctcaagttcagtgaaaatctattcacttttaattttttggttcaaaaattcttaagctgatccccttcctgaaatttttttgtattatgaaatgcaaatataaacatataatcatgtagatatcattgtcaatcgatctcttgcatgatcatgacttgaaccatctagtgcgtgcatgattagtatagtagtgctatttgtcaatttgacaagctgtgatatgatatcaatgtccaggaggcccaactgactgtttgttgcctagctctctggcgtgcaaccttaattagataacaaattctgatatgccggcagcaccagggcatttgatgtagactcctacctaaaaacacaagcactattctgttgacccatgcacatcatcaagtcataagaaagtcttaattatattccaagttgaatgtacgataaggtttacaaaaggaaatactccccttgttttcaaataaccgaaactggacattatttatttttcaagcttttggctactcttttttttggcaaaaaaattccaaatactaaaattgtgtttttattaaagtttatatgcatcctaaatataagcataaaactttcatttattttagtctatatcctttagtttaggagcaattattagttgaagttgaaatagtaatacatttatttaaaaacagagaaagtactatatccggattaataacacttgtcattttgaaaaaaacacggtctttaaaaaataactttgagcactattttctattataatatttataaaatcttcaataaatatatgattttattaaagtatttttaatactaatatatatatatatatatcatatttataagataaatattttacaaattattcacactaaaaaaattttaaattttgacatcagccttgtgcaaaaaagacaagtattatcaactgagggagcagtacattactagaaattaatgtgctagcaataaatggaatatgtccattgatttttaacctgtagatatttttttgaagattttactgtcctaaagaaaatgagtagaacaaggaagatgtactcatctttgtacttaatgcaggaggagaacatggagctgaagaggcagaaatcagacgtgggcgaaaccctagagtggacagactacatgtcactgacgttcacgcagcatgtaattaatcaaaacatattacatatgttggatattccaagattcaccctaccgtatgtgtctgacatgtgtgtctagaatccacatatggactgacatgtccagaccaagtcctgattccttaagctaatgcataatccctctgtaaaaaaagcaaacaaacttctagcttggcaaagcggaacaaaggagagagagagaaactaaaatacctaatattttagtttaaaagaagccttacattaatagattaatagtatagtagtattgatgggttgatagataagaagtattgaagagatgtaagccacgtataatttgatttatttgaaacaaaatttaaactccatgaattaatttattttaggacatgggtataatcttctagagtatatatacaaccaaactccgtcatatatacatatatatgccaatatgaatgcattcttaaaacagaatgcatttttacttgtcgtccatcatgcataattgcgaagttatgaactatgtatattttgtgtgcaggtaatcacggagaccctacggataggcaacatcatcagcgggataatgaggaaggcagtaagggatgtggaggtgaaggggcagggtgacgtggtgatccccaaggggtggtgtgtcctcgtttacttccgttctgtccacctagacgccaacatctacgacgacccctatgccttcaacccatggagatggaaagagagggacatggcggccgcgactgccaacagtggtagcggcttcactccctttgggggcgggcaaaggctatgcccggggctagacttggcaggctccagacctccatctttctccaccacctcgtcactaatttcacgtatgtcaactatacctacctaagtacgtatgcattctcgcttcaatttgatcacgttaacacgttgttttggatagatttttttttattacacggaagacacaccacacgcgtgtgcgagcacgcacactaacacttattcaaaaatagagaccaaaaaattcttagcctcactatattcctcttgaaagagtaagtgcgtatacataatatttgtgaataccattatggtcaaagtcatgcacccactactccagcatcacactgctagtaattctccaccgttttggacattgacgtagtcttagaaatgcatattgcataatgaaatttctgaaattttggaagtttgggactgttggtcctgctagataagatattcatttgaccataaagaattggtttttaaatttagcaaaatatgtccaaattttaatatttggggtctcgaactttcgaaatgccagttttatcagtccccttcccctcgatttttttttaaacaaaaagagagatccacaacactaaaccccggtttctacatatatcatagtgtctttataagatatgttaaaaaatatatgcatagggaatgaactggtgcttactgttgcttgaatggatggatctctgttgtaggtgggtggcacagggggacgtcgtcgtcaacttcccaacagtgcggctcaaacgaggaatgcccatcaaggtcacgcccaagacataacatgcaaatcagtccagatcatttgaaggtgagaggagagtgaactatacacgtgtatgtacaacaaagagagaacaaatgacagtttagataaaaggaaaccagaagctacagttcagtaaatcctgtttctttttctctgtttttcttcacccctttgtgtggctatgtaaagtcgaccagtctctgttcgaagtttcccaccagtttggtgaaagagttgaaaggctaaaagcaacagcatgtagatcaacaaacatgtgtaaatacttgctgaatcagtgctttcttcgagtatttcgagcatgtggctaacttgatgtgatttgtgaagtttcctctgatgtccttgccgccgttcatccattggtgatacagtgactgaacacaaagctaccaagatcagaaatattagaggggctgggaaagcaggtacatatcagattagcaccaaatcaacaggatcgcagaatcagatataaatgagtagaatagaacagaattgcataggaatttggagatgaataactagtgacgaaatgtactgtgcttagcttcatgcaatctgaaattaaccaaacagaattacacataagtgatggactgcaagagtgaatgataatagattcaccagtcactagatgcatgcattgcagatttaatttacagatgagaactccgaactttggagctcaaaaagaaaaaaagaactccaaactctaagcactatagggggttcacaaacacgaaaaagccaaaacagagaaataacaggaccgcagactcgagttagctttgtacaattttgtcgcctacctccaggttaaatataaatttaaactatatgcacgacttctaaacatggtacaactcgctaacttacaacatggcgactttagcaatctatggacaagggggtacaacaacaggacagcacagtatacattatgcaacttccaggctggggcacctatacagaacacacgcaggaggcttggccatctatcaattcagttaactataggtaagcaattaaaaatatcattgcccttcaaaattcgcattctaaatcatatctccagcggttgatatgaataaactctacaaagaagcagccaaacagaatgtggacctcatgacaccgttcttccatagcaaatggaagctaggtaaagattcttcgaccatttctcctgcagatatattaaatcattatagttgcacaagtatggctgttcagtagaatttagacagaaaatcaaattaccttcacatgctggctggggaaagcagatgtcctcagggtttcctgtgtttcatcagcaggctttcttctgggaatgctcaagataaatgccgcctggtcccatgtagctgctgttgcagttatgcgaaaaccattgtcccaacgccgatgtattccctcacttggatacaggaagtcaagctccacaacctacaaaagaaaattgtgttgtcaaccgaaggaactgaatttctacccctattgtatatcatatcactgttgaacctaagctatcctattgaagattcagaaagggaaagcacatacatgtgtatacatgttttaggttagtaaaaggcctgattagaaagacagaaatacctgatctgtaaagccagcattccgggacatgaccactgcccaccggcttcctgcagtggccatagcagtgacatagaaaccctccttccacttcttgtttatccacttgaagggaaatgagtcgcttactttgtaggattgttgggcatattgcgtccctgctcaaaatcagttacaatctataaggacatgctagtgtaataacaacaggggaacgtatcctgtgcacacaaactttccatgtacacaccaactaataaatttcaccaaaaaatctagaaaaaaatgtatatgtacttcgaatagcattacacttatgtgtaaaggcctggtttagttccccaaatttttttcccaaaaacatcacatcaaatctttggacacatgcatggagcattaaatatagattaaaaaaaactaattgcacagttaggggggaaatcgcaggacaaatcttttgagcctaattagtccatg

SEQ ID NO: 23733 - DNA, 1728 bp, Oryza sativa
atatatcaacacaaaggtaactaaggacaaaaggttgcaaaacgaacagataaaaaaagattcgcactgcaaacaaacttcacctggtatccttgccaaggaaggcgaccccgtaaaagaaaaacaagtgtataggcaagggattcaagatcatctcttctgcttccagttcttcctaagtgagcatgcacactagcatagcgaacagttccccttttcaggtaatcagtatgacaagtcagtttattagtaacacaagaaaatcgagggctttaggacttagttttcaataaagtatctccctcacaaacctaaagatatcaggcctctgatcatactcaacatgctcccccgaaccagtgtctttccacctagtagctgtgatgagaataaatattgagtacaaaaacagtataatgaggttcttgtgaaatgaaacagaagtacctaatccaaggtcaacaagaaaaagttttttctcttccagggttcctggggttccaagcaaaaaattctcaggttttacatcaccatgaacatacctaacataaataagagttagctatatttcaaaatgcaacatgcaaaaaactattaggcttcactgccaagagaggatcagagaaaaaaacaaataccctttcgaatgcatcttctccaatatggagattgcttctatagcaatacaagcaaccatttcaacagacattctgtaatagaaagaaaaatatcatattaactgagctaattaaacatgaacattcaagaatatattgacgaacaactagaaaacttacgagtgggaattattattccaaacatcccacaggcttggacccaacatgtccataatctgcatataagttggtttgcatcagagaacttcatgttttctaggtaatgaagaaccaatccatttaattttgctctgttcatgattaattatgaatcaatgtgataaaggaaaacagaatatcttggcttgcgattactaaaagttgaagatccacagagtcaggctttcatgcctactttggcaaagtatagttaagagtgcctttctaaatgaatggtctgacacacactataaacaaagttctatcttaaaagtgtaatgatctgagaatacatattttacaagattataggaaaacatttttactccacatctcatatcaaaactttgaggggaagtaaaaaagaagttttccctagtttctataaaatacatgaacaattttatttcttttgttggcagatttagtgcagccttagcaggatctttcttcaaaggctattggatgtgaggcacgaagacaaactacacaacattggaaaggtatcgttgcagcatcgagcatatggtcaaaagaatagagaaacagactggacactggaaatagcgaattgagaaggtagtggtttcttgcttcgcgaaataatacataggactccatatacagagtgctaatatatcttgccatcgaagacaaggacggcttgttaaccgaaaacttaactagacttgcctaaaatggatttccctagccgactagaactaaagttcctaatgccttgcaccttcttctgtcatgcaaaaagaagttgctgatgctgtcctgagctccaacataccttctgtagttcatccacaataggaattcagaacataattttaagattgtgcgcaatctactgctcaatctaaatttatctattgtctctgtg

SEQ ID NO: 23734 - DNA, 20942 bp, Oryza sativa
tccatcatacatcagggtgtaaaaggagcaggtatttcttgcctctgcctgcccaggaattgtggagcagatagaatggagaaatggtaatttggcattatccatatccatttggaatcagagaaaatttaggatatgatatgttgatatatgattagggctatccactgacatacatccgaatgcaagtgttgtgataaacctatctgatttcacttaagattaccaacattaattgctatcgttttgacatcttacaatcttagttatcagtctacccatgctcacgctgaatgtacccatattgtccatggtctcatgtaaggattaaaggatgcaaacatagtctgtccgaccaactgactgacagaatgcagagtggatacgggatagagaaatggttatccggtactatctgattgcgactaataaagaaacatgggggaaggatgcgggagttgtcatctcagtttgcaccctctccaattccatcctacatacgaattgtccattgcaagctacaactccattttgtgtcggtcaccagcaacaagattgtggaaaaatttgacaatttgttgatgatgttttgaattgattcaaagtaaagattcaatgttgcagcagtaatcactcgaacaaccaaataaaaaaatatttctcttaatccataaaacttttctgttgtataataacttctactaaccagcagaactttgtttatcgtatgcttacatcatatgcagagcacctttcatcaatggtctcaaacttttaactgataataactgccattaatgttttttcatattattggacattacctgctaatgttactaatgccagattgcccttgccagttttaatgattgagtgagctagtgctatccctccctccaaatgacttctacacagtatacactgctatttactactccctcctacccaaattgatcatcatatagtggaatctgaaatttctcaaactgatcatcatataaccgcatggacaccggtttcatcggaatacaattaatgcagcatgggatagtgtgtgcatgctagggtgtaattggcatggtcttttaatcgatgcatgcattgtgggagaatgtgtgcatggtgtcttgattgatgtgatttaaattatccttggtcttggtgcataaacatatatgatgatcaatttgggatggagggagtatataacacataaagtggggccaagagtatatgctccgttaccatgatatagtaatccccctgcctccctttataatgtactcttggtacaccatgaatgccgcttagagtgctgccaaatggatgtttacagaaagaaaatgttagtatgcattctagaatgccagctgccatcaaaatgtgtacagaatagcaaggcggacaaaggttgtgctgaataaaaaaacagttgatcatgccagaaaaaatggacaaaatgtcacttacttgtaaacttgccactcatagggagctccataattgcagcctttgctggttcgatgttcaaattttattgccacctggtataaagaaaagcgtgaatataaatgcaactatgatattttaaatatggaaatgaaaaagacatccggattagaagagctgacctccaaagcatttgctccaggtgtcctgtcggtaacaccaggagaggaaatacgccgaccaacatatacttgcccaaatcctccctttcccagctttctatcaagtttgtaagtaggtgaattggcaacttggacctgttcaaataaatcaaaaaagaatttgggtcaccctcagaaaatcacccaacacaccatttaaggtacccaggctatcctattccgctgttttgaagtcagatagtcctataactgcagtaactgaaacgagatgcatgtacctacaagagaattgagtataggcatctataagtgtacatggctatatgcaaaatgagaatggtttggaattttgtatgaaagaaaaaggtcagcttgtgtttttttgtaatgataaaaattaggcctccaatgtatattatgccacagaacttaatcactatataaaatgcaaacaagaaaagggagacaaacagctaagtgctagcaattaataggggcatcaaatgcaaaagatttgaaatatatagttatcttgagcagcaggtaaacatactcatctatgaaaactaacatcaaacttcagtgactgggctattacctaatagaattgctgtatacattagcagctttctgtagattaaaatgggaggcctaatgtggacatcctattatattacttaatcattgctatgcagtatacagtaatattgtgtggatggaacaagcccaaggtgcaactcacccaattctctcaattccattatatataacaggtcaactaaatgttctcccctttcatcacacatccacatggaatttaaccattctatgtactactatactttagacaagatcatgaaacacacaacatagggaacttgggggtgtcctaagtatcaacaaaaagatcacacaagttagaaaacaacattgctgcgtcactgatatgcaggtccagaccccatatgtcatcctcatatgtatattttaatctatacatgtttatagtatagctgaacaacttttcgctatacttggtagctcaaacagtcatgttattcaaatttcaatctgaaatgttaaacagcatggtactataaaatatgaaaaccatacacttctttgactgttgttcagtatgccactttcaatcgaggccactagatcaaacccattaaaacatcaatcatcagatcatacatactcgagagatgctttgattagacacctagttgaaagggtggaagtacaaatactaaagaagtaaataatataaatgcatgctattttgcacaaaaagtggcacgcacattgcaaatggcaaaccagaaccagaacaagaactatataaggtttcatgttgctcgtctataagaaaagcgcttgccgccctaaaataataaatacttgcacaacatatctcaaccaacctaatctattcactagtcactacatataaacacctcctttcagaatattgcaaaacacagtaatgtagccctttttgcataagtaactactacattaaaacattcgaactcgtgcgcctatttgtcagataaggaaacacaattttttttctaatccccaacaccacaagacaagagcatgaaatctgcgcacaacatttcatactcataactcatccataacaccaaataacctctcgaatcctactgttccacaggtgattatccacactatcccatacctaacaccaattttcatccatcctcgcgcttctagcatgcaaattcaccccccaaggccccaacccctatgcactacggccaagcggcctcacaccctcatcgcttccccccaagcacgaattgcgagtccaatcgcgggtgcccaaaccctaaacgcagtgcccaatttcgaacccacactactcgtggcaaaggcaacaaagggaggagaggagatcgatcctcaccgtctcggggagcggcgtggagctcccgtcgtcgcccggcgcctcgccggccttgtccccgctcccgacgacgctgtcgacgtcgtccattaccacttcccccccccccccccgctctccagtcccacgaacgcggctcggaatctccgtcaccgggaaccgccgcgtcgagagccggggctcgccggcgtggtgtgtgcgtggatgccgccgcttctacgagggcctccacccggcgtgggggtggattggtctagggtttggagcggaggcggcggcggcggcgaggcggaggcgaggtggtcggcgacggagaagggaagaagaagaagaaataaaaggcgagagaaaagcagaaaggagaggagaggagaagcgatggaaaattctggactctgctcgtgtgatcgattcctccggctcgtcggttacgggaaatttcattttacgcctttcagtggggaagacgtatcaacgtaagtatttgcgctttcgtgaaccgtcgggcatctcgtccgcgtgggacggcgtttttggttttcgtggaagttctgagaaattgatctcgtgatgatagagttcttagaaattggatacatccagcctttacttagaaaaaaaaagctatagttatcaattataatgtttttggataaaccaaaagcaaaagttcaacctaataaagttaaagaaaggatatacttgagaagaacaagcacataagaagacaacttaggttgtgttcggtagccatggttcctaacttatatttctcgttttttacgcatacgctttccaaattgttcaatggtactccctccatcctaaaatataagcacttttgaattttgatatgatattcgagatgttactttgactaacaatatctacaaaagtaagattttttaaataaaaatagtagtatattatgatagtttgttcaatgatagatcaagtaacatcaaatttacatgattgatttttgttgctattaatggtcaaaattaagaaagtttgacttggcactgttgtaaaaatacttatattttgaagcggaaggagtatgtaatcaatacttaattaaccaggtactaatgagtcgctcagccttatggtgttttcttttaccacctctttcgtctaatacttcattgtttttatgcgcacgcttcctaaactataaaacaatgtgttttaaattctatagaaaagctgctttaacaaatctgttaatctattttttaagttcattttagctaatttctaattaataatgtgttaatagacaacttcattttacatacaaattttacatacaaggaggtgaagttttcaacctctacctccgaatgcagccttatcaggtaaacaatttgattgctaaatctttattcagtgtgggggaatttctcatgctagattgatgtaactttctactcctaatgatgtgtatttatttttgtgtttatttatgatccttttaacagatacaatcaacgagatgacttataattatcgctatttaataaaaagagcaccacatgaagctacatcgtttcattaatctccgtacatttttacaaggtgctttggtgataccggatatgactaatcacagtactattttggattaaaattaaaacgtgttctactaatattttggtaacttaaatagtagacactggtgggttcagtttgaagccaatgttcagcttggcactttttgataacattacactatccaaatgaatcaattttcttgggcttctgaaagacaaagagcctaagccctagatgtggcccaagtatcacacgaggtttagtggtcaggcccaacccaaggcacacgacctccccgcatcgcttccttgcacgactgcgctagtataaccttctgtgaagtagtagcacatatttttctttcatttccttcccttttttttttcaaatgaaaagcagcaccgattttgctactagtagtactaattaaagtcatcatcattattttttaaaaataataaacacagaacaacgcatacactcatccctatgaatgcacgcacgtaaaccttacccctacgagcatctttgaagactagaccgacaaatcctttatattgatgaagtcactataggtgtctcactgtcgatagatacgtcacctaccactgaaatcacaatgccattaaaccctaccctatgagcaccttcgaagactgggtcggcaaatccttgagtttgacgaaatcaccacaggtgcctcgctgtcgctgttaacaagtacgtcgcctgccactgaaagcacgatgccattaaatcctgtaaaattcgctctcatgggaagtcaaacccagaaattaaggtgctactgagactcttataagttataaccactaggctacaggccctttcgcatcatcatcattattttacattcaaggagataccaaagtttatgttataggaaaagtgtacatctctacatattattttatgacaaatgagttaaccaggcgtaataacagagaataatgatgtcaagcattcgaaaatgaaaaaaaaaagagaacaattcagtgcaacacaagtctgctttcatcactaaccatacacgagaaaaaaaataagagaatattttaaagctcctcgtgctctaatcaaggttcactgctacagaaaacatctttctaaactgttaaaagtgattttgaaggcggtcaagccacccatagcgctttagttgtctgtaaagattacgattgggtaggtgtcataactgcacctgaaaaccaattttcgcaaactgtcaagttaggatacccaattgcaacgacctttccaaaaacaaattaatccagaaaccctagtgttcgtcctcgaagccgtcaccgccgccgttagaacccactgtcatcgcagctaacaactggcaaattacagtagtcatcgtagccctcgtcgtggttgaggtcgtcattgtctatgcatggtcgtcagatctgcctcctcttcaccacatcgcctgagcccgctgcggatccactgctcttgagctcaccgccgacggattcgacgctcccatggccgtaagcaacgaatcccctcttccatggtcaccactgtcgcatgaagcccaccgctagcatggtcgttgcgactacttgaagccattgcttccgccgtcctcggcctcccaacagcggatccaccagtcccgtagacgcgggtggtggatccgcctagcccgaggccaccgccactccccaagcccattacgccactgcctggagaggtgagtaggttggctgagagtgggatatagaagagagtaggggcggagccagagagaaatcagggggtgcctaaccttcctttgcgcacaacacaaaccaggagtagtattatgcagataattgtgtatcctaaacatctattctcccattgatggcattatactaaaaggaagtgttcagaaaaagggcagaaattgtgtacctgaattatgaaatcagctaaaaatatttgtgaaattgataatttgtcaatcgtataaaaaagtcacaaatcacaaaatatatcataaaaaatgtgatatcactgtcttcattcatccattaggactgaataaagaaagagaggaacatagttaaattttaagtaaagaataagtcatgaaatcatttacaaatacaaacagttatctattcgaactatgcacaacagtacggtcaaatactcaaaatttgtgaaagttcaacttgaaaccagacattaaaatatagagaaaaaactattcaagattaattaaaaaatttcaagctttatgttggtacatattacattaactgaaaacaaaagaaattaaggatgacatgggacaaaaggaccttgcatctgctcacttgctctagtgcccggttggcatcattggcttgccatgtcgggctgttggagaaggcgacgccgtccagtcattccacgaggagatggtgatgacaaacttagactctcctcacagtgctcaccctagccaaatgccaacaagccaataactataaggcaaaatcacccaatcaaagattcaagagcagcagcgaaagacgaaatcggcatggcggcggcacagtgtgacggcgttctattttagccaatgggcgacggcgtggcgtggcgattttggccaacaggcggcgggccggcggcggcgcaacgctgagtcgaggagagagaggaagaggtggaagatggaaagacgatgcgtgccgtgcccaacgattgacgttggattaacatgtgaagcgctagctgttgccttgttgggccttggtgtcttgcagattttgggctgaaggccagcgagggggttcctgagttttttactaaggggtgcctgtatggtggatttataggggtaatagctaattttttgtttcggcccgggtgcctaggaaccccccgggcctattgggctccgcccctggaagagaggggtggtgggagtgagggagaggagtaggaaaaggagagggaataggagagaaaaggtaaggggccagatgagggaactgaggggagaaaaaaatagagtggaggagtacggctattgtaggggttggagaagatggagaagataaaacatcgttgcgacgggacttggccgaacatcccgaatgaattttcacaaacagatctctttttagcccgattgtgaaaataatgaggtattcgtaaaaatctaactattctataatagtgctttttccggggacactttagaacttaagaaacgacgtacaaatgttcaatacaagcggttcaaatcctgtagtagtataatttagcggtcagttatacttatccttgtttcatcctgctatctcacgtagttcatgcatgtaatattcggtgaatagtctactgttctcgcgtagcaaagctatattgtgcttgcgggtgcacatgaacccccaaatttctaatttctcacttaaaaaaactagaatgtacagtattatactgaaattttctagattttcaatagtagtgcacatctgttttgatgctagcttcgcctctgctcgcatataagcctcctataacatactatcatctaacatttaagttaaaaaaaaactcatctaacattgtataactaacatgtaggtaggctcttcgcgtcagataattggtcaggaaaattagttcatcgatacttgagttccgtcgaaaagtgagatgcgcaaactgcaaacacaacaagcatgcaccgtaccgatatgatgcacatgcacggcgactgttgctccgatccaagtgttataatcgtgttccaaatctccgaaagtaaaaaggttaatctccaaagttcgattagaatgagagtcacgtcatctcacaattattgaccccgattgaaaagcaaatcaagtgaggtaggataaatctcaaccataaatgaaggatggagtgggagtcataatacgtagtattacaattcgtggataaatttaaatttaccatcaaaatacgtattataattggtggataaatgaaatatctcaagcagcagcgaagaggagggttatggttggatacatagagaggacggaataacgtcgaagaagatgaatagaaaatttaagacttaatcacagtcattgcactcattgttttgttcagttgaaagatgagtatggtatttcatatttcaatcttatttataatattattataaatagcacatccattaaatcaattaaagaaaagaaggtgacaagcgcagtaatgaaaaagaaattattagccgttataataaatatttttattttagaaacaagataaatttgcgaatgtcatagaaaatatttgatgcatacatttattaaaaatttaagttaattatctatacctaattaaaaaataagtaagacttccttaaattattcttgtccgtcattttttttcttccgcaacgtggttttttttccatggtttaacgtggttttttgcctggtttttttccgtacggttggttttttctccgcacgtggtttttctttgggcccggttttttgtccgatttttttgttagtgggtcgcgatttttttgttccggttttgtggtgggccccgtataaaaccaaatcggaccggaaaaaaatcaactggcaacacgacaaaaaaccagatcgaacaaaaaaaccgttcacccgtgacccggacaaaaactaccagatgaaaaacctcggcgacctggatcggagcagaaaaaccatgtgtattactaaaaaaacagatcaaccatgtgtattattaggagaaaaaccacattagacggaaaaatataagcaacccggatcagacctgaaaaaaccatgtgtattatgcaacatgtatattattaaaaaaccagatcaggcaaaaaaaatcggcaaaaatcatgtgtattattagaagaaaagcgagattggaccggaaaaaaatgagcgacccaaatcagacccggaggtcgccgttgttgtttctctctctctctaccatgttgtcaatcgcgtttctgcttttatggttttcttcgttaccaatgtccaccatcaatagatgagtctaattgtgggacacgtcctaccacagtcgtcaccgccgtttgatcatcagaccatccacgcccatcgttagtattatgagaacatgaatatatcaatattaaatagtgatctttatccatcctaattatcattaaaatttctaagcctagctaagaaaaaaaattatctatagcgaagcccgggtattttgctagttataaacaacatgtatagagggagactctagtcggacgaacgtgggacataatgcgctggttagacttggtgtctgtaaaatcttttgtgttaaaagtcgtcaggctaggctggctggagtgctggactgtctgcaagagtaaaaactgtctgcaagagctagggaatctttgaaattgttactactacttaccgacacctaccccctcaatggaagatttggcataaagatgctctttaacttcttttaggacccatgcataaaggcaataaagcaagcacttttagattcagacatgccagatactccctccgttttttaatagatgacgccgttgactttttatcacatgtttgaccatttgtcttatttaaaaaatttacataattataatttattttgttatgagttgttttatcactcacaatactttaagtgtgatttatatattatacatttgtaaaaaaaatttgaataagacgaatgatcaaacatgtaagaaaaagtcaacggcgtcatatattaaaaaacggaggagtggttgctgaacatggaacactatcgatccacatttgttttgaatatgcatatagaatttgaagaagaaatttgttaaatcatcaatcaatttttttttagtttttcatttcaaatgaaatgatcatgcgtgcatattttatgtttgaaattaactagtagttacagaattccaatggacttgacagatcggatgctgggaatggtggggctcgagcccgaaactccaaaacggcttcgaaaagtcccagtgcaagacactagcagtgtttagtactcctactagctaaacccaactccctatattgacactgcttcaatacgttgcttccatttcatataatcattttaatattttttctaatcaattttttgtttgatcaagtttataaaaatattagtaacattaacaacacaaaattagttttattaaatctaacattaaatatatattaatgacatgtttgttttaggttagagatgatatagctttttctaaaaagttgtacacattggggaaaaaatcaaagtgttttatatataaaacgggggagtaattaatactctttccattttattttataagtcgctttgacttttttaaggcctgatcaaatttatagaaaaatttagcaatacttataacaccaaattagtttattacatctaacattaaacatatttctatagtttcataaaaactattgctatattttttataaatttgattaaatctaaaaaagtttaattactaaaaagtcaaaacgacgtaatatgagacggatgtagtataacttatttcacacccaagtcctagatgtcatatacaaattaaactacgtctcaagcaaaactcaatcttcttttgttttagagtaccgttaattaaattcccccctcatcataactcctttgtatttgccacatcattataagtagtcgtatgtaccacatcggcagacaacatatttaattctatggatactatcgtgtacgaagtattgggacatcatgcacagaaaaatatttagctaaactcttgggtggctattctagttacaaaattttttagaagaaattcaacgagatagattaatatgtgataaattattctacaaacatacaagattaaatttaacttttacaagttaaagaaaacaattttaactgcgaatatacgtcaactatagtttaatttgttttaacttatagatatgataggttgaattttaacttacatctttatatagagtgatgtgttatatattaatctattttgctgaagttttccattatcagttagtagatgacacgtaaataacaggatagaatgtccactaccccggccgcatgcacttggctcgcacgcggtcgccgccggttgggtgaggtggtgactcggccggaagccgacgcgtaccaagaaaagccgcgcgcaaaggcgcaggaaaagcgaccccctcgctttggtagcgcgtgcaggcgatcgatcgagagatggatggatcattggtggcgagcgagcgaatcgtaaagcagccagagccagcgtggtcaccacgacgacgacgacccaaactaaagatggccaactcacatctcatctcatctcatcacgatcacggccttttcttttaatttctcccttttttgtctgctccaatccattcacttcacattttggttcatctataggtacatgcatggcctgccatgcgtgcatactatttttttccgttataatggatgacacatatacgaagtgagcgtaactcaactgattagatttttttatgatatttgtatttacggctaattattttttcaataatccataagcgacgtatccgtgtgatacattatcactaaagtctatatatacgatattggaataatatattattggtagcgtccaaaaaggatgcaactgaacatatgcaagaaagcacgcagcatatatacaggctgccctgccgtgcagtgcaggtgaggtgaggacatatatatgtagacgcacatgaactaggaatactagctatttgagcaggcaggcagggcatctgtaggctgttgttgagaggaaagggtcaggtttgcttagcattattaagggcctttaacctcaccatcttctttcttttccgatcctttcctacaagggtgtgaactcagatccctgccttgttcagacatcaacctaagaatctcaaagctagggctcatactgccggcactgcatgtacgtacttgtcggtgcatggtaagtatattcatacatatacgtaccgacctactaccaaattaattttcttaatttgtaatcgtacgataaaatttaacagttttgttaaaaatatggcatgacattttttttttgttttgcgattgcactctttcctatatatgtaagtatgtgctcatactgtatcttctctttcaattagataaaaaatactttaaaaattattttttatatactttgtgtattaaaaaattacaatgtaaatattgaaactaacatggtcagttttgaaatttataatataattataatgtaattaagtacgtaatctataatgtaaaaacgacttgatagttttctatataaaatatatatggggccaaaaagtagatactctcttaaactaattgctccacgaactaattaaaactcgtttggcgacgaaaacgatctcaaatttgatacaaatgcatgaaaaatactccccatgtagccagacaccaatatcatggtataataacaatttaattcgtgtacgcacgtatgtacgtacgaacgctcgtatacgctgccaagtatgtagaatcctccgctgcatccgcatcgccatcgccccatgcatgcatgcaacaacacaatcgaacgtacaagctcacgccacgtcgccgccgcgcgcatgctagagcttggcggcgccggcgacggcgccgccgcagcaacgccagcggtggtatatcgagctagctagggagcacggccgccgccggccggctacctgccgcggcggcgcagctggcagtccggcgtggcggcggacggctgcatccgcagctgctcgtagaacttgttgatgaagtcctcgaactcggcgtcgtccacgcgctgctcgccgccgccgccgccgccgttctccggcacggcggggaacggcgagtcggtgacgcggagcggccggacaccggcggggcttcgccccaggatccacgccaccatcggcgacggagtcgcggtggcccagccgccgccgccgccgccctgcaccgccgccgccgacgacgacggcgtgccttccacctcggcgctcatcatctcgaacgcccgcgccaccgccgccgcgtcgaggccgccatactcgccgccgcctccgccgccgcggcggccaccgccgccgccgcggctcttgaaggggaacagcccgtagtgcgggtacgacgacggcgtggtggtgcagctgaactccacctcccgcgggcggcggccgtagaacgacgccagcgcggcggacgacgacgacgacgccgcgaggtggtggccgtgccccgcggcggcgtggtgggcgaggaggccgcggagcgccttgccggcgagcttgccgcggccgaggaggacgtggaggtccaccatgaggcgcttccggcagaggcctcgccggagcatgtggcacacggcgaggacgacgtgccacagccgccgcgccatcccggcctccatgggccgccgcgccggcgtcgtcgcgagatccatcaattttacccaataataataatactcaggggtgtatttgcaaaaacgcaacacacacacactaaagagaaaaacgaaggctaacggatcggagaagggactggttgttaattttgtgaggtttcgaggagctgattagcttaattggctaaactagcgaaggggttgatggaatggaatgagtaggattggggggggaggcagaggaggtatttaagggaaggaaaggcttcaagggacccacaaaaacacaacttaatttggaaggaagggttaagtctagtttaattatttactgatagtatgatgctactgttttttctgctgcttggacctgaggctgctgttagcttagctctgttcatattgtcatctttgaatactctgtctttgtttggttgacagctaaaggctgttctacacatgttacgttttaagtcaaacaataaaaacttttttaaaagtctgttgaaatatttacactgggctagctattgtccgtgcgttgcaacgggattttaattttaaaaaattattattgttaacctattgccatcatcatcatcattattttctacatatatttgttcataacatacttatgtatatatttgttattaacatattgatcttatactttctccttaaaaaaagtagggtgtcgatggtacgagtggtggcagagttatcattcaccatcatcatcactctttttaaaggaatatagatatatgaaaattgtatgcatataagtatatgtttgttttaaaaactactccgatccataatattataatttagaagtgctacaacgtgtagtttcattagttttccacaatattttgccatagtaattagtggttgcatctcgacgacgactggttctgttcaaaacgatatgattttgtaactaaagggtgtaatagtgatcaaactttactaatggaatgctaatgggaaagactataagagattagctttggtgctacttggcttgtggttaggtagcagtgacagtgattgtctgattgacacttaaagatgagatagtctcaagtctggttaataatgtctatgtttttgttggtgtgaaattgacacaaataacttaacaattaacgtccatctgtggggagtggttaattctcccaaagttttccttcattggtcaaggcttaaaaacgttgcttttggagaatatgcccttgattccttaaaccatccatatatcttcttgtaggaaactgagaggaatgtggtggcagatgcaaaacacaagaggaagaaggatatgttaatgatgatcagtgaaggattaattaataaaggacactgctatggaactagtagtgcttctaaataccccgctccaaaaagcacaagctagctaggtcccaaagatttggaatatcttaggtgatatagatcgagcatcactttgcaagttaattacacaaacctgtcttttcatgcttttagaaacacatgtattaggaaaaagaacaaatatggacgtttatatgaacattctgtgcgcttgtgttaaagattaatttacagcatatgtgttggattagtaaatattgcccaaatgacgaaacaagaaatccagatattttttttcctgaacacgcaaaagctttgcatctgtaactgccaaagagaattgaagtgcaccctccatccataagtataaaacatttctagattggtctatgtgattaaattagggctagttagggataagatagtaaactattaaatgagtgataattaatgggataagtagtaggagtactctataaatccacaactttcaaacgcttagaatattttatatctatgcttatatagaggaagtaaaagttagcagcaaccagtataatacactgatataaactgcccctgcgtcgccctcgcgcatgcgacacggggggtgaaacgcccagagccgccgcccccttctcctccctcccctcacctcgctgccaccggagctcaccgccggaaagccagctggcgagcgaggagggcggcggcggcgccttctccgacgacggcgcatcctcttaggtgcgggggaggcggtgaacgctgacgacggggagtggatctggcgtgccccaggttggattcggtcgaagcgggtggtggctcgacggcgtggcgcgtggccggcggcgggccgttgtagtgcgtgtcggcaagaggctagcgcgcatgggtggcggaggccggcgcatgcgaggcggcacgcgtcgccctcttcggcggtccggtggggcggtcgtcgtcggggcgcgtggccggcggtggggcgctgtagcgcatgtcggcgggagactggcgcgcgcgggtggcggaggccggcgcatgcgaggcgacacacgtcgtcctcttcggtagtccggtggggcggtcatcgtcggggcacatcggcgactccggcgcctctccgggcatccaccccctcccccacccccacctctgctaccacctcccttcctctcctcctcccaccccctccttttcctcccttcctctcacccccacctagttgtctagttgctctgctgttctgctcaccccagctcttctatgtgttggtggtaaagttggaggtggttgttgcagttgccagaggtggtttcccgcaaagcccggtgattcttggtggagatgtggcctccgccgcaaagctcttcttacatctcatcagaaacatagaagactccgatgtctctgttgccctgtcttcaactttcagctcctcttccggcaggccagacctcctcgccttccttgatgctccacccttctgttggccggtctacttctagaccttggtcgtgaagtcttttggtggatgaggagatatgttcgtcgacgaagttggtccagcttgtttgtggtcagggctctttggcctcgcctgtgcttcaagtgccttgtgtgttagtgaacctgtcgtagggccgagtttggagcggtgtgttttgctctctgtagtgccagagttttagtgcttaggaggagccagagctgctgcattgggattagttgatgagctgggcaacgataactctcagcactttcgctctggtttcttggaggtcttgcacctttcgagggagccttgggcaaaagccatacctggtttcctagctaggattggcgacatcgacacctgcgggtgccgtatcctccttggaggtgtcgccttgtttgactctcttcaccttcgggtgaaaacccagtccagttttggacgggtgttggcagcggcatctgtcgttgcttccctccttggaggcttcgctttgaaggtctcgctcttcccttggtcacttttgtggttcgtagttttttcgctttgtcttctgtgtggggttttgccggtttcactgtagcaaactgtacagttgtatgtttttggacccggttttccttataaacagggttaattctcttctgcttataaattccggtagaactcgtaccgtcgtttcttcgaaaaaaaaagagggagtataagttacatgaatgctttgctattaccaatcagcttaaatatatctaagctcaagaattagttttttctctgctactatcatactccctccgttttaggttataagatgttttgagtttggtcaaagtcaaactgctttaagtctaactaagtttatagacaaatatagtaatatttacattaccaaatcagttttattaaattaataattaaatatatttttattataaatttatcttgggtcaaaaatattactatttttttctataaactaggtcaaacttaaagctgtttgactttaactaaagttaaaacatcttataatctttagtaaagtacgtacatttgactctaaatgaaaaaaaaatccaaggtttaataattggacttaaatattattgcacaaaactaaacctataattcgccaagattgaagtaaaattcggtatagctcgctagctagtggcggattcataatttttcttgagcctaatgcaaatctaataaaagatataatctatatatatatacataaaaccataaaactaataacttcatagaccatttaccattttattgagccttgctttgcttgtttgttagctgatcatcgagctaaactccattagaacaaataagcaaggtaattaggtaaatatttgtgagtaattatgccgttgaatcaatgcgttgttgtgcatgtggaggaatgggccctgctccgccactgtcgctagctattacgattatcctgcatatttgcatatatattgtctcaatttggtcaaaaaagaggaaatacacaacgccggtttcgtgctcgaatgcttagcaaaagctaaccctaagccttattccttagtaagcaagtgaagaattttcttggcctttattatttggattccttttcttttcctgcatggcattggctgccttgtattctctattagctttgtctaaagctggtcatcgatcagctcggagctcaggactcaagacgtagtacctactactactagtaccttgcagcagatggcttttcacagagaataatgcttgatgcttttgttgttaagattgattaatatactgtcaaatatctgcttttgttgttaaattaattagtgtactactgtacgtatgcatagggaattatagttgtgtactgctggtttccttgccaagaacatataaaagttgaattaaggtgcccttttcttttggacacacatatagaagcagaacatcatgaatggttattgagaaaaaaaaaggttttctagaattatttactggtatgttggttatggggttgatgataagacatatataagatatgagagtagtatttttcaagttatttctagacgtcctagatgttttgtatatatatttgacaaagatgaatgcaattaaaatccaactaacatgaacgtttgccctccaaataagctatgatcatgatctactgaaaatagacaaaaaaaatatatatctagacctattatttttggaaatatatatatgcaggaacatctctaattgtatatgatttttctttataatgggcctaatatgcataagaacatgcattctaatatataattaagcattgtttagttagtatcacactattaacaataaaagaaaactatttgagctacatttacgcacgtgggtccttgcaaagtttatctccatgaacgactgtacttgaaagctaactcaactttaatcggtggtaacagtaacaagtagctttagaggtagcttgtatgtcacgtccatgtacatttggattctttgcaggacaattggaaaagatcaaatgtgctctaggaaggctcttgctttgtttcagctttgacttacagcaactgtaatgtttatatttactaagttaatagtaacatgggtcccattaatgctagtcattagttgttactgtggaaaatctaatttgttgtattacgatgttttctgatctattagatcgagtctctcatggggtatatataggagtacatagaagatagagacttggagtacaatacaagtaagagtagatttatctcttggattctatctttaggatatatcttatctatatatttgtatttgactcttatctctaactagcatgtctatacttctaacattccccctcagtcgtagcaggagccaagcgaacgattgcgattggatttgaaatcttctatccttcatcttgttcgactcaccattatcgattgcatctctgatggatagttctccacctggtgcctgcatccccttctgtgtcgtcccttgactcttctctattccctcttgcagtcataggggagtgtcatggacgatagcgatgacatgaacgctttgactagagtttccatcaatgatttttgttgtagatgttcattgatttagccgatcatatagtagccgtggttgtaggtgtagccgcatacagccgaaggcgaaatttttttttacgccattacgttgtgaagatggaactgcaattgttagcatcttgcaccttgtagatatcagaggatgccattggggacgtcttgcataagatgacgtcgttggagatgaagccaccactttggttggtccgtctgcaccgtgaagcagtcatcacaatagtgatgctgagttgatacaatcgttgtcgtcgtacatgacatgatcaatgctgttgccgctgacgcggtcgttgtcgtcgta

SEQ ID NO: 23735 - DNA, 17971 bp, Oryza sativa
  unsure (1)..(17971): unsure at all n locations
taaaatttgtgaataatattactaacatttcgtcggatgaagaaataacaaaagtaaaagttttagatcttgatgagttattcaactttgttgttgatgactttttcaattgaaatcatttagtatttgaaaatattgtttgaatttgttatattttcaaattcaaattcaaaatgttcaaaaaaaaatgttatatagaaaaatgaccaaactaaaagttgtaaatcttgataagttatacaactttattgttgacattttttccatttgaaatcatttactacccgtaaaattattttaactcataaaataaattattatactgcacttaattattttgctatagttcaacttacaaatataaacatttcatatgaaaaataaaaaaatagtcatcggtgacgggctttagttaatgctcgatagagattaagtatatagcccgtcactgatgagtcatctgtgacaggcctagttgctatctcaaacgagcctcaagttggtgcacgtcacggataatggtcatctgtgacgggtcacaacttgaggcccatttaagatatggaatgttatctcaatcgggcctaaagttggcgtccgtcacagatgatggtcatctgtgacggccacatctttaggcccgtttgagatatggaatgttatcttaatcgggcctaaactacggcccgtcactgatagttgtcatccgtgacgggcttaagttttatgcccatctaatatgtctgtgcgaccatatctcaatcgggcattttttggcccgattgagatgacttccttgtgacggcccgctatttctaggcatattagagcccgtcacagatagaaggatctgtactagtgacgttatgtggaatttatttttcctttatatcaatgataaatagttgattctgctctctgtattcgcagtcgagatattttacatggtattgtattcatatctgtttgatatctgtgtccaactttcaatccgaaaaaaagggtagtttaattaggagatgaaaaggattgatatctagttgaatccaagccaaatattgcaccaatactttcataagttattcttactaagctcacattttatcatatagtatgtaacttcttgtcatgggaaaaatggttaatttcacatatataagaaattattcagttagctgcctggttgagcttatccataaccttgcactttgctaatgatttggcaataaaataacttggtaacctttgctctttatgcaagtatattctggtgcattttgctttctgtcttgcttttccctatttgagactaaattacttccacaccatgatccggccagagaggtggctttggttttgggcctgctttttcatcctactccaagtttggtgacatttgagaaatattactctagattattaagtagattcatcatcatgcatacgttgatgaatggagaattttatatcatgatgcattattgaggaaacaaaagctacttagattcagcaaggcgacacacattttgcacacgaattcctcaggttgtnggcaccaaatttttttttnggnnntnttaaaaaaaatttttgtattgcttccaactttaaaaagatcatatcccgttgtgctctctccactagtgaaaagaggaagaggaaaaggctgccatctttaattcatgtacttacatatacaattagatgccccttttctttgagaagggacaaagatttctgaatttgtgatacatttgtgtggaaattgcatgcaagcccttaatttatccatgatcaatcttaactaacacatgtgtttggtgtcgtatactagagagtgaacattgcagctcaagttgaagctaccgaattgtactattgttcatattttcggaacggttttggcacatggaattcattatctagatacaaaatatttgaaaccaagaactgggccgttgcagatgtcatgcgtgtgtaccaccaacacaaaacaaaacaaaacaaaacaagaagtaatcaacgaggttaaacacaccaatcttaattcatcttttagtgattgatatgtactctagtgccacaaccaatatccgttataaattttatggagtctggacgaaaccaattataaccgactatatagcattataactatttctatccacgtgccaacgaaccccgtgcaaaaccatgtgccaacgaggccctggctctaccagtgatcagactgttaacgtagaatcacgctgccacaccttgaacacattatgtgcaacctgggacaatatccaaagacgtaccgccatagggagtgggtagatctcaccgaatgaacactcgggagggaccctattagggtgaacgcaccggtttattctagactcggcaggccagctaagacgtcctttaacgtagtagaaacgatggacgacgagaaatttgagggaggataatagactttgggataggtataaaaaatgaggaagatgtagaatatagagggtttaggtaataaattgattttgagtattgatttgttgttgtttcaatcggccttagcccccttatatttataggaggggtggacttacttctcaggatcttttaatttccacgtccaattagatgaagaaaccaattggaaccctaaaatctgaggtcttagcaaggaaacctgagaaccgacaggctcgaactccgtcggtttgaccggtcccttgccactggtcagactagcccgatggctgcagtcagacatgcctcgcgtggtaagtctgggcctttaacacatacaacctacattcacacatacattgcttataataattctcgaacaaactgtgaaaaatgatacactattttgtcacgttattttttgcctgcaaaatagtctgcagcccaggaagaagagatctaaacattagtagagagaaaaaaaaaaaacttttagatggtgagtgattgatggatagcccaggagtgatcggtcgactaaccttctctactagtcttttagttaccttttctcagctgagtcagctgggatagtatggctaagcccaaatatgtccttatgtcgagttgatcgattgatcaatataagtttatcagtattaaaagtgtaaatatgtttgggataattaagataccacacgtacaaaagagcacatccgtaccatgcaatgtcactgatcgggcagagtacgaagaaaatggtccatttgatcagtgcttgtcagcttacgatggatggtgcatgcatttgaatatgggtgacacttggctgttgatcttgtgattggaccattgttatcctgcacttttagtactatttagtttttttttcttctcacttaccttattgtattttctgtggaattcagatataaatatgttctcaaatattttatagaagtacttgacatggcatattttaattttgaaaggtaaattctgtcaatttcaaaaagttgagcggtggctttcttctttgcatgggggtgagatggagtcgcagaagccgctggtatgtctctgcgtgtcaacgatctacagtatggcgaggcggtccgtctggtaaattggagacagggggagatggggaggcagcaactcctacgccatcggttcgggtgcctcgccactagccacctcccacctaattgggtccagccaccaccatcgctgttgtgctaggaaaaccacttatgtcatctgatgccggggaggtcgagttcatattatcgcagatctgaggctgtggctatcaatgctaggatcaccaacatcggtgggcgccacacgccttcctagaggagatattgttgacgcccccggcctctcaccccttcattccttcggggtttactctctgcgtgaaaattttgttccggatatccggaatagtgatgaaataaaatagttctggatatccagagtagcaatggtaacactacagctatcttgaccttctttaaagagtcgtattggaggttccctgcttgttgggcgtccttggcatcggatcggctttgatggctatgacagtggcaagatctgggatatgacttatttacaactcaattactctccaatcttatcttccgctttagtttgacattcatcgtccatggtgacatgtgaataattcgatcgacataatgattgaccattgatttcagagatactattttattttggtatggagaagacatggattacatataatttgtaagttgttaaaaaatattggttatgtagattttcactaatcatataaagaaataatatgtctttaaggtggtgttataagtagttttattatttttaatcaatatatgattttataattcacaatagtttgccatacaacttctataataattggttgtgacttccttgaagtaaagtctaaagtgaatttcatcattaaaaaattccgtagattttagctaataatgacgagtccaattacaaaggcctttttaattaaaatgcaccgctgtaatatcaacataacggaagtagcatagtatatcactgcataacaaacatggcttacattatatatgcataaatgcaactttcatccgtcgtctataacaaaaaattgaccaaatatcatcaaacgtcaaaattcaaaaacttggttgaattgttggcaaatgtaagggccccttagaatcgaagggttgaaaaaagaatagaaaaaacacatgattctgatatgaattgaagtgtaaaacagaggattgcaagacacaggaaaaacacaggaatagtcgtttgattggagcgtaggaaaaacgtaggaatcggatgagagagatagactcagagggaattttccaagaggttagagctcttactatatttcctccaaaatccacatacaatgtgccattccataggaatttcatatataggatttggaaaacttcaatcctttaaatcaaatggccaagtagaaaaatttcctatagaatttgaatcctatgaaatttttagataaatcctttgattcaaaggggcccttaaatgtgtagtagaatcgcttgtatagttgggacctggatggttggatcggggaggattggatcacccgtggcagaggaagaagctagctactcctatagctatgcacaaggataaggacaagatgagagaggctggtagttagaaaggggctggatgaagaggagaggaggggcactacggttttgattggtagggcgcgccaagaaagcaacaaaggtgaccaatatgaggagctttatgtaaaaaagaggaaaaataaagggtaacaatcaatggatggatggatggatggatagagtttggacagcaaattttttttattaatcccccttaatgtgttgcaggttttagtttcaactggatggacacagtgtgtgtggtgtttgttactcctgtacggagactcagctagcttaccagctacggccaaaattttaaatttaaaacttaatcctagagttgattttaatttttttttattttttacactagttttttaagtttatatatatataacttttgcttataaattattttttcgctaatatgtattgcgggttataatcagctatacttaaagcgatgaggcatggcctttttcttgtagttgacttcgggctttggctattgatcaagagctagtacacacatcgttttaaacagtactaataagtattttgattaacaaatctgtcatatgcactagattttcatccaatatcgtccatgccctgtatgcaggaggcaaagtacctaatagctgggacaaggaaatttcttgttaagaaaattcacagaagccaaaacggtattagtcacctattagccaatagggcgagaactaattccctttctggttttttggttagaaggaagttgtaatttcatctcacagctagcttgtgaggatattttgagtgagtagcatattcctttcttcctcgaaaaaaaaaacatatcctccatgccccgaagtttttgttgtggttgtttaattagttgacaattgaccattagttctcgacctctcgtgaaataatggtacactgaccttggctcattcttactaagtaagaagactccccagcgcaatcaaaacaattcaggaaaatatttttactggaggggtaaccctaatacgcagctgaccgcgtccggtcatgggcatgcggtcggcctccccttacgtatacatagtatatacacaaaagcattatatataaagtttatacgtataccgataaacgttatatttatatatataggtaataatttataactaatataaatatttggatttttccggtcgtcacaccggtttttcgtcccgcttcgtcgcccccccctcccccaaaatcccaatccgaatccaatcaaaccccggaaaaaaaaaatcaaaatcacaacggagttcaatcgcacaaatcatgatgcatgtacacacatatatccaaataaaaacaaaaaattagatcgaagggggtcgccgccgccgccgccgtcgccgccgccgccgccgtcaccgtcgccgccgccgtcgccgtcgccgtcgttgccgaaccgccgccgtcgccgtcgctgtggatccggtggaggggagagcgccgccgccgctgcctcccctcccgatagatccgccggcagcggcggcggagggcactctccggtggtgggggagagtgccgccgccaccgtcggtggtgggggaggactccaccgccgccgccgctcggggaggaggggcgccgtcgccgccgctcgcggggcgcctccccacccgctagatccgccgccggtggtaggggagggtgctgccgccgccgctcgcggggtgcctcccctcccgctagatccgccgccggtggtgggggaggatgccgccgacgccgccgtgggtggtgcgggtgccgccgccgccgccatcggtggtgggggaggggcggcgtcgtcgccgccgccgctcgggggcgcggaggagagggcggcgaagtgagatgggagggagggaaatgggctagggttccgcggctgagagggagtgggttttgtttccccactatcgacgctcggccgtccgatcaaaaccctagagatcggacggccggtgtcgtccgggccgaaatcggcccaagagggatcgagagtgaggcctcttttccggcccaagcccaggttgcggcctgggggaggaaaagtgcgcccacgcatgcgcaaaaggccgtgggccgaccggcatgggtcggaaataagtctatttttggtccctcgagccgaaaaaaagagaataagtacatttttagtgctcattttttcagaagcattacaattatagttatattgaatatgtttatttcgaagcaaacctataagaaagtattttctttctttttccaattaaataattgttaaatgatgtttgtattaataaaattagaaattaagctctgaaaattccaataaaattccaaagagcgtaactaattatggagaatttaataaaattaaatttaaccatgtcattttatttaaccatggagaatggagaattttacttgtaaattcatttaattatacacatacctacttaaaaataccaaatatttcagcgaatttgtattttaattaattgcatatttttctgatctgtaaacttcccggtgcaacgcacgggcacttttgctaaaccaaacaacacttttggtcaatatacacactctgtaatcacccggtgcaacgcacgggcacttttgctagtaattatatatttatacatataaactctatctatatgtatatataaacttagcgtttatatatttttacaaattttatatttatatgcatacttacacaatttgtgcgtaaaaaaagtttatacatacatataattgttgctttgtacgtataaactttgtacatactccctccatctatttttggtagtcatatttccaaatctgaaaattttatttttgataggcatatttcaatccaacaacctatcctcttaatgattttctcgaatttaatgcgtgactttccgttcttccacacatgattggctacatgggcattgagaaatgtaaatattaattaattgcttgtttacgaggaatgactagtagcatgtttaaatggatgataagtagaattacttatccttggtctatgtgtcaagataaaatatgactatcaaaagtagatggagggagtattacataaaaaacagttgtacggacgcgatcaaccgcatgcatggctaattgcccattagcattcttgtgttggatttgagactcaagaatccattgatttttttatttttacattttttattaaaatatttacataaatatttttttgtttcgaaaatttgcaaatctaatcgcctctcgccctttgggagggcgtttttttaaaaatcgtccttccagaaggcgttaagggacctaaatgcaaattttttatttgtgttcaaaccctttccactagttttaattgcttaaaaactaataatgcttattcgacactccaaatgattttaaatggaaaaataataaactacaaagttgtagatctcatcgagatctacaacttttatataaagtttatctccattcgatgtcgtttgaaatgtagatttgagatttttttaaataggttttatattttgtaacgaatatttggatactaaaagatcttaaatgaaaaagttgtttactacaaagttgtagatctactctagctctacaatttcgatataaagttttgtttcatctgactttatatggtataattttaaattataatatcatagagccaataagctatactgggaaatttgcatctaggtcccttaacgccctctggaagggcgatttttaaaaaacgcactcccataaggcgagaggcgactggatttgtaaattttcgaaacaagtttttttttaaaatattataataaaaaatgtaaaaataaaaaaatttgaatccattgatccataccggatgaaaaataggtggaaaaagtcgacgggtatagaatccctcaactattaaaactaactttgtttacctccccaagtagttttaactatggttctgtctaacatggcggcctacgcgtcaacaaaagttaagaaatttaaaaaaaatgttgccgccctcacaagttagtgagacaatttttccttcctttccctacctgtccctttctcctctcttctctatctgccctactcgggagcctactatgtgctatccccgccggcagggtcgacctcggctccccctcattgatagagggcttgagcttgagcttgacaaggtggtggccgccgcagctgcctgcctctacggtgtcgacgagaatcaaagagctggagaggaggaccgctcaagcgcaggaccactgcagtccatcctcttcgtgctctcacccctttacctccgcggagaggaggccaaggctaaggcatgcggagatgtatctgccgccaccgccaacctctttctcgcttcctccttgttattgttgcaagaggcaaggacgggcggatcgaaggctgcccgcgcaagccgatcccacctcctcccaacatcctctcgccatcactcctagcatcctagtcttcgtcgttgtctcaccgtcctccggtcgtgcattgtttttggtccctccaccgcctcaccacaatgtgaccacaggacttcgaaagctcctcgacagccgcccatcaccgctgccatcttaccatagatgggatggcgagctcaaactcggtggcttcctcgccttccaaccctctccctcgcctccatcctatcctcttccactaacgttggtcgatgccttccatcatcacagctaacacctcatcgggaaaaatagcctcccgctcgagcaccatcttcacagtctcacggtctccgattgattctggtcttgggtggactcaactgagccccgccccatcgccgccatcgtccaccgctaatcgccgccctacactgctttgtcggcctctatcaacttaacacgcatggagaagaagcagagaccggggagagagaaaagggtagatagagagggtaaaggggagaaaggggtgactgaaatgtgggccattatatttttattttttttactaacacgtgggtcccattaattttttatttttatttcagtgccacgtcaacgccacatgagataaagaccaagtcattccatcaagtgagcaccacgtaggatgaaaccatcaaaacccactgacagactctatttggttcagttttcgaagatgatcaaaagtttagggaggtacagtagacttattccaaaataggtaagattcatattgggccgttccatgtgcgtaacattccaacgcattaagttcatcggaggtcccttaaattatcaacgaatttgattttcgtccttcaactagaaaactagatataattggtccttcaactatcaaaaccggtgcaatataggttccatggcggtttggacggcggtttcggctgatgtgacgcctacgtggctaatttgactcggtcttcatctgatgtggcattcacgtggcacacgaagaaaaaattaataatttaaaaaatgttccattgagaattaatctgatcatctaaacaaaagtctagatagcaaccaatcctcgtttcaggctatggtaacccacacgctcgtctgatcaatgatgttgatgaagcatgcaatcatcctggtgatgtcagtggcgacgttgcaaaggcgtttgacagcgctgttgcacgcgacgagcatctccggcagccgcgcatcgcatgcatggtcgcaccccttcttgcacagttgcacagctccgcctccgtcgtgcccggtgctgaccagcagcgtcgtcgcctcgtcgaactcgcgggtgtccagcagcgccaccaccgcgttgcagatggggcaggtacgccgttgcgtactttctgcttcgctagcagcaccaccgcgcgtgtccgctgctgccctcgcgcggtaaatggcagcgacgacagcgactccggtcctcgacggccctgcaagtcgatctccgcgatgctagccggcgcgcatgacgacgttggcggcgaggcagccgcctcggccgcgaagcaggaggcgaagggcaatggagacggagacggagaggctgctcctctgctccgccgaccgcagctccgctctgactactccacccaccgcccaccgcccggcggaagaagcagagggagaagtcgccatcccagaaaggcggaatccaccagcccaagcatcagcggcggcgaccggggatcgaggagcgggccgtggaggcagctgaagcggtggaggaaggtggcgtcgcgggcggtgcagaggaagagcctgcctgcaggcgagagaggcgcggacgaggtctgcagcggtggggagcataggaggaagacctcccggaggaggtcgttggtcagcgcggcgacggcgacggctgacatgcctttcccgtcctcgctgcctacgcctttgcgccggtcgcatccggggaagaggatgggaggaccggaagagggggaaggagaaggggaggagacaaagaagaggggatgagatggaggaagtggggcattgacatcgtgggtttcactattttttaatcttattatttgactgatatgttgatccatatattttgttttattattttttaaattgttaaattttgcttcgagtgccacgtcagatgaagaccgagttaaattagctatgtaggcaacatgtcaattgaaaccaccgtccaaaccgtcttgggacctatgttatatcggtttttgatagttgagagacacgttgtatctagttttctagttgaaagacgaaaatcggatttgttgacaagttaagtcacctcaagtaaacttaggccctgtttgattcagcttaaaattattataatctaaattattagaaataagctgaaacaaacagataacttattatgatagattattataatctataagtcagattactataatctagtaatccactctaaatgtgcttattttagattattgggtggctaacaactaacaaacaacttataatctagagaaacaaacagctcacagcttattctacatcggcttattataattcagtttacagtaatctggctcaattatctatattacaataaagctaaaataaacagggccttattcctattccaaccccccggcgtgatcatcccaacaatcctgcaaggcctttgcaatcctagctagcagcatgcatcctcaattgaaacgagaacgaaactcatgactggaaaaaaaaaagggctaacagtcacaaattctatatacttataaagttatcctcaccaatagttttatcttctatcgtgaagccatatcattccaattacttttaggcattatttatctattatgcaaattacctatatcttctcgtaaagctatgcacatgtatatcataattatctacagctgttttctatcataatcatctcgaattatttttagcatttggatatgatctattttattttttctcttataaaactacatcatctattttctagtagtagaggataactttaaattatttttagcatttagattattgatctattatctattttttgcttatgaagctacattatttacattttgtaattggaggttcttttattgtgtaaagcatgtgaagacaaattttctagtatcaaattggaggttcatacaatttttccgcaatattgtatagggtttcatgtagttaatattacaaaagtgcgtgtgtggcctgagtgcagcaaattaacattactattacagtggattattggcatgaggatttactgtttagagtggattatttgcacgaggattacagtttttaatttgctacaattttttatcacgatgtcttcttgatgtaatattgtaatatggtacatatacatctatatatattcacttagaaattgcatcaaacaggcctgggtcagccaggcccattttgcatgcatggccatagcatccatgcaaatagggccagaaaagtgcatttttactccctcaactataacctaaatatgatttatatctctcaaccacatatctggattataaaacctccccttcattaaaactggcacattttgacttctttagcagtttcatcatgcatggcgctcatgtaccacattgacccgattttcatcctacgtggagtctatgtgatgctcaagtgacattatagttaactagtgttgtatctaggatttttatatgggtgatccattacatatatatatttttaaattcctaaatgtaacaaagttaaaagtataaatgaatcaaaagtgtatcataatatattaaaaagtggagattcaaacacacccaacatgcatgtctggtgtagactttgatcatgtcgatggagcatggtttatccgcacatgtatcaaatcgagccgagagtatcgtccttatctactccagcccggtgctcgcgtccttatccctcccatctctcgtgtctctctccctcctctctctctatctcttgcgcgtctctcgtccgacgctcgctctctctctctctctctctctcttgcgtctctctgccttccatctctcgcgtctctttccctcccctctctctctcgtggcctggcggcggcagtggctgtgacctcccctacagcagatccggcgggaggggaggaggcaggctctcgtggctggcggctgcctggcagaggcggcagcgtcggaggcgggtgcaccctcgcctccgccagatccggtgggtgcggaggcggcgggctcccctcggcgcgcgcggccatggcggcagttctcctctccaacactcgccttgtctccctctcctctgtgccccaccgatggctctcctcctctctgccacggtggggcgcggcctcctcttgtcgttggccaccgtgacggtaggccctttttttatttggaaccttaaaggtgccagttcctaaaccggcacatttaaggataccacaaatgtgccgactaataggtgctggttgggggtttcctatgggggttctcaaatagcacctgtagctatttctatagtagtgttttaatccgatgtccagtgttatcattgcctaatacgcttataatttttttttgaataatatgtggaggtacgtctctctctcttcaaaacttcttttttactagaaaaggactagatgctgattacttggtttggacattagtctccggaaggcatatggaattgaattgaagccacgcgcgggcggatctggtcggcctgttgcgaaacaaagtcgagctctaagctccaacgtcgccgtcctcctcgtcattatcgtccaggatcatcattacgctgctaaagttttctgcactcttagagcaagtttatatatcttagtagaattggttgatgactctaattttatccgcgttatttacttattaatttggagaaaacatataccatatattaataataatacgttggcaatttcaaaaataatttaattttatttatttacgaggggaataattggcgccgatttgactggtcaagcaaacttattgatgttaatttcctctccaacatatagagtggcttgaatccaaacgagattggattgatcaacgggtcgtcattgccggaggagaggaggggaagaaaacatgtggttaattaccgacatcgacgggtaaggcgaaggaagggatgactgagatagggaaggaaaaccggtggtcgctagcgttgattggtgagagagaggaaagggattcgaattcagtgacattgttatggcatggcacggtgtgacattggagcgatctggagcgttgaaatctaatcgaacggtctgctgcgccggcccacctgcagcctccgttttcatcccacgctttctgtttcctgccgcccaatgcccaaatctcgcggctctccccaatcccgcgcgtgcgctctagtcccgccgccctgcgcgcgcccgatcccgcaccaaagcagggctgctggcggagttccaatcccgcggaggttccaatcacggtgttcactttgacaccgctgacattagcctgattgtaagcagctacaaactggcaactcctgtcctggatttccctacagttcaagctaaacctgaaaatgattttgtctcagaaagttcagttcagtcacttcaagcaattgcatagcccaattttcacatggtttagaaatgccatattgccatggatacaagataagtaaggtatatttctcatttcacacaatcaagacacaatgtacaaaaaagagatgaattatttggaatacaaattcagatatttgtttggtactgtgttgatcagtattttcaacatttcagcaggtatgccataccactttcctaagcaaaccatcaacagtttggatcaaattatagtgtgagaagtaaaaacaaaatgacaaaactaagaactctgacactggcatcgacaaaaactgcttcatacgtgcctaccaggcggtgatggtgcccaagttcggctacatccgcaaggccgtcgcggcggcgcgcggtggcatcaccaccaccgtcgagtttgacctcttcacgctgcccggtggcgtcgatgccttcgacaaggccgcgcgctactgctaccgtgccaacttccagctatcagtgcgcaacgcggccgcgcttctctgcgcctctgccttcctcgacatgcagccgccgttggcccggtggccggacgcctccacgcgcccccggtcgtggcggcagggcagggtgccctggttgcggcggcacagcagggcctcggccccggcctcgcgcggcgagggaggcgaagcagcgaggcagccgcccggtcccctccccactcgtggctgcctggcacctctccggcctggcgtggcggcggcggctcccagctagctccggcctggcgcggcggcggcggcctagcgcgggcgaggaaggcgaagcggcgaggcggcgatgcgaccacgggggatttgggcgtcgggcggcaggaaacggagagcgtgggctgaaaacggaggctgcaggtgggccggcgcagcggaccgttcgattagatttcaacgctccagatcgctccaatgtcacaccgtgccatgccataacaatgtcactgaatccgaatccagaggaaagaggggagggaaaccagaggtcgctgggcgtcgatgttgcgcgagagagaagagagagtgaggaaaagcagtactcgggatttgggagaaaacaatttagtgcttgcaaccatttgcaagaaagtagaagaatacccttgcatcttagtactcaatataatcatggcatcagttgaatcaactatgatggatggctctgatttctttcttatctctcaaggatgataaaaatcataaattactaacaatcagaatgcacatacatatacggcaacctatgcacacaagctttcatatgtacacatgtgcacaccaactaacaattatcaccaaaaaaaaatctagaaaaattcatacatgtactttcaatagtattatacctagtggtaaaatcttcacgtcaaattcattatattttagccataacaaaaaaaaaatctgacagttttaaggttgtaagttctgtcagaattttgtcttttttattactctgtataatgaatttgaagatgcgactttacacgtaaatgtaatactattggaagtatatgtatgaatttttctacaatttttttgtcataatttttagttggtgtacacaatgtgtacacgcgaaggcctgtgtgcataggatacgctctctacatatacaggagtatgtctatactagctgaatgcacgtgctttgctacgggtaaaaaaactaaaaactatatgtgggtggaatgagaactagggtatctcattcccccgatgaatcaataactaacacacaattaagataaatggcgtgcttaaaccatccataaaaatatatgggagacttaggttaaggtagttagggatccaccccatatgtgggtcccgggcttcaccctaggtaatttagcatccacgtatcttaattaaataaggaaagggctgggtagaccaggacccggactgttccgggcccggacatgcccttatttccactgaaaacaccgctcggagagtagtgacatacaaaacctatgtattaagatgttaagtgaaggggattcggatgtctagtctggggtccccaagtctgtgtaagttggaacagatccccctgagataagtgaagcttacacgaaatatatcttagtaataataggaagagatagatttagggtcggcttgtttaaggaccccaggcccacttctgtcgatatgtgaaccactgctaaagagcagtattgaaacatatagaatctttaatgactcaaaactctgagcacgaggaatcgcaacttccttatgtctacattagcagaggatggcctcggacccagccctgtccttggtcccgggcttacctctgtccttgtaaatcctacgatccttagtgagagaagcgtagagacctataagatctacatcttaagaatgtaaatagaggtcggcttcggacccacccctgtcctgggtcccaggctcactctatccttgtacgtcctacgatcttcagcgagaggagtgtagaaacacatacaagatacacagcttggggaataagcaaagaccgaccttgggcccagccctatcccgggtcccatgctcatctctgcctacatcggaattctggagtcctttgtgagaggagcgtggagacatgttatatgtatattcatcaaagacatcttcgag

SEQ ID NO: 23736 - DNA, 13131 bp, Oryza sativa
aaccgggactaaagaggagataacagcagtccagatgccccctttcttctttttttcttttttattttcttccgaatcaagtgggatgcatatccccaaattaaaccccaaatcccaaatcaaggtaacatcccaaatccacatcacaaatctttaaagttacttatacacacaaatcaaatacatcacaaatcctaaaaaaaattgcacacaaatcaaattacatcacaagttctacaaaattaatcgcaaatacatcacacacaaatcaatacatcacaggatcatgcaataaatcacaaattctaaaataaaaatcacagaggcgccagccggccgctgccgcctcctctccgcgcccgccggccaccgccgcgctagcccactgctgcgccgctgcccgccgcctccgcactgccctccgccccgccgcgctggccctccgcgccggcccgctctcgctctcagcgctctcgcttgatctatccaaaaagaaaagagataaggcaggaaagagggagggagttagagaggaaaaaaagagatagagagagtttgttgtgtggacgagagaagaggataagtaatagggattatatagtacgtgttagatttttattcccggaattagtaacaccaaccgggactaaagttatatctttagtcccggttggtgttacaaaccgggaataaagatcctaggcgcctgacacggtctgatagggaaccatctttagtcccggttagtaacaccaaccgggaataaagattatctagccctgttattcttataaaccgggactaaaaatcgtttttagtcccggtttttaatagaacccagactattgtggatttgggtcgacagaccaaagatggtttctccaccagtgtataccatatgtttttgggctagtcaatctatgatacgatattatcggtctaatgatcttattaacgggttgcactagttcttacctctccattcatagggtggaagtcccggaggaattagtgtcattatttattaatgtaagcatggtgcttggattaattaaatgtcgtttggatgcgggtgttcctcacggaaagtgagataggcagcaggtggtgacaacccctatttgttctctatattcctccacgttcgggtatgatgtaagagttcataaaatgctatagccacactggcagaccaacagggagtggcctcctggtagattctggttgcctataattaactatgtcctagccatgtgtatgtatatggttgttgtatcgactaagcatgattagtatatagaagtacatttgaaaccatagctatttctttagttctttctccactagctagctaatacattgggatgattattttgtgtgtcacattacccaaatactatcattatcatttacccatgtttggactatggtatattgattatagtatatggttatgaatatatcaacctactctttacaccaccgtgtttcctgtggaaaaacaaataacgatacccatggaatactcctaaatgaaatgctacagcggtattcgtgcgcttgtggatttatctctgaccgtatcaaataccaacacatgggtgggcaaggaactggtcgaaccaatgctcaagatattcaaatccatgtcagttaggaagggcctcaacctcaatcctaagtggatccattatagggttaaggctagggattactgtcgaagaaacgggaagcaaagtccaatctccgactgctcgaggcatatctatcgcttgccctcgtgcacggccccccattgggctgagcttggggcacatttgccctagaattgaggacacatccacctttgggcatgccacccgtgggctatggtcgaggcatgctcgcctctgggtgcggccctccatgggctgtgctctgggctctatccctgagctcgttccccgtggctcggggtagcagtaacgcattgatccaatcaaacttcacattcaattcaaggcgacatatatcaacccgacatacgtaattaataaaacaatgcacgcggttcatagtttagatctgactagtgaaataacagcccgtacaaaacgtattccatacgtggagactacagatatccatttgcgtaaatatatttttttggggtggttcttggtacctgcaaacgtccacgattttcataggcccttgttttgcatgcggagtggaaaatgccagtgaaaacagcttattcatcgcctggatagtagtgaatgtttccacgggcggatgcctttagtaatagcccattcaaaacatatttcaatagacggagaaaggatatccgtctgcgtaaaatatattttctagggtggttaatttatgatgcacctgtaaaaatccatgattttctgcagacgtttggttacaggtggagcagagaaaatgcccatataaacaggtaatgcgtcacccagacaaaatggtagtgtaaaaagggttggaccttagcttgcttggaagtagtggttaaattggtataacactactcctagtaaaacaaatacgactcgttgaaaaggttaactcatcacacgtattatggttgaaatacatgcactacatattgaagcaagtgagtctatctaggtactcaaatcactaagttctactctctccgtttctaaatatttgacgccgttgacttttctaaacatgtttgaccgtttgttttattaaaaaaatttaagtaattattaattcttttccggaaatgaatcaaatgataggatccaataaaataaacgtcaaacatgtttaaaaaagtcaacggcgtcgaatatttaggggcggagggagtataaaaaaagtactaaaatttctacagcttctctatattaaacaattgaccactcggatctctaataatgtgtccggtatattatagttgggccttggagatggccctcattcagtttagacttttctctcctatccaactcagatttttgaacaaatacggtgtacctgtcgtcgtcgctgaaggcaactcaacaacggtatatcagcttatagcttaattagcaaattaagtactaaacactctatatagtcagttcccagtttgaccatctgctagtgtggcttaactgcatgcatgcgttcgccatacatttatcgtccttaatctgatcagctatcaacttaattaagaccctgtttgtttcagcttaggattattataatctagattattataatctataaaccagattactataatctagtaatccactttaaaggtgatttttttagattattagatagctaacaccaaacaaccagctaataatccagagaaacaaacagctaacaacttattattttactgtaatctaaattacaatagtcttaagctaaaataaatagggcctaaatagcccataaccttaaagaatcccatgcgtaccgctctaattccctattgtgtttttcttctgtaaaatgatttttactgatactcctttatatttttacgaatggactgaaaagagattcgcctgcaaaaatatactggtgatgttcagtctataaatatcgatttttacgaacggtggtttctctctcctctacctcaggtctccgcaccggccgccctcctccgctcctttccttttttttaatcttttcagctcccccacccctaccatttatttcctctttcccactcctctcccctagtcccactttccctctcctctctctcccactctctaccagaatcctcgcctctcatgggtagcggcgtgggtttgagtgtagtggcctccgattgggtgaatacaccgcctgcatgcatgggagcggtggatctgtagccagggaggtcattgatggtgagagtagtggcctcaggcttcatgcggtggcagtggcgggtttcgtgtagcggcggtgacaacggcaaagcagtggatccgccacctgcgacaacgacctcgatcacgatgagggctacaatgatgaccgtgacctgccagttgctagctgtgatgacggtggcgcccgatagcaatggaatgccacggcaacaacgacggtggcttcacaaggaaggtggctagggtttctggatttgcttttattttttaatgttttggggaaaaatcatcgtaattaggtgccttggccgtttgtaaaaatgggttttcatgtacagttatgatgctcacatgtaaaaataccaatttttatagatatttggagccatgtggatgctctacccatctaaaaaatgtgtttaggctgtaaaaaattagaagtgtcataagtacaagtatttgtatataagcttgtattacttaataatcggtagcactcctgattactatagtgctgccatagttagtaatacaagtgcctgtacagaaggaagaaggaagctagggaaaaaaaaaacacaccagagaatcagaacatgaccaaacgtgcataatttcttcttaattggtacggacatcatgatcacatcaaccagcaaattaagtacaggtgttgccatcaggtgaatcatgaatgcgaaatcagcgtgatttttgtaccaaagtgctagtcatctaaattccacggagaaatcagtgtttttctgttacccaaagtctgaaaaccaagccgatattttggatgggaatatttgtgctagttagctactcaaagaacaagcttgcaagtaattacgccgtgtttagtggattttccaaaagggaattgattaaaatggaccttcagtcgttcaggcaatcgtttctattcgtctagcgggtcaagatgttgacattacagcatttattcagaattaacttcagatcggaagatgttaagttcagggtaacatggagaaaaagtttgtaaactacttgagcaagtaatagtgttaattttggtacatgatgcatccgacctttatcttcgagaattccatggagtactgtccttgccttgtttttccattggtttatatagtagggtttgttaattgtgatgacctaaaacagtggtctctactcgtagtaaatcaatcactacttctcaagcttgcaaatttcttgtcagctgattgttccatatgggcctacaaggttgaacaaagaaaaactgctgcagctaactatgcacctatgcttactgttcctcgttgcatttccttctcactgcttactattcctcattgcacttccaaggtctgtaatattaactgagaagatctggatcctcccggtgacttgaacaatactactactagaataggtatggcacatctgaaaatttgaaaaactaaaaaatagaaaaactagaaaaatataataaaatataaaaaattcggattgtggtcaaaaggaaaaaaaggaccaagactttttttaaggcttcagagcatgtataaataaaaataaataaatacataacataactaaaactattttaaaaacactagaacggataccctcatctcaatcgggtggtaagccccatctcaatcgggcacagcgttcgtcacaggctagaagtcactaatgtgaagagttatctcaatcgggcaaacggccgtcacggatgaatctatctcaatcaggccctaagtaaagcccgtcaccaatagttttgacccagacgaccagtcaaactatagcccgtcacagatgacctatctcaatcgggccacaactagagcccgtcacagatgactgttaacctcaatcgggcctaaactagagcccgtcacagatgactgctgacctcaatcgggcctaaacaagagcccgtcacagatgactgctgacctcaatcgagcctaaactagagcccgtcacagatgaccgtcatctcaatcgggcatttagttatggcccgtcacagatgactagaatccacaaaaaaaatattttttgttttttggctagcctcaggcctttgctagccatgcccgctgcaaaaatgatagaaacaaacacagatatccaatatccccagctccccagcatcacccattcatatacatatgcattcacatacacagacatcaacatatttcacacaactacacattcacagccatctcatatttcacatccattcacatccattcaaatatttatcatatttcacctggaaaaccaagttaattggatcaaatatttatttagaaagtcttaacataaacatatgaaatatatacataaatataagcatcacagttacatcatcacagtttcataataagtgttcatcattgcctagacataaaagttcaacattgttcatcattttagtttaagtctaaacattcctttgggattaattatttcgcggaggataaagctggctatctcctcgcgaacctcctcaaagctggtaggcagagacttggttattgtgccctacattgtcataattctagattagttgatcgatcatatataagtactaaaatgtagttagtctatcacaattgagaccaccgacctcaaactcagccaaagtcttcaccttttctctgtacagaaggcgcatgttgtggcacacatggaatccgcactggtcacctatttgttgcttcaccgggaagtcttttttgtggatgagggtgtcatgtcctgtcttcctgaggcctcctctttgcacgtattgggcccaagcttcatctatcgctagttgaattggggtccaatcatatgcgttcttatcaattctggagttcaggtagtgacatgtactccacttaggtgttatgaccagaaggatccaatgggcactgcggtattaatatagtgaaagttaattaagtactgaaggaatgtgtcatgctgttgtgtatatttagataacacacttactattgattataggcgcacataatgtactccttgtctcggcgggaccacaaggtgtcgtagatgtagttgaccattccttgacggacattctggagatttgtgacagtgaccacttgtggatcaaggaaggcaacttccggtgcattcttctgacaccattgacaacttaacctacacacaggataaacaatcttgtaaacgagttaaaccgattgttattaccagattgagttgggcgataatacttacaaggagtagcacttaaggaggcttgtgtccaccgctcggagcctgtagaggtcgaaaagatccttgaagtcgaccacgatataatttgttggaccaagaaatggctttccatcgtgctctccaaggatatcggtagctttattcggcttcctggcgttagatttctccatgtagtataagtgaaggtccttgcaagcggtgcccattgcggcaagcacgtcatctccaaccaatggcatgcctagttggaactcctgtggagcgacatatttcttcttgacctctttgcccttagtctcttcctggcccttgcccagatctagcttccttggagctagaagcgaggcctgcacctctcctccccttcctctcccctttgcttcgggtttatcgagagtaattctctgaggggaagagtgtgccttcctgctcttcttcatcagtgggggttcatgaatcgccttgctgtcggcctcagttcggtcctccccaaaatccgtgtcgtactgcaactgcacatcgtaagattgtgcatgacgatcttgagcaggaggggctgaaggagcagaggcgggtctcttcggtggacgaccgcctggtgcagtggttggcctcgctgtaaccctgatctcaatgaggtccttgggccattggatgaaggtaccacgggcatttcctagtgagaggacctcgtcgttcggtggatacttcagtgggaatagctcgtattcgggcttcaccgagtcgacttgaacttttgtatagtcgcccctgagttgcactccatgcactcttgtacgcaagtccctcggctgctggaaccgtgaaggtcggcatcaccctaactgtgagggtgcagctcgttggatcctgcgatagattaatcaatttttttagaatatcatatatcatatggattcgttaagtctttcatgtattgtggacgaaacttttaccgttatgtggtcgacggcgctgtcagccgatgttggattttttgccaactcagttgatgcgcaactgctgcgtttttgggtgggacttcctaactcttcgtgcgcagcagcagcggcgagctgggggttctgttgctcttctcggatctcttgcctaatcttggccctcatcgacttgagcttttcgttgaattcagatgttagctcagctcttatagacgcccggatcttcgcttcaaggcgtgcatctttctccgccttgttggaagtccgcttcttgtactgccacgcgtagtttggaaatccatacttccagggaatagaagacccaacgccccgtgtctgtccacggtgttccttgttgcccaacgatttcgtgaggaggtcgtcctcgcatctttgagagcaggcctcttgcgaggcttgttgctcggcaaccaactccttttgcattacaatttagtggggttaaataaactgcatgatgggaaacaatgcgaacatctagtttgattagacacttactatagcttcatatactcgttgatcttctgcatttggcatgaagattgtgccatcatcattcttctggtacctggccctagcccagttcctagcccgagggtgtgggatatcgctaaacacgagcggcgtgttcgattcctccgcttcttcatcctcacgctgccattcctcttccttactggcatatccggcggtgccaagccggtgcggatgctggttcctggtctggagcaagcgatatgcctcgcttctagctctggactcgggggtcgacttcttcgcatggaattcctcccagacctgttccgtgatccaaggaaatttctttcttggatctggattcgccgggttgtagacgaactcgccgactagcttagtcttgaagttcttccaagcattgcccataaccttgaaagcagcccgcctgagatggtcctcatgctccgcaggataatcgaagctctccttgaacgttagccaagcaatgtccttctctgcggccggcacgagcttgatgtcatcttgcagaatactgaatttctgcctccctatgaccccacagatagatctaaatcggctcaatattttccttggagatgtcggcaaccctacggcatccaccgctgttatgcggaaccgttccttagggattttgttccctgtcctaggagtacatgcccttaaggacccactagttgtcgtcgacattggttcgccttgctgagacatcgtctactttttttcaaaataacaaaaatacacaattcagtgctacaatctattacaatgaattgaatgtcacttataaataaatgaaacataaataaactaaattgcacatctcacagtaatagaatgaattgaatgtcacatataaataaattaaacatatcatcaaatcctaaaatcatgcatctatcactaaattcattaatgcaccacattccatctattcatcaacatgtcatcaatcaaaaaaatcattcgttcaccacatatcatcaatccctaaaatcatctatcactaaattcattaatgctccacatttcatctattcatcatcatgtcatcaatcactaaaaacatctatcactaaattcatcccaacatccacatttcatcccaacatccacatttcatcattaaccacatgcaggtagcagagggcggcgcgatggaggactcacctgaggtcggctgggggggctcggtggtggcggtgccaggctcggtggagggcgtcgccggtcggtagaggcggcgccgggctcggtggcggcagcggcgggctcggcgaaggaggagttcgcggcggcggcgccgggctcagtggagggcggcgtcggtcggtgtagacgctggtcgggcaagtcggcgtcaggcgggcggcgtcgggcgtcggtgaggagtaggcgacgacgatgaggaaggacgtcgccggcctcggtgggggcagctattcgcgtcggtgaagaggcaggcggcgacgacgaggaaggccgacgccggtcagtgtagaggcttggtggcggcggcggcgggctcggtggaggcggcgggctcggcggcggcggcggcgggctcggtggcggcggtggcggtctcggtggcttggggttcatcgtcaaggtcaatgtgaggtcttacatgaagattatggttgtattcttcttcatcgacaacgttgtcaactcctacaattcggcgctttccatccctcacgatgtgcatcttcttgtttgaagggtcttttatgtagaatatctgctcgacctgtttcgcaagtacaaatggttcatcggcgtatccctcctttgatagatctactaaagtgaaacctttcttgtcgactttgacaccagtgcgtagattcacccaacggcagcagaacaaagaaaccttgaacttgacgtagtttaactcccatatctcctcaatgcggccgtagtatgtgtttgacccaacttgatcctggaatgcatttgtacggacgctgctgttttgcactgtgcttttgccatcttgtttgacggtgtaaaatgtgtatccatttatatcgtatccttgccatgtgtctacggtccaagacggtcccatccccaacaactgtactgtctcatttgggacatctgtggacattgtcacacgattcttgaaccattcgttgaaccgagaattatgttctctgttaatccatgcatcagatcacctcaagttctcatctcggattttcgctaagtgctcctcaaagtatgggccaacttctgccatatgttggagcacagcgtaatgagcctgcgcgtacgacgcttgatcgggcctaattcttttccttccgattgagccaacacctgacaaccttccgatgacccatgtataccatctattgtgatttcttcagccatcggcttcgtgtatgttccttgcaatcggagcatgccttctttccttttatagtttgtccggaaagattaccgagtgcagagtagtcattaatggtgcagaacaatagaactcttagcttgaagttctcctgaccatatgcatcctaagtttccacaccttatttccaaagaatctccagatcgtcgataacaggctccaggaatacatcgatatcattgccgggttgcctcggaccttggattaacaagcacaacataatatatttccgtttaaagcataaccatggcgggaggttatagttcgcaataagaactggccaagtgctgtgagtactactcatgtcaccgaaaggattcatgccatccgtacgcagacatatcctcatgtttctagggtcggcagcaaagtctttgtgttttcgatcaatattcctccattcaatcgaatccgctgggtgtctaagcataccgtcattccttctctccgtggcgtgccaacgtactaacttcgcttcgttcgggttggcaaagattctcttgaaacgatcaatgataggtagataccacacaacctttgccggaccacccttctttgacttatttccttcgtcaggtcttttcttttgcttgtattgagaagccttgcagacaggacaagcatccaagtccgcatattgcttgtggtacaatatgcagtcgtttggacaagcgtgaattctacggacctctaaccccagtggacacagaacctgctttgcttcgtatgtcatctcgggcaatgtattctcaccaggaagcatagccttcaaaattcctaaaagatctgtgaaactcttatctgtccatccactacttaccttcagcttcattaggtccaaggtaactgacaacttagtgtgttttgctttgcatccagcgtacagaggcgtctcggaatcactgaccaacctgctgaacttcattccatctctctcattctgggctgggtcctcaacgtcacgtaacatgtcttgcagcagatcgtgatccacataaaccatttcaccgcccaatggagaaggtataaacatgtcatgctcatcttcatcttcctgattatgcgcaccacttctgtctgctgctgctccacttcctgattcttgctctccatgcttcacccaacatgtatagccctccatgaatcctcgttgtatcagatgaccgtgtacgtcctctccgctatcaaacatattctcattcttgcaatctgcacatggacaacacatgtaatcactgtttcttcttatccgatcctcctccgcgacgttcataaaatttgttacgccctttctgtagtccgtagaatgacgtttcaaatttttagcatacatccaactttaatcaattgctacaaaataaaaaaaaacaaattagaggcacatattataagatcagtattgcaaaagtaagacgtgatgaaattgctcaattaatgattaatattactcacttgattgatccattttgattactttgggaatttaatttctgttttccttggaaaaaggacaaaaaatcgccccaacagcctcccaccaaaatagtgaacagtgggatgcagttacactaggtggtggggggtatttatactgtgtaacaaatatctgtaacggccctaaaataatcaaccgtgacgggcatacaagtaatctctatcgggccttaataaaagcccgtcaaaaaagagtgtgaccctcatctgtgacgggcttcttttagggcccgattgagatatggaaccctcatctcaatcgagcctcaactatagcccgtcatagataagtgtcatccgtgacgggctttagttttatgccgatataccatggctgtgcgactatatctcaatcgggcgaaacttcggcccaattgagattacttgtgacggcccgtaaattccagtcttgttatgggccgtcacagatggaaggatctgtactagtgaaaaatagtgtggtgatgcactaacacgagcggcactgaattgcttttacgatcgtcggtgccacgcaaaatttggccaatcaattgtggtaaaatttgaaaactcaaaagctctcagacaaaagttcctaatctat

SEQ ID NO: 23737 - DNA, 3675 bp, Oryza sativa
ttgagcttgagctctgatgaatggatggatggatggaggcttgggtttggaaggggaggtggcgcgggcttttatatagggtttggtgatgcactggagcttaggtgatgagctaggccagttgagttggggcccaagtaaagccgcgcaccgggggaagaagcatccattcgtccatctctgctagctgcatgttatgttgttgttggtagtaatattgtgcgtgcatgcatgcatgtcttgtctagctgcctgctggctataggctacatatgctcccttttgggctgagctagctagctctcccataactggggaatctccaggattgatgggacttgtgaattctctgccaattaacaagtgtgaataaatgaattattgaaaatgaataggagcctacaaggtcaggcctttgcctttccagctttgattatctttggttatgtgcatgcatgcatggctgtgtttatatattcatgtgagggatagaatttgtggttgttgacatggagtaaatttagtaaaacggcgcaaactttcacaaaactataaataaattaatcaagttatacttcctctgtttcaaaatgtaagatgcggttgttttggagtcaaacttaaaaaaactgacttacagcaaaaactaaaacatcttaaattttagaaaaggggatagcaatgttgaaaactatatatttagccataaatttagcaaaactcttgagatccatggaaataatggtggataaaatctctaattaagaccttagtatttgatcataaatgttcgctttaggtatatagtttggagtacacatttcactttgaactaaaaatatattgacaaatgttacacacaactaatggatcgatcaagtcgtgcccatgtttttacttaacaccaggttttctactttattgattggaccagagttcatgaataaaccccaccacgatggcttcagcgcaagtacgggcaaggtgtaggtgacttgtagcattgctccacccctgctaggtcatgagatcaatcaatcaatgttctaacctattccatcctctcttttgctctagctaccaccatgaaaaaaacgagtaggaattatgcgccattaatgatggctagagcaggaagttgggatgggggaggggttgggaaaaatagacatgcatggacacatgaatgaatagtctaggcatcttgcccatcagctatggtgatggtgctttgtctgaatttaggaactgaataatggttccaattcctttcaaaagtggagggttgcttgatcaaatactatctaagtacttcctccgcgtcctaaaatatagctacttgtagtgtttaaattttattttaaaatacagctacttctagagtaagaagagatatttgtagtgatgaaatgtcaaaaatacccttcttcttcaccataccgaccaatcaggacaattaatgaaggaaaatttagtctttttacctctttttttagttatctctatgaaaaactctagaaagtaaggtagatagtatgagatgattcttctaagctatatgtttaatgttatgatttatttatagaataaactaaattaatatgtgcttatatatccaacagtaataaatatttgtattggccaatactcatcccattcaaatcaacattgagatttaacttgcctttccacatctattatattggcgagtgatgcacaccatatataaaagaagtcacctcagcaatacgtgtcctatttttccttggtacattcaattttcctgacaacagtcctttaactctcgtaaccggggacatttgaccatgaaaagcggaaacgctgaattgcaaggtaaaaaagtacatgaaaaaaattttttttgcgagaaaaaagaaaaaaatgttttatggttatccgacacaggaaattacaagtctctaaaacctaagcagtgaattaactttcttgcgggcgattgtcaggaaatctggtaggaatcacagtacacttcgttgttggttaacagttgacaaagtaaaattcccccttgcaattgcagattatcctaatgattcatgcatgaggatttaccatatatatctagcaaaatgtttcatgatagagtgaactatatattaccatattttgcttcctcggtagatagaattgagagaagactctctgctacctcagtttttctatcttatggaaataaacttactatggttaattcagttttctattcctaccaacctactatatgtgtactttgaagttgcctaaaacaataattgacaatattgatcgaggaaggagacaccgtctttagagaggttatgatgtcaattccaataagaagtcattggctgtttgggacaaggtttgcaaacctaagacaaagggggttcttggggttatcaatcttacaatccagaacctccttctaaagtatctagacaagttctatgatagcaagaatttgccccgggtcaatcttatttgatcctcttattatagaaacggagtgcctcacttatccaccctcaaggggtcttttcggtggaaggatgtttgcaatttgatagatttcattggaggcattgccagatgtttaataggagatggagtttcatgctctttttggaatgatggacctcctctttctatccatatgccaagactgtcttcttttgttttgaatgcaaagatcccagtcacaattttctttcaatttagttggaagataattttcacttgcccctatctcaagaagcttatcttaacttgtagtctttgaaagttttgcttaaagaggtaagcttgtcacaggaaaatgatacatgggcatatatttggggtaatttgaagtacaggtcacagaagttttacattcttaattttagagttttgcaaccacctcagcatttcctttggttacggaagagtaagacaggtcaaagtgtttggttggttactactcatggaaagattaaatataaagtatatgctggatcataaacattgtgctcctccaaactgtgacctccaatgcgtgttttgttcaactcaatctttggaaatcttaatcatcttttttttttccaatgccctttctcagtgagattttggaatatcttagatattgtttgggacacctctttgacactagatagcatggtggtggaagccagagatagataccatggccattactttatggaaaaattcttatttgagacatgaaatatttggaagcaaaggaatgggtttatttttgaaaatactcatccttgtttgtcttcttggagataactccctaaggctgatctcctccttttgttgtttaggttgaatgagagagataagaatgtagttttgagttgaattagattgttgtaatttttttcttttttcctgtacttgttttctttctttaataaaaatctatttaacaacggggcctcctatgctgtaatttctttaaaaaaaactatatattgccatgaaggtctcactactagaaaaatcatttttcccaacgtgggagtcttattttcgcaggcagacatgacccttagagccaaatgaccgcctacaaaaatataaatcgagatgaaatttgatgtccgcctgcgaaaatattttcacaggcggaccacttaagcggcgcct

SEQ ID NO: 23738 - DNA, 22375 bp, Oryza sativa
ccgcatcattttcgtaggcgccaccttaagtggtccgcctacgaaaaaaaacttgagtataaatagactcggcataggaggagattttttctaagtctccacacctcaccactcacggccggcaagcttatccattcaacccctcagtccctcagctctctcatcccctccccctcacctctcctcttctccccacctcaacggccggcctctcccctcccctcacctctcctcctctcccggcggcggcggcgggcggtggcggcggagggcagcggcggcgcgctcccggcccctccctcccagatctggccggaagggggcaggggcagcacggcggcgggcggtggcggcgaggagggtcgaggcggcggcacggccacggcggcgagggcagttgaggcggcggcggcggctcccggccgcccctccctcccagaactggagtaacgacggcgggccgtggccgtgcggcggcggcgcgaacgatggcgggtcgtggccgtgcggtggcggcggcggctcctggccgcccctccctcctagatctggagtgacaacggcgggccgtggccgtgcggcagcggctcctggctgccccttcctcccagatctggagtgacgacggcgggccgtggctgtgtggggcggcggcggctcccggccgcccctccctcccagatccgcgttgacgacggcgggccgtggccttgcggcggtggcgcggacgacggcgggccgcggcggacgacggcgcggcgcggacgtgcagcggcggcggatgatggctaggcggcggccatgatttcttgaatgtttttatttgctttcttctagaattgattcggtgattttggatgaaccgtggatgaattgattcggtgatttttggatgaactggatgaattgattggattggatggggaatgggtgggaactggattgggaacgggaagctaccgtcggaaacggcggtggctgcccattttttttagctctcgaagctattttcgcaggcagacctgttgcgcgcctgtgaaaatcaactattttcgcaggcgttgaggtgcaggcggatggcttgtccgcctgcgaaaatatgattcggccgactgggaaaagaatttttctagcagtgtctctccctctacaaataatgatctgtaagtctgtagtgcctcagtcaacttagaaactctagcttttccattctttaatatttaactagttttgattgtacaaacaacagttttaggtacactttcatatattctctgacttgccttgttaatttaattatacacggaactagaataagaataaccgaccatgcatgcatatatatatatatgcacaaaaaagttttccatgcgtccaaaaatgaacatatatccaaactgaattattacctatatatatatgtatgggctttcagctttctcgtgcatatatgtgctagctaggcatatgtatgcatgtgtttttcatggcacatgcgtgcgtcgcaaacaagcaaactaataacccgcagtttacacatgtaatgtaattaaaaaaaatatacacagcgcatatgcgtgcgtcgcaaacaagcaaactattaagctgcagtttatccacgtgtaactaaaagaaaaaaaaatcaaagcatgggatcgaatcacaccgtactagaaatatcagacatgaaaatatgcacgcagttcatgctagttctcaaccgatatatttataggggtaaacgaaatttgatgaaatatatttattttgaatgacttaagtattgtggatactgataagcattttcatatctttgatttagaaattttagattatatagatttgtgaatttcgttatagtatcttgcaagatactaataatagggcatcatatttttgtacaccacactagtcacatcgtattttatatcaactcctgaattgggcaggatatttaaaattgttaactatattagggtatatcacctttataggatatgattagatgctttttggctatagctagaaaattgccttattctattcgtcgtatttagagcaccatatatcacgtaatttaaacggcaacatatcctatgcacacaggccctcacgtgtacacacgtgcacaccaactaaaaaatatcacaaaaaaatctagaaaaaatcatacacatactttcaattgtattacacctagggttaaaatcttaacatcaaattcattatattttagccgtaacaaaaaaaacaaaaaatctaacagttttaaggttgcaattttgtcagaattttatcttttttgttattctctatgtagaatgaatttgaagatgcgactttgcacgtagatgtaatactattgaaagtacatgtatgaattttcctagaattttttgtgataatttttagttggtgtacatggtgtgtacacgcgagggcctgtgtgtataggatacgctcccaacttaaacagctataaacttgggctccttgcctttagaacatatggattttaaataaattagatttgttcccataaaatttctgcaaattcatctattccaaagaggccttagggtgtattctacactcctattcccaagtcccaactctactccctcattttccatgcgcacgctttctgaaccgttaagggctcgttcggttcacaagatttttaaaacgtagaaataggaaaaacgtaggaatactataggaaatacatgtgtaaacctatggattgaaaaacacaagaatttttcctatgttgttgagcaagccaaccaaagaaatgcaaacattagattggagtggattattttttcctatgcttttccttcaaaaatgaaggaatagaaaactttcctatagttttcctatgttgcattcatatgaaatgaatggtagtttaaaacctatttctattcctatgtttttcctttgcaattcctttgaaacgaataagccctaaacggtatgtatttttttcaaaaaatttctataggaaatttgatttaaaatatcatatttatccattttccaagtttttagctaatatttaattaatcatgccctaatacattgttccattttgtatgccggggaaagagttcccaaccctcagcgcccaacagagcccaatgtttctctgtctccattgttgatttatgaaaggcatgatagtatcactacttagtgtatattgtgttgttaatatttatatacaatatgtttgctcgcatttataagataatggacataggaaaaacactttcaaatataaatacagtgatagtactttggttaaacagaacagatatacctttggaatagagaaatatatacacgtactaactagtcgactgtctgtcaggggtggacacacccactgggtagggtgggtcaactagcccagctacaaagggccggagctagaacgaaatagaggagggtatcacttgtttaatttactctactttaaattgagtttaaactgatgtaggtgtcaatgtttatattaaagagggtgcatacatggtgaaaatagatgagatatagctaaagtagggatacaaatatttatggaaattcatgaccaaataaatgagcattatttctatacaagtggtaccatttttgtcgttctgattttggccaaacataaaatttgatttttttttctctttctttagaactatattacagtctactaaatagttaatttggtaaatatatatataaaagtttattttactccccaaaactattttggcggagcacttaaccccctaaatactttttttggggggtttatttcacactcccaaactattcaaggtggatcaccttactctgtaacaatatttcttaatttctttaatctctctatgcaaatcgtatttgcactgaaattatgtaggattggtatatccattataacctacctcttgaaatcttattaagaaatttttatcactgtttacataggttggaagcactaattgtgaaaatattttgaaactttgataatggtgttatttatgagaaatgttgttaagcagtaaagtgaaccattattaatagtttaagggtaaaatgagaaaaaaaatacttaaggagttaaatgatccaatgaaatagtctgaaatagtcttggggagtaaaatagacttttcaaaatatgaatgttttgtaaatcatttctaaattaataatttttgggttcgaccattttcatccctaattctcaatatgaggcttccattgccatctcatcttcatgactacgctcattgcctcacctatctgacgcagacgtttgttcgactgttaatctttgttaacttgcttgatgttcgtgagatgcgcctccgtgccagtgccataagctggcgattatggcttgtgtgcgatgtgccatcatccaattagggctagcgccttgctagatatcgccccatctatatattttaaagctgtgtctgccactgctgcctgtagaatataaatattcaatgaatcaacagtaatcatctcttcgagagggatctcgttcttctttctatataggcttaatatttcgagagagctgttctaaaatttttattcatagcttgtagtataacttaactattctttgcagatataattaataaatttaaactgtgggggacttccaagcagtattttggtaaaaaaaaatcagcagtaataataactgccagttcacttgtgtgctaagtttacttatacaccggtagtgacgtagggtttatagattcttggttctaaagtaatgcaaacgtaatttgaacaacttatattgactttgaaaagttggaaacatgtctttgacagaaggtagtaacattataatctatttttatctccctccaatcctcaagaggacaaaaatccttgtcaattattagggattggcagcatatattgtccaccaaacccatctaggttgccaagtctcccagcgacagagatgtcgtaaaacacatgtggtatagtataatatttgatgctcctgggacaatgagccccgcaaattataccggtgactttatgtgattcccatgcatgactccctatcctttaatttgcacactttgttagaaagggccttgagagatggatgtgaagctgtaatgcaaaaaaaggcgaagaggatcgatggatgtggaggtgctggtgtactgtcagaatgttgtaatgcaaaagaaaagccatatatgtacaaaaatgagtatgcaaggaaggttttatgtgggggttgtatattctctttactcacaatcatgcagccaaggtccatggccaaggccagcccagccatccatccatccattgtggtttagatgccccttccatcttgcaatgtccacacaatccgctggctagtgtacatgtaagatacacgcatgcacacatttgaacgtgcttcatcggtcgatatctaagtttgtgttactatggattcatatcctttgccactataatcagataaaaatatcataatagtctataacaaaacctccggttaactaaaattgtactatatatatcatccaccctcattgattaatcgtaaggtgcagatataattgtgcggacttgtgaatttttcctacatagacagagcacacggtagctagataaccgtcaacatcatcaaatgccagtggaacaatgcacatgcttgctctactatagcaagccagagagctcggatagatggctgtctagggtcgccgggttctcaatccaccactgatgatattatatatatgctaatataatatgaatgtaaggttctctatataagtccggagaacttgggccgttgagttgtcgatcacatgacggtcatgctaagcttaagatagagggaatgaattgagacacaatctcgtagctagctaactactcccttcatttcatattataagtcgttttgatgtttttcataataaaactttattaaatttgactaagttaaaaaaaacaacaatattttaaacaccaaactagtttcattgaatatatttatatgtctgttttatattaaagagtaaattgcatcggcggtatacaaacttgtcgggtgggtggaatctagtgtatgaacttgtaaaatgctcgttttggtatatgaacttatcttgtgcgtgcgaactaaggtcaaaaggacattacatgactaattttgtttatttaggtgctgattaggatactatataaacatatatatgcatgagaaggtttctacttagacatactccctccgtcgtataaaaaattaacctagtattagatgtgacacatcatagtactacgaatctggacatacctcggtccaggttcattgtactagaatgtgtcacatctaattctagatttatttttttatggagggagtacacttattcaataaaaagatagagtgagatatagtgattgtagagaaagatataaaaaaccgagcaataatataaggagaaacatacgaaattcaagataaagtagagaacaaatttataaatatagcatgttttatgcatactcactatacgcatgcacgccacatcctaatcaacatcagctaggtaaaattaaccttgccaagccattttggacctagttcgcatggattagataagttcgtgttcgtgtatcaaaacgagtattttacaagttcatgtactaaattgcacccacctaacaagtttatataccaccaatgcaatttattctatattaaaaatgctactatgtttttctatgaatttagtcaagcgtaaaagagtttgactagagcaaaacgacttataatattaaacggagggagtggctaggctagcactgctcacacacacacacgcacacaaaaaggcaagctcagccgccagctctcgccattattcgatcgatcggcaaacgccgccatgagggatcgatatcgttttcagtccagcctagttgcccagctacatcgatcgattgatcagctgctgccgatggatggacgcatggacacatctatatatctctgtcagtgtcaccgggcggctacagcaagcattagctatagctgcaggcatttcccgggtttaatccgatcaattcgctgcactgtgtgtgtgtgatgtgcagtgggcgttggcataaatgtcatcaccatacattgcgtcgtgtgtgtgatcgatcatgggaatcaaatctttcattctgctccatccgcttctcattcctgtcggatcgatcatccatatatatacataactatatatcttctttctatcaatctctgtcattaaatttttccatatgcatcatcaatctcaatttgcacatataaatcgtttgcccccacactggctccataatttaaagttcacagtggagtattcgattgatccgggtgtgtttgatttggactgcgagcccccgaccatgacatgagctgttttgtgtgtgcgtattcctagattcttgccggttggaaagatcgtctcatgacgatgaacaaaagggagggttgatgtaggattggacatgcatgtgtgaggccggcggccggctggattctcaagttgatcaatttgcatttgggcactacttggattagggcaatgttggaactgagaaattcattgtaacacctcatgcccgtttgaagcctgtaaaagtggtgtcgtgtttgtggggtttagaccgatatgcccagaagtgatgttctgatagtggtttagtaacgccttggaagtttagtaaggtgatggcggttaacacttaaatttagcacctaatgtgaaaatagaaaaatatggccaaattttaaaaggactcagcttgccacgtgaagccgatctggccaatcgccatagtgctagtctgtccggcagcatgtgaccgatcagaccggcatagtccaactctaagtccaattaattttcttgcttgggtccgagatttttttagtccaaattgatccctaagcctaatgggatgtgaagaaggcccttggaaagaagaccttctcctttataagagctatatatggttgatttgattctaacccccgactttagctcttatcgaatagttcttttacctttattttttagccatgttttctactttatcgtgtacctagcattagtttgtccatctttatcgatttgcactgtaaatcattcgccttcgctgcaacagtgtgataccctttataggtttgtcctataaaactttcgattcgctcacgagacgggtggttatcttcatatcgatctaaattggtctagaggttaatttgatctctaaataggcccagcaagccggtttagctgttttctaaacccatattgatttggagctttctagatcgaggttgttggtgactccgtcaacatcgcaatttattaggtgagtcctatgttggtcggaaaaggcgccaacaatggcttgtttataagcctgtgtgctccaaccataacacctccgggttaacccctttacacaaagcaatgatgaaagtttaagtggggtaggagtacatcgaaccgcttaacgtgtaaagcggactaatgcagattttggaggccaggtatatttgttggatccatcagcaaattaaaaccaaacttacaagggcacgtaccatggtatctctcagtgtttcaatatgaagatagtgctgaagaaatttagcaaattagtgctagaatgttagtgtctcataccatttcaaagaccttattttactacaacacttattttcaataacacacactgcctctgtacattattataaatgcaacttatatatacatgctagaaaatgcagcttaattatatgtatactagaaaaatgttagtatgccgaaatataaattcaaaataattttagaatagattgcacgcgtaaattctccattagtaacagagctagtaaactttttgttttcaaaagtaatgaaagaaataaacatgatattataatccatcaaccatatatatttagaagcctgctgagaagtaagtcaaaattaagttctgtggtactctcttcatcttcaaatactgtcactagatactattcatcttcaaactttcatttgcttggttgtttaaaaaaaatatgtgtatataggcccatatggcatgataataacgaagtgttgcatcttaaatatcacgaaatctgtgcaccatgatctaactatttaaaatttattatttatggtgaatattaaattgtaagcatatatttgaaacagttctggatttttgatattttagttgatgacgctctctctcgtggcccgatcttctggtgagggggataactctcgctttgatcgagtgcgacgtttgcgacgtggctaccaatcagaacaagttcaggacgccgtgcaatcgctacaccacaaacgatgtcgtatcaaccgtgacgcgcggttgatgatccctgcaatgcaaacgagagaacactgcaagaacaagataagatgcaatctaaatattgcgaatagggaattaagcacaaatgaatagttgcgattgaagtggtagatctaatcgacccggcaaatcaacacaccaagtattgggggctctgaatctatagtcgccgactaatcgagcgaggactagagacaaggtgaatggcacttggcaaaattcaactaaacaaaacccaaatgtttttgaggatgtacaaagctatttatagaggaaaataaagctagggttcagtgctaattcgtggaggtggagggtgacacttccgagatgggcctagtctattacaaggcccaaggcccaagttcggtttcagcaacaacactgtcttgttttggtgattcccgttgactcgagatgaatttggacatgagaccagatgcatttgaaaggtagcgagataagctttccacgaagtccaagatcacccaaatcgagttggcatgaaggcgctaggtccgtttgaagtcagtgctgtctctggaggccgaactggacttggacttggaattatcattggagtgtgtgaagttatgagcgtatccaacgaagtgatgtcctcatcatcctcctcttctagaattggagtcgtcctcgactcaatcccatcttcttgattgtgtgcactctctcgtccattggccatccttggaggtatctcatcgtgaaaaacatcctcatattcctgcaaaaggttagtaatagcgggtggcaaagaatataaagtactaggagcagtagccaatatgagtatagaatcttggcaaaatagagcatagcaacaagaatctggctcatctagtgcacaaatattatatttagaagccaacaaagcacccttcaacttaatttcattctttgtggtacttggttctattttactagttggagcaggatgtttagcaataatttgattttcacttttcgctttcttttcacattgaagtcttgcaagatcatctttcaaagcagtggctggagtcatagaatgcaaaacaactcttttaccatcgaacataaatttatatgtattagtcctaccatcaaaaacaacttctctatcatattgccatggtcgccccaaaataacataacaagcttgcatatgcacaacatcacattcaatttgatcatggtaggagcctatagaaaaaggtattttaaccaagcgggttaccttcatcttaccacatgtattaaaccactgaatatgatacggatgtggatgtggatgggtagtcaagccaagcttcttgaccatctcttcacttgctaaattgttgcaactcccgctatcaataatcattttgacggtatggcctttcacaagaactttgctttggaacaaattgtgacgttggttttgctcttcacacttctctttagcactaagtgctagcttgacaattaggctaggatactgatctagcgactctggatgcaattggacttcctcgatgtcatcattatcttgtccacctgcgtggtcagtggcagctaaagcatattcatcatcataatcgctagcagaagtatactcaccatcagcattcacaaatagagctcgccgatttggacagtcgcgggcaatgtgtccaatgccatggcacctatgacatgtaatatcacgtgtacgtctagtggaatctactgaagttgcactcttggctggagtctgaactgaagcgtttttgcttgtttcttgagcatgggatggcgtggaggtaggtggacgaacagcagtagtagattgacgtggtgttgactgtcgtgtggaagtagcacctgcaaaagaactcctatgcttgttgcgtccctgcacttctctttcagctttgcaagcaaaatggaataatctattcatggtattgtattctttatattcaagaatatcccgaatctctctattaagacctccatagaacctagaaattctagcatcctcagtttcttgcaaattacatcgtgacaaagcaatcatcatctcttgatagtatgtttctacagaattggaaccttgtcttaaaagttgcagtttatttaacatgtcacgagcatagtaagaaggaacaaatctagacctcattgtacgtttcatatcatcctaggttctaggtctaagtcctctaccacatatatcattccaccatagagatgcaaaggaggtaaattcactactggcagctttaactttcttattatcaggaaaatcatagcaagagaatttttgctcaacagctagcttccagtctagataaacagaaggttcaaacttaccatcaaaagaaggcatagtaaattttaccttagataaaggatcatctttgtccctaattcgacgtcgtcttctatttccaacactctcatcttcctcctcatcatcagcaacagattgctcttcgtctttatcgtcatatctttggtgtcgatgagcagtggcacctgcaccttcttcacctgcagcctcaagtaaaccaatgcgtcgcacaatattttcatgtccaataattatattctgaatgttttcagttaattgtttatgtgatcgatttatttgctcaatttgatccactactttcaccaggctttcacttaaagtttttaaatgtttatctgtgctttccttgtatgatttactattacgcatcagctcttaataccaattttccatgcccttcagtttatgtgctagattctccagtgttggttcgtcggaacttgtacctgacatcgttagcaagcaaaagaaactcacaagaaagtgtcagttcctaacaatctatatatatatggagcttttgaaggcactcaacactcaagcatataccaaattcttataatgttctcaaagaatgcaaatcaggtcaatcaccgtggctggttcgtggcacaatgacacgcttgatgagtggagcgattgcaaagccggacctgtaaaggttagtagtatgtggatcttggtaggcttaactatatcacaaggaatagcaaaaatcaaacagatatgcgaaattgaataataatccaaagtattagtcaaaattgctggcctagcctagactcaatcctagctcaagcaagcaaatgttcacactcggaccaaaacaactcgctatgtcaaccaactctctccaagaaatccacaatttaaaaaaaaaaattccaccctttctttttttttctgattttttttcttctctttttttttctgattttttttggtgcggctctttttcttcttcttttttttcttttttttttgcaccttctgccttttctctatttttcttttttttcttttttttttacttttctatttcacaaatggcagctatcaatcgaattggataacatgtgtgtgcaccgaggaattaatctgcacaaggaaattctatgcatgtgtacacccaacaaactaggaggccgagatttgcatgcacatggaatcaggaagagacgatggaaattacacaagtactcatgcatgcatgcatgcgcaatcaagtaggacagcagattctgttctatttttttttctttcggcgtcacttggttgcacgagaaaatcaaagaagaaacaaaaggaagcagattttccctaattatctgacacatgcaacccaaaaaaatctcaatgaaacaaaacctcagctctcaaaccaatctgttactaatcaatctactgcgcaactttctctatggcggcggaactgcgcgactttctgaaacaactctagagcaacatgcaacccacacttgcaaactaaatccaagactaatctagggcttaaaccagcacttgactcgacagtggatcaaaactcaataaagcaaaaactgaatgaaattgcgtggctcaaaactaatgtttggtgatgggaaaaaaatattgcggctgtatggtagacgatgggaaaaaaaattacaaaactaaaatcctcaccaggcaactaaagctctgataccaactgatgacgctctctctcgtggcccgatcttctggtgagggggataactctcgctttgatcgagtgcgatgtttgcgacgtggctaccaatcagaacaagtccaggacgccgtgcaatcgctacaccacaaacgatgtcgtaccaaccgtgacgcgcggttgatgatccctgcaatgcaaacgagagaacactgcaagaacaagataagatgcaatctaaatattgcgaatagggaattaagaacaaaggaatagttgcgattgaagtggtagatctaatcgacccagcaaatcaacacaccaagtattgggggctctgaatctatagtcgccgactaatcgagcgaggactagagacaaggtgaatggcacttggcaaaattcaactaaacaaaacccaaatgtttttgaggatgtacaaagctatttatagaggaaaataaagttagggttcagtgctaattcgtggaggtggagggtgacacttccgagatgggcctagtctattacaaggcccaaggcccaagttcggtttcagcaacagcactgtcttgttttggcgattcccgttgactcgagatgaatttggacatgagaccagatgcgtttgaaaggtagcgagataagctttccaggaagtccaagatcacccaaatcggagttggcatgaaggcgctaggtccgtttgaagtcagtgctgtctccggaggccgaactggacttggacttggaattatcattggagtgtgtgaagttatgagcatatccgacgaagtgatttcctcatcattagttcttttaaaaaatattttacaaagagagatatggacctctagctttgtgtgccagggtggttggtacccaggttgaatgtctcggtgctaggggtgaaaacggatcgtgatcggtcggatctcatccttcccatatcttaacccatattttataatcgaaatcgggtcggacacggatagtgccgaatacggatacaaactcatataatgtcgggcaaaaatacggaacaaatacgtaccgatacgtacactatataacgattacggatatttatttagatatcaagtcgaagcaacaatcttatatatcacatagacaataaccatttaacaattccatgtatctataatacgattatattaggcctttaggaccttaggaaataaatagggtacaatacatcatagtagaaccaatacatagtaaaaaagtgcctcacaaaaacataatacgggtaatattcgtataattatccgggtaatacccgaattttttactggataatccgtatccgtcggatactacgttcccgaatccgatcttgtatctgccaaaaaagacccgtattcggacctgatatccacgaaaggtcctgggtacccgaattttcgaccctactttgtctcgaaataatgtggccaggcgggtgggcaggaaatacccgccccgttttcaccccaatcggtttgcggaaactctaatgggcgatcaatcgccttggctattggctagcgatcaccccattcccccctccctccctccacctggttttcttttttaccaccacattactttcctattttagtaaatttatacacttcaagtttatacacctcaagtttacacatctaaagtttagagaccaaaagtttataagtcaaaagtttatatatccgattcaaatttgaatttgaattcaaatatttttttatatatagtatttctatacatctaaagtttatagacctaaagtttatatacccatttcaaatttgaatttgaattatatctgattcaaatttgaatttgaattcaaatattttctatatatagtatttctatacatctaaagtttatacacctaaagtttatagatccaaagtttataagtcaaaagtttacatacccgatttaaatttgaatttgaatttgatttcaaatttgattcaattttgaatttgaattcaaattcaaatttgaattcaaatttgaatttgaatttgaattcaaattttttatatatagtatttctatccatgattttttctaacttttgtttttttaaaaaaaatttatagtgtactgtagtaggaagagaagatggggaggagaaagggggagaagagagaggaatcggcattgggggaggggagtgcgggtgatcgctcccagctatcacccgcgcattagcaggacccatcggtttgacgccaacctctaccacctaagaacaacttcatgattgctattgatttgttgtaaaaatttggaaacactaacatatcaatgtatcctaattcatttttatttataaaaacttaatctgagacaatgtggatcctttcattctccctcacccctaaatcctgttgatttgccgtcaaattttgaggaaaaaacaaatcaatcgatttattttaaaatttaatagcaaattaataggatttagggattggaacgagtgaggaagccacattttcctcccagattattttttcttaatgcagaataaattaacggagagcaaaataaattatgatacatagatttaccattttttttcacaatttaacagagaggaaacgaagttattctagatggcagatcggcgtcaaaccaactagtggcgaggtcaggtgtcggcgcttgcttatttagcaccgaaacattcaatgctggcgtcaacaaccctggcagggtccatatctgcaataagagcaagtttaacagtagtttaacagtacaacccactactaacttaaaaaacaaaaacaagaggtgctttcagctttcatcgttggtcaaagaaaccgaacgaaaaaaccgggcagaaaaaagtccgatccaagaaaaaacagagcgaaaaaaccgggagaaaaaaatgaccgataaaaaaaagggcgaaaaaaacaaatctggacgatccaaaaaatacgaaccgggcaaaaaaaaacccggctaaaaaaacgtccaatccaaaaaacggagcgaaaaaaaagggagaaaaaaacgtgcgatccaaaaaagggagaaaaaaaagggaaaaaaatctgtccgatacaaaaaaaaaatacggggcaagaaaaggaaaaaaaacgaacgaatcagtaaaaaaaggcgaatttttttaaaaatccgataaaaaaatagggcgaaaaaaatcagtccgataaaaaaaggcaaaaaaaagaaaaaaatcgaaacgaatccgactccatcgacgcggtaaaaaaaggcgaaaaaataaaaaaaatgtccgattccaaagaaaaaagaattatatgtgacgcggtagaaaaaatcgaatcctactgtatctataaaggttcgacactatggtggaaaaaaccgttcttaaaaaaaatacacgagaaaaaaaataaaaagggcgaaaaaaagcgcggcagaaaaaaagtctaatttcattttagtagtccgtttatatatcttatttatctctaatctaatctaatctaactatttaaattcagaagtttctaccgtatattaaaaaagaaaaattacgtgagaaaataaaaacggttttaaaaaacgcgtgaggaaaaaaatgtcagaaaaaagcgcaaaagaaaacacgctagaaaaaaaagttccgtagttcgtaaaaaaaaacacgctagaaaaaaatatttccatcgtatgtaaaaagaaaaaaaaagcatacaaggaaaaaactattagaaaaaaacgctaaattgatggacacttggttggataggctccatcgacttttttccatctcctacacaacttttgtttcgtcatctattctcctatattggagaccctgcacatttttgtaggcagttatcataaaaaatatttctgtgaaatataactattattcttgataacatattatatggaaataatcttagaaaataaacatattttaattgctatttagagaagagtgcatagtgactctattttgtgtagacttgaccatacgaggtagtgtaggatttgattggttgcaagaatgagattaaaagaatattttagattatatgcatgttgttatatgaataatccaattattttaggtaaagcaaacatcgtaaggttgtcatcatcgaggttgggctattatatttaagatgttccaattttctaattttttaattgtcatcgacatggttatgcatgaaaaacgtatattattattacgttttttcacccgttgcaacgcacgggcatatttgctagtcatctataaccaatgtaatagctaattcatataatagttgcttactatagtattaatatctgttcccacctgtcatacacacattacgtcttggagtccgtgctgcagctggctacagatctgtagcccgctgcttttctctctcttcctttatctttttaaaatatgtttatagctggcttatagcctactattgtacctgctataaggctgtgttctgattcaacggatgggaactaatccctcccgcacgaaaaacggagcggtccattaacgcataattaattaagtattagctatttttttaaaaaaaatggattaatttgatttttttaagcaactttcgtatagaaacttttaaagaaaacgtgttgtttcgtagtttgaaaagcgtgcgcgcggaaaaccgggttggaaacatgggattgcaaacacaacctaagttttaaggggtctatttgcaaaatatggtctctaaatagattaaaatatcaaaaattcagtgaaactcaatggtatatatggtcagatacaatgtacgcgatagtgtttttttgacggctgaagcttcctctctgagtcgtcgtccattccctagcacagcagcttttagagatgcatatgttgccattttattattctcttcaacgggcataattaacaagaagaatgcaactaggcgaccagactgtgtactaggattgaattatcatcaaatatattccatcgttgaccatacaaatcaaaagcatgcaaagtattgagattcacacaaaagcacacacagtaatgcagacatcacgggtgatgtaagctgcaaagattataccctatttgcttagacttttaagtcagcttatgagtaaaagaaaatctaaacctaaacaatcaatcaacttttccatttggcttttctaaagtcataaactagttttacactgttaagctaaaaactatattgaagtaacttttttggcttatgtggagattctaccattagatttaacgcttccaagctacgcaccaacttataaactatataaagccaaaaggtcagcttataaaagcttaagcgaataatcctaaacttaaacaaagagagcctttggactttcgctgactaataagcataattaatttgcattaaagaacacgtgatttgagaacattctactaattttcactatgacttttgatctctcttctttgtttcaacatcatgaagattgatttgtctcttctagaggctcctttttcaaaactagatattgataatctggtaaagaatcttcccacgaatagagcacctggccaaatggttttgatgatcttttttataaaaaagtgtcggcctataatttgccatgattactacaagctatgtgctgattttcacttgggatctctaaattagattctatcaatcactctgatccctaagaagttgaatcctatgtatatcaatgattataggccaattgctctcatgggaattgcccttaaaattcagactaagctcttggctgacagattacagaaagtcattttgtctttgataagttagaatcaatatggtttcattcaagaattaaagaaccattcaggattgaactttgaattcctacatcagtgccatcagtcaaagaaggaaattgttcttttgaaattagactttgagaaaacctttgacactatagaacatgaggctatgttacaggtgatgaaagcaatgggattcactgatgtttgtttaaattgggtatcaaaactgttctcttcttcttcttcttcttttgaatggcattcctggaaaaaatagttgtaaaagatgtgttagataaggagatcctctttctcctctactttttgtgcttggtgttgaattgttgcaagctgtcagtaataaatcacatcaagtgggtcttctttcaagaccaatccctctggtcgatgatcataattttccaatagttcagtatgatgatgacactcttctctatgtcaaggaaagtggtagagaattatttgttttaaaagctcttttgcaaacttttgctcaaggtactagtctcaatgttaactatcacaaatcttgcctcattccaattaatgtagataaagataaggcacaaatgttggcaggagtgttacatacctaatgtagtcagattggttcattgacttttacatacctaggcttacttttgggtactacaaggccaagagtggttgattttgctcccttgattgacataactgagagaaggttgtctgttaactcatcttttctctcctatggagatagacttatcctggttaattttatatttttctctttgcctacatattatgtgtacttttaagttgcctaaattggtgatagagaatattgacagagcttggaggaattgtctttggagaggatctgatattaattcaaatagaaaatctttgatagcctgggatgtagtttgcaaacctaaagtcaaggggggacttggtgttattaaccttatggttcaaaatcaagctcttttgatcaaatatatggacaagatctataataagatggatcttccctgggttagattaatctggagctccaattatatgaattgtgtgcctcatctggtcagagtttccttttggtggagacacatatgtaaatcgatggtcatttttagaggaatttctacgtgctctttaggcaatggggccacttgttcttgttgggaggtcctcttttttggttcagaatgccaagactattttcatttgccgctgacaagctggtttcagtccagaactttagaggaacaaacttggaagataatttccttttgcctttgtctcagcaggcttatagtgaatttttggaggtgcagagcttgatgaatgagattaatgcttcccaacagtataatcaatggggttattttggggaattttaaatatacctcccaaaaattctaggactttgcaacctccacaacatctcttatggctttggaagagtaaggtcacttcgaaggttaaagtttgtctgctggctacttcttttggatagattgaataccaagggtatgtttgatcataagtgtgctccagttgattgtgatctatcatgtgtagtttgtcatcaacgacctttgaaactctgatgcatctcttcttctaatgccctttcccagtcaattgttggagcattttgggcttagtatgaaacacttcgatccatcttcagaacaagatgctacaaaacaaagctgcctataatggaaaatattttatagagaaatttctcttgggatcttggaacatatggaagcaaagggatggtcttattttttttttatcatagacacccctccttgtctctctggaggcaactccttaagggagacctcatttttctcttgtttagacttaataagagtgacatagatgtagtgaaaaattagtttatttctttgtaattctttgtatttttcatcctttcaataaaatctttccaacaacgggggcttcccctgctgtgttcatgtcaaaaaaaacattctactaatttagtcaacttacttgggaactttcatcgatgtactccctccatcccagtttgatcatcctctacgcaaagggaaccaaggccaaggacaccaaaatattcatcattatcaaattaatacttaacagttaaaggtgattcattgctttgttccccgtgaattgctcatgttttaaatattgcatgacactacaccaatagaaattaatcttaatttgctgcatgcaacacattcaaatgatgcatgtttactctttgcataataaataaagagatacttgttaaatgatgatcattttgagaagacctcaaaaaacttaggggatgatcaaaatgggaaggagggagtattatcactctcacattccaaagcatttctagatgtagcatttaatctctagccatcataagtgcagtcattcatagcggttaatcaaagttaatgctactttgaaaaacgagtagaatatagttaatgaggcgtaacaatgatcatttgccacaatttccttgtttggtagtatgaaatttgctagaaggtaaataatcggaaacgaatggagagtaggacaggaggataagatcccgtggcatttcaagagattaatatgataaagaaccaaagatgagttaaaattagttcaaacttgatcgtctccaatatttaaaggtaaaatttgctacaggacactcaaagtttgtgatctttgttgtgggacacccaaagaatgtatatcttcttgtggacactgcaaaaatatggtaattagctgctggacacctgaggcattatttttattatttccggtgaaaacggagagagaaagagaattgaaagtaccaaaatgcccttggacacttttcttcttcctgcatcagctctcttttctcttttcttttctttcttctcatctcttctcttttcttctcttctcttcttcagcaagcctgggaggtcaccggcgacagaggacggaatggcggcgagcgaacgccacagcgggtggtggagggagggtaaacaaccggtggggtagcggcggtgggcgtagtaaggagggg

SEQ ID NO: 23739 - DNA, 6773 bp, Oryza sativa
ttgtttgtacatattatgcaactcaatttcctgtagtaatgtgacgggtattcatctagttaaatagacaaatccttctcagttatcacaaaatctggtagtgccaataattccaacctcgctaagcgtggattaaagattgcgagcctatttatctcataggatataagtagaccaatccggaaacctattttaatttacagatcatttttgcaaaccaatttataaattgatatgctcgaataatttataaataggttcgtgggtcaacccatttacaaccataatctatacatgtgcattgaccacctagcaaacccctctcctgacagctggccatgatgcatggtagtaattactaggatttgccaaaatattggttgggaatttatttgttagagattggaattagaccaagtgcctactgggaagagagatttaacaaagtcagaggcgcctaccagtagtccacttgtccagcattgacaagatcacacacttgcttagcttggcccatgacaccaaattatatatagcctaattcatttctctagctcttcttcctgtagggcatctaaactttaagccacacatgcatgatcatgcctggccagtggatgctgctaggagtaggagggtagcaaaatggtacgaccaagagtaggatgtgctctctgcacagataattagccccttgttttgagttctaccatgatggatttctagctatgtgtctaacagttgttaaaaggaagacagcatcagaaacatgaagaaataaaaggccacactatatatagatacttttgggattaattaaattaaattaatggtgtccatagtgaccctaactcaagtaatggtgttgatcacgttcaatgaacatgatggaaagtgaccctaacttaggttgatagtgtatatgtatgtagggctgtaaaaaaagctcgagactcgcgagtgctcaagcttggctcgtctaaaactcgattcgagattggctcgagctcttaacgagcagagcatgaacttaagctcacgagctttgtcaagccgagctcaaagcctaatggtacatgcatggaacttttatgttttatttgatgagtaggttatgtatatagattattatacatttatgtgaaaaaatagtatgtcttgatatcacatattctcctttattctttcttctttctataatatgattaacttaaaattattgtttcaataaaaaaattcaaatcatcaaatgtacattatcatatactcgagtcgagctcttgagcctaaccgagctcaagccaacctgcttgaaagctcgaaagctgattaggctcggttcgagcttctatcgagcctaagttttttttttcctaaaatataacgaatttgaggttatttacatgtaggtataatactattaaaagtatatgcacattttttgtttacacgtaggtggatacctatatagggaggacgcgagcaagggaggcgaccgtgcgcgcattaattacccagtcccagtcccctcactccctcagcttgcaacccctgacctcccggctttacggattgggaatgcgatgcccacttgcggggatcgatctgccacgtttgtcgatcgatcggcctccaacggccgggattgggaagttggtggtgtgacaggccacagccggtggtgcgatttgcccctgcagatcgaagtgatgctgatgctgcttcgcatgcgtgctcatggagaatttcctttttggcgtgggtccagttgacctctccccatcatcaatcctccgtctttctcctccatccggccaagctttgcaattgcaatattgcatgccggccttgatcgatatccctctccatggctccattattgcctcaacataatatgttccttgatccatgagtcaccatcatgtagacataatgagagggacacgcatggaatactctttgattatatgtagcctcaaactaaatgtgatgcaatgttcctaggtactgattggtagggttttcttttttttttcttttttgtccgcggcttataatccgaagacacgtcacataatcaatgaaaaacaacaatgtaaaactttgagtaaattgtattagaggctacgaacttgataggtgggtataaccttgtacacaatacttatagaaccagggccgtgccgtcaaatttgtggccctgtacaaggctctaagtgaggcctaaatcaagtaccaaatatatctaaaataatgtatatactgcagagcaaatgccactacactggccaaggtcacctgtgacgggcccaaaccctcatctttgacggcttcgcgcatggtcagtgatcagtggtcactggtgagtccagtcacctttgacgggtggccggccgtcacaggtgacacccacctctgacgggcaagttactagaaggccgtcagaggtgttggtctccgctagccttgagcgagttaggacccgtcacaggtgactcatctctgacggccctttaaataaaggccgtcagaggttgaggtctccgtagttagaagctgtcacaggtgatctacctgtgacggccccaaaagtaaaggcccgtcacaggtaggtcacctctgacgggcctttatttactagtccgtcacaggttatgttacctttgacggatttttgttccgacccgtcactgataagttaattccagaaaaaaaataaatgctaaatattggctagcctcaggatttgctagccatgccctctgaaaaatagaaacatcacaagatatattccagtcacagatccatcacagatacatcacccccccaatataacatcacagatccccaacaacacatatatgcagttcaaatgccacaattttgcacagcaaattcacaccccttgaaagccacaatttcagtcgttgctcatagaaccgcatatatacttaccaaatggattaaagccataatgtcatcgacctgcacaacctgtcaataaggaaaaaaaaaggagaaaacagatgaatagtacaacataaatcgtagttgatcaaatgtgatgacaatttagtaaagtaacataaatattgcacatatgaaagtaaattacattgaactctataaaaacataattttttacatcgccagaaattataaaaacatcttttttacatcacaataaattatctagccaagttcatgagtctatttggcatgaaaacgtcctttcttgttcattatttctgcaagaataaaggcgcacaattcgcctctgatagcgggggggttgatgggtgagatcttgaagccagctctacctttctgtttaataaataagaggttaattagcacgttttgaatagcaatgtagatattgaaatgagcttattcgccattagcaacaacctcagggtcgaaatctttcacctctcttagaagtgttgacatgttgtggcacacgtggaaaccacattggtctccgatctgttgtgcgcatgcaaacttggtgtcatgataaagttcattcttgccctccttgtgcctaccacccttttccacgtatgggccccaagccatatttaaggccttggtgatttcactaaaatcataatctttggacttattggagttaaggtaggtaaccctactccacttaggtacgatgactaggagaatccaatgtcgcctgcgcagtggttatgtagcgttagtactaagaaccttaacttcaaaaacaatatacacgaagggtattgtcctcttactcttggttgtgtgcgcacatgatgtactccttgtcttgatgggcccataaacaccggttgacatagtcaaccacctcagtgaagctctgtcgtaaattaacctcattcaccatggatggatcaaggaacccaacctgattaccatggcgacgactctcgatccaacacaaccttaaaatatttacgtattagaactaatttaattaggagatatagtccagtcatatcacaagtatagaaggtatgcacttacaaggagtagcattttagaagaccagtgtccaacttccggatcctgaaaaggtcgaagaggtcatcaaagcctatagttatataggcaggcgacgataggaacggctggtggtcgtgatgtccaactatggatgactccctcattttccgcttggcattgcttagctccatgtattgcttatgtagctctcggcaagcaatacccatcacagctaacacattgtcctccaccaatggcatgcctagctcaaattgggctggcgccctcacgaccttccccgatttgctcaccggcatcgacgtcgcagccttgcccctttttggctccggcgccaactccccgaccttccccttgcctcgttcacgcttctggcccttgacaagtggtggggagctatcggcctttcttgtggtctttattggagccaagctttgagctatatctgccaagtccatatcagctccaccgggagaatgaggtactgacaatgccggtccacggggagcctcaattgatagcttagacttgggaggtgtaagctccgtcggtcgacttggacgaggagtcatcttcacaactatgtcttctttaggccattgtatgaacgtcttgcgcgcatcgcccaaagtcatgatttcatcatttgggggcacgggcagcggatagcctgaccaggtgtcctttactgtatcgatggacaccttggcatacccagctagcaggtctgcgccgtggaccttgtctgtaaccgagggcttgaaagccatgccctcagcgacttcaggagcgaaagttgggtggactctcgctagtaggacacactgtgctgcgccctgcataaggtgaaagtttgaatttaatattggaatgtgtaaatgtcttttattagatatggatcggataacaacaattacctcgatgtggtccactgcagctagtggtgcgatcgggagaccaggggccggcacctctgtggatggacaactactcctatgctgtgacggactcgcgtcgtgttgtacacgaggagttggttgcacagcaggtgttgtgactcggggtatattcatgtcggcgagcaccttgttaaccctttcttccacccttgcattcatgctagcttctagttcttgaatgacctcaaccttaagttcggccttcaaacgagcgtccctctcttccttggagactttccgtttcctgtattgggagctgtactgagggagtccatgcttccagggcacatcgctaccaattccccgagttcggccaggatgttctttggttccgagcgcctttgttccgtccaagctcgctctttctcggcttctgtgaccttcccgatatctttatggaggatcccgaagttctcacgtgccgctatcccgcagcagttagaccatcttccaatgacagtcctgggcgccgtgggcctaccactagcgtcaacctctcttataacttgcactgtggtcggccatatattttgtgaccgcggatttctactagacctacttgcacttgtctcgcccgacatcgacgtatgttgttcctgcggcaattctgcagcacaaacagaaggcaatatttgctaaggggtgctagctaaaatttatgtggtcatgtggtgaaaatttatcctataaattaccatgaatttcgggttgttggaccgccgttgtcgcgggatgaccttcggcaactgcctctgtggctgggtttgcttcttcctggatcctcgcaggtgttggggagggcgggtttgcgccgggcgttgacatggtttaactttcgcgaaaaagattataaatttcctaccattagactaaatagcattagatccaatgtaatacggggtatactatgaaagatatggcctcagttttgctgagaaatatgcatcaattacaatcatttgcatgaagggataaaaagaggaaatcataacatcaaaagagcaagtgcagaaaatctgttcttatgcataaaaaaagaacaagtgtagaggtatataaccaatgaatcaagcagaataaatttaaaaaacagcagcagcaagggtacagaatttgcatgattgacataaaacagcagcaggagaagtataataaggaacacattgggcagcagcagcaagggtatataaatcatcaaagaatgacagaaaacaagtgtatatagtctcctcttatcaatccagaagaaaagagcaagtgcagaaaatctgttcttatgcataaaaaaagagcaagtgcagaaaatctgttcttatgcataaaaaaagaacaagtgtagaggtatataaccaatgtatcaagcagaataaatttaaaaaacagcagcagcaagtgtagagaatttgcatgattgacataaaacagcagcaggagaagtataataaggaacacattgggcagcagcagcaagggtatataaatcatcaaagaatgacagaaaacaagtgtatatagtctcctcttatcaatccagaaaaaagagcaagtgcagaaaatctgttcttatgcataaaaaaagagcaagtgcagaaaatctgttcttatgcataaaaaaagaacaagtgtagaggtatataaccaatgtatcaagcagaataaatttaaaaaacagcagcagcaagtgtagagaatttgcatgattgacataaaacagcagcaggagaagtataataaggaacacattgggcagcagcagcaagggtatataaatcatcaaagaagggctgcaggaat

SEQ ID NO: 23740 - DNA, 3222 bp, Oryza sativa
tgaagtgtttcactaggcaagttctgcaacctggcaattcggttcttcagccactcgttgaaagaagacatgtgcttattcctgacccaactctctgatcggcctgggttctcttgtcggataactgcaaggtgttcgtcaacgtacggcaccacctcagtcatatgctgtagtaccgtgaaatgagctttatcgtacaccttacgatccaacctaatagtctttcttccaacagtaccaacaccgtcaagcctcccttcgtgatgagatcgtggtaatccaattgaagatgtttctgacatgtagtccacacaaaattcgatggcctcttcggtggtgtaactctcgatgatactcccctcggggtgtgaacggttccgtacataacccttaaggatccccaggtacctttcgcaaggatacatctgcgtcatgaatgctggaccacagcactttgtttgcctcacaaggtgcaccggaagatgttccattatgtcaaagaaagttggaggaaagtacatctcaagatgacatagggttctcacaagttctgcctgtagttcatctagtccctcgggatcaatgatcttctggccgattgcatggaagaaggaacacaaccgctggatcgtgtgtcgcaccttaggaggcaaaatattccttattgcaacgggcaacagctgtgtgataagaacgtggcaatcatgcgacttcattccaaccaacttaagatcttgcagtgaaacgagcctactgattcttgatgagtaaccagatggaacctttataccactcaaacatgttagcaaatcaatcttctcttctttcgagagagtgtaccaggctggaggaaggtaaaccctgccggattccgtggttatgggatgtagctccgaccgaacacccatatcttccagatctcgtcgggcgttgagaccatcctttgtagtacctgggttaagtagtaatcccattaaactctcgcatacattcttctcgacatgcatcaaatctatgcagtggcgaacttcaagatccttccagtatggtagtctccagaatattgacttctttttccacatgctcctctcttttgtcttttgtttttccacatgctcctctgtttttccttcgatgtgctcttctcttttcgctttccaactttcctcttttttccaaactcgttggttattcccatcactaagttgtgcacctctgtccctgttagctctgtcgggggtccggctgtatctctgtgtccattgaaattctttctcatattcctatacgggtgataccttgggagaaatctcctgtgacccatgtagaccgtcttgtgtgaatgcttcaaccatttgcttcttgtttcctccatacactccgaacacgcccatttccctttcacagtttggccagaaaggttgccaagggccggataatcgttgatggtacaaaacagcatcgcatggaggttgaaatactcttgtgcatatgcgtcccatgttcgtgtgccctcattccatagcctttcgaagccatcgattatcggcttaaggaacacatccatcccgttgccacgttgcctcggtctcttgaatgagcatggcaagcataatgtactttcttttgaaacacaaccagggaggaaggttatagttaacaagcagaactggccatgtactgtgacgactgctcaaatcaccaaaaggattaatgccgtccgtacacattgcgaaacgcatgtttcttgggtcatttgagaattcctggtaaatcctatcgattgtcctccactgtactgaatctgctgggtgcctcagcatagtatcgactttccgttcttcggcatgccagcgcacaagcttagcttgttccttgttcgcaaacattctcttcatgcgctccgcaattgggagataccacaccacctttgctgggcctcccctctttgacttacttccttcaccttcactctttgctcgtttgtatcttgatgccccacagatagggcagacatccaagtcagcgtattccttgtaatacaaaatgcagtcgttcggacatgcatgaattcttctgacctccaggcccaacggacataatacttgcttcgcttcatatgtcgtctgaggtaaattgttcccctctggcaacagatcctttaacagctcaaggagttctgtaaaattcttgtccgaccagccattactagccttaagcttcatgagttccaacacgcatgacaacttgctgtgcttcgacttgcatccatcatacaacggcatctggcaatcttccaccaacttactaaacttctcataatctctgtcgttgtcctctgagtcttcaatgtcatgcaacattgtagacagacattgagtgtccaaatctatggtctctccacctaaaggagaaggtacgaacatgccttctcgagctgcggcggtgttctctacatcctgatccaacacttcttcagctgcgacatcaggcgcctcttgctctccatgcttggtccagcaggtatatttcttcatgaatccattcattatcaaatgagcatgcacttcatccttgtcttcgatcatctattcattcttacagtccctacatgggcacaacatgtgcatgctcatcctactttttctgtcattatccgcaaatgtgacaaattcagtgaccccctctctatactcggtagacgaacgatgcgcatagtacatccatctacgatccatctgaaatcaacaacatacgaagaaaaataaatgatgatcgatatgttgagaatgaatggagaataatgtgttttttaccttgaattttagtaaaaaatcgccccctttgccctcccaaccgatttgtgaacagtacaatggtcgggatggaaagcagttggcagtttgggggtatttatagacccaacacacctcaaacgggttagataaaaaaagcccgtcaaaggtattgctcatacctttgacgggcttctattcaacggcccgtcactggtatccgctcacctgtgacgggccagaaatgaaagccgtcacaggtggcggcccatcacctctgacggcttctaatgtatcggcccgtcacaggtgaggggatacctgtgacgggccggaagaaagactcctcactggtatacctctgacgggttttcctttcggcccgtcacaggtgaggggatacctgtgacgggccgccgccagatgc

SEQ ID NO: 23741 - DNA, 4999 bp, Oryza sativa
gatcagcgtcccatattatacatttgactgagcacatgcatatctagatcgcatcatgctgatatgtgtacctatgtagcaacctgataaaggttcaactcggtaagattaaacatagcatactcatttggcttggttcggatgcacaagacgtgtaccgaaataagtgttccctaagtttacgtaccaagtttctcctatctattaagttactgtaccatcgatacaatttactctaaaacttttatatttctattcgtagcagtctgaaagacaaagctgctaaattgaaaaatagcaaaaaaatcataattaattctaaaatcagtatttacattcaaattttctagtgatatatacagataaatgtttcttgtttgtttagagcatggccaacagtttcccgatactcttcccaatatcagttttgaggagttttgttggaaaaaatcgctccaacagtagacctaaatcacccctaaaagcttggcgtttccaaacccgcatatttcgttctccacttgtagggaagagactcggcgcccaatccttcaaccgcatgcacttcgcgcgcgctgtgtgaaaattttcctaccaggttcttctttgtgcgttcgtctacctgtgagtcaatccatcacgccagcagcctcatcttccccgcagctgtctgggaaagcagccatggctcccccaagcttccccagcgtcgacatttttttctcagcggcagcgccagacccatctccaacccaattgggcggaccttcgtcggcgctcccccagcaccaccaccgactcgaatcggccgtcgcccctattcatctccaatcgtccctcgaccctaccgcatcctgcagcacagcctgtctctcgcgtcagactggcgctgcgctccccccggtaatgtgcaggcgacaaaggccccatgcgatgcgaccagcagccggcgacaaccggaggtgcccagtcgctggccttcatcgaatcatcgtgcacctcggtcggagtcgatttctgattgttgctgctgctcaaatctggagcttgctattgctgagaactgcttggtggtggtactggaaatttgttgtttgctggctgatgaaaactgttgttctttgctgctaaaaactgctgcttgctagtactgaaaagtactattgcagctgctgaaatatcttgctgcttgctgctgaaaacttcaagttgttaacaccgttcacactaaaaaagctgaaattttttttctgggctgaaaaccccattgttgatgattgcagaaccaatatttttccatgtaaaatacaggagatcgtggtaataatcaagtgaaatatcattttggggcaaatactcagatcgtacctgaagccaatggaaacattgttcaatgcttaaactgtcagttatgatgtcaaagagattgatcactgaatgtcctgaaaggagccgtgaggaggatgcagcattgcagcgtgcgcgagcgtgagtggaggagaggaatgacgattctgttggtagttgtcgatgtggcctactttttttgttttgaggattaaattttgggaatctcttggagataaaaggtattctcataccttaaatcctttttagagatctaaaaaaaatgatttaggggattgaattttgggtggctgttggtgatgctcttacaagagaaataaggctttggtttagattattgggcgaattattgcctaaatcatctacttaattataggaataaatttaacttttaaaaaatatatttacgagtaattctaaacaagtggtttaagcaatacagtaaatgtgtacggggcatcatggtttctttaagtacatgtacggtctttaaacttgtggatgtgtgtcatctagggtcctgtttggatccgcggactaaattttagtccctgtcacatcggatgttgggacaccaattagaagtattaaacgtagattaatgataaaaaactatttcataaccatggactaattcacgagacaaatctattgagcctaattaatccatgattagtctatgtgatactacattaaacatgtgctaattatggattagttaggcttaaaaaattgtctcgcgaattgtaagtagtctatgtttaataatccaaattagtgtctaaacatccgatgtgacaagacctaaagtttagtccctggatctaaacaccacctaggcaactgaactatcaatatatattttttccccaaaacttattttgggtgtcatagatccaaatgaattccagcatgtcacagtgcacctatgtatcgatgggacctacatgaaagtcatataaaaataaattaaaagagagaagagaaaatgatgctttttatttttgaaaaattaaaattaaaatagaggagagagagtaaaaaatgtttatatttttttctacatgtaagcaccaccatggatgccatgtcagcacatgtagcaagttggagcccgttttggtctatatgacactcatgataagttcgaagatctagaaattcattttaagagttcagagatctaaataacatacccatgtaagtttaaggaccacccatacacttcactttttttttcttccttaatatctatttcctccgtttcataatgtaagtttttctagcattgctcatatttatatagatgttagtgaatttagacatcattaacatttatatgaatattagcaacgctaaaaagtcttatattataaaacgtagggaatataaaataaactaaaatattttatatcatggtgtggaggtagtacatagctgacacggcatgtagaccatgtggtcactcgcttgggttggctatgcatgtggttggtgccaccaaggaccaattttgccatgcatggtgaacggcaataactgggagagaaaaaattagaacaatggacattgacgtgtggagagaaaaaaaagtcatatctagccagtttgggaaaacatcattgatgtggtggtacaccatgattaaatcctcatgtctacaaatataattgtgtacattcttggtacagaagtcttaaatttatgctttcatcgttcaaagggaatctatacaatattcgacaattttgaaaaacttctaatgtctattatataattatagtatcattttattataatgataatgtaacttctgaattataatgtaaagtatagatgcatattctagactaaatatcatcgttttttttcttatctactaaatatctctagcaagatatggcaatgaaagtatagatgcatattctagacttcggtccttttggccttctatatattcatcaatcgtcatggtctgattggatcactcgacacagataaaaagattctagcttgcgttagctcacggaaaggtttgatgctagcacttagtagtttctgtaagcaaattaggggacaaatttgctagcacattttatagggtgtatttggtttgctccccaacaagttcaattcctcacatatagctacgaggatcccaatctcatagatacccatattaataattgagtaaactttacaaaactccaagtattattatttaagttgcacaaaatcacaatggtttcatagcaaccactagtacagaacactccataagtgttggtagggaataatctcacttaggtatcgatttttcaaccggcaccacgaagatggaactaatgagaagaaatctatcatcgggagatactcatagaccagataaatagggtattagggtacgttggtacgaggacctacacgatacgacatcaaaacaaacaaaagacaaggattatactggttcaagcccctcgtgaggtaatagacctaatacagtttatatgagattgatatgggaaaccacatagtacaaagagaacagatgaatccgatgataccggcgagatccttgtcgatatcgttcgacaagatctcccagcggctttggcttgtgtccttcggcttcgtaaactatggtcggtatgatggcgctatgattcgatgatcctgaacccctccgacggtgtgccttttataccatgagttgccttagtcttcaagtagaacttggagacagtgaactctgcacgatctagaataatccatgtcctctccgagtaggactctgttaatcaccagcccgtgaggatattttccataatatcttgtatacttccttatcgcatacgaaaatatatcgtatagaagatggtatatatgccaatcttgcatattcggtaaatcgtaggataggagatatgccttatccgtaaccttgacagtagccccctacttcaatttaaatgaactcgcaatgtcatccatgacttctctgccaacgttatcacacccttctgatcgttctcgatgggaaccgagaagacgccgaattcttgataatattgaaagaagttcaacggtccacaagtgaatttaatttgaagtctaatcaatctgtcagcaacgagcttcagaaattttcggcggcaatctctctccttcccttgaaatacgaaccgtctggtagtgcgcttatataaagcgatttactggaaacatttcgagtctgctcgcctctgaagctttccaacttccttgcgcttggactctcggtttccccaatcctcagaaaaaaaaccctacctttcttcttcccctccgttggtcccatcgacggcgatagatctttgggcatccagcaccgatgccgtggcgatgaagaagctgcaggtggatggagcactccccggccgcgaacgcccgaagagagaggacggaggtactgttccccaacccattctaggtcagatggtagtggtagtctggtagaggactttgtgtgaagtggtttctgttagaataattgggctaggcccaacttataatattaaatctcaaaggcccataataaatgttgaggataataataccaccttaggatttaagcgagaaatatctcaaccta

SEQ ID NO: 23742 - DNA, 3956 bp, Oryza sativa
ccgcaacagcgcgtccacgttctttttcctgatagataaggaggccgcgagtccgatccgttttcttcgcttctttcccggtgttagtttctccttctccgcgcctgagttgctctcgcttccccgcttctgatctcttgcgcgcacgagagattggaaggagcagtgcctctgaaaccacaccttcgcctgagatctgcaccgggtaggcgggtgatcaggtttttggggagtgcctcccgcacgactgctcatcgccatgtctggagttgccgccgccactgctggcggaggtggtacgccgccgccgccgacaggagctggatctggatctggagttggtgcgccaggaggtgccgtgaacgacaacaacaacggaggcaattctgcctcaccatccagcggagggccattctcggggtataatcttctcctcctgctactgttgttagcgctattcctgttcccattgttagcgctatcgctatattatgtgcgctatgttcttgttcctgttctacatgatgcctctagcatgttatcgcgttactggtatgttcctgttcctgacattcatgatgcgcatagtatgctactggttatgttaagatcaccctacactgcttatgccatgatcattgtttcaatttcttggattaaaatatgccgattaatgactatatttccaacaatccaaaaacctgataggtcattttcggtagttggctttgctgctgcactgaaaccacatgcttttgatggttcaaactataagagatggaaagcacgtgcactattgtggttgacagcgatgcagtgcttctatgtttcacggggcaaacgaagtgaaccacctctttctcctgaggaagaggccaagttcgaggcttcggattgcctgttccgtggagcattgatcagtgtactcgctgacaacatagtggacgtgtacatgcacatgccttctaggaaggacatgtgggatgcacttgaggccaagttcggagtctctgacgccggcagtgagctgtatgtcatggagcagttctatgactacaagatggtcgatgaccgttctatagtagaacaagctcatgagattcagatgctggctaaggaacttgagaacaacaactgtgagttgccggacaagtttgtggcgggtggcattattgccaaactaccaccttcttggtcggactttgccacttctctaaagcacaagagacaagagttcagtgttcctgatctcattggctctttgggtgttgaggagaaggcgagggcaaaggacgtccggggcaaaaaggttgagggaggttctagtgccaatatggtacagaagaagaaccctcatgcatcccacaacaacaagaaagtcaagcctgatgtcaaacccaaggctgcaaccaattttaagaagaagggcaagggaaaggcaaagggagactgctttgtgtgtggcaagtctgggcattgggccaaggactgtcctgagcgcaaagacaggaagtctgccaacatgatcattagcgagggcggaggaacatcggggtacggtaaaatattacctacagttctctctgtttttcattcacctgattggtgggtggatactggtgctaatattcatgtatgtgctgacatttctttgttttcttcttatcaggtcgggagaggttcctctttgttgatgggaaacgggtcgcttgcggctgttcatggtgttggtacggtcgatctgaagtttacttcgggaaagaccgtgcagctgaagaacgtgcagcatgtcccttcaataaagaagaatctagttagcggctctctattgtgtagagaaggttttagacttgtgtttgagtccaataaatgtgtcgtatctaaatataggacttttgttggaaaaggttatgactgcggaggtttgttccgcttttctttgaatgacatgtgtaataatcataatgctgtgaaccatattagcgagaatgatgagtctaatgtgtggcattcgcgactctgtcatgtgaatttcgggtgtatgacgcgcttagctaacatgagtttaattccaaaattcactttggtcaaaggttccaagtgctatacttgtgttcaatcgaaacaacctcgcaagcctcacaaggcatctgaggcgaggaatttggcacctctagaacttgttcattccgatttgtgcgaaatgaacggcgtgttgactaaagggggaaaaaaatatttcatgacactgatagatgattgcactagattttgctatgtgtatctattgaaaacaaaggatgaggcattgcattactttaaaatctatagagctgaggtagaaaaccaacttgaaaggaaaatcaaacggttgaggtctgatagaggtggggagtatttttccaatgagtttgcatccttttgcgaagagtttggaattattcatgagatgacgcctccctattcaccccaatcaaatggggtggccgaaagaaagaaccgtactctaactgagatggtgaatgccatgttagacactgcggggctttccaaggaatggtggggtgaggcagttctgactgcgtgtcatgtcctgaataaaattccaatgaagcataaggaggtaacacaattcgaggaatgggaaaggaagaaattaaatctctcatacctacgaacatggggctgtttggccaaggtaaatgtacctatagccaaaaagcggaaacttggaccaaaaactgttgattgtgtgtttcttggttatgctatccacagtgtgggttatagattcttaatagtaaactctggagtacccgacatgcatgctggtacaattcttgagtccagagatgctacattctttgagaatgaatttcctatgaaatatacacctagcacttctagtaaagaaactgtcatgccccgtgagcactttgcaccgatagaacacaatgatcaaacgcctgaggaaaatcctgaggaggacaacattgtagatactcgcaagagtaagagacaaagggttgcaaaatcctttggagatgactacattgtatacctcgtagatgacaccccaagaaccatagaagaggcatattcatctcctgacgctgactactggaaggaagcagtacgcagtgaaatggactcgattatgtctaatggtacttgggaagtcgttgagcgtccatatgggtgcaagcccgtaggatgcaaatgggttttcaagaaaaagcttaggcctgatggtacaatcgaaaagtataaggcaaggcttgtggccaagggttatacccaaaaagaaggcgaggacttcttcgacacatactcaccagttgctcgcttgaccacgattcgagtactacttgctctggcagcctctcatggtcttctcgtccatcagatggacgttaagacagctttcctaaacggagagctggaggaggagatctatatggatcaaccagacgggtatgtactagaaggtcaggagggaatggtgtgtaaactattgaaatccttgtatggcctcaagcaagcacctaagaaatggcatgagaagtttgacaccacgcttacatctgcaggctttgttgtgaacgaagctgacaaatgtgtatactatcgctatggtgggggagaaggggtgatcttgtgcttatatgtcgatgacatactgatctttgggaccagccttaatgtgattgaggaggtcaaagactatctgtccaagaattttgaaatgaaggatttgggagaggctgatgttattcttaacatcaaactacaaagaggagatgagggtgggattacacttgtgcaatcccactatgtggacaaggttttgagtcgctttggatatagtgactgcaagccagctcctactgtcgcgaccgagaaaattaccttttcccaaacgctagtgtattaatccccgtcccaggaaaaggccg

SEQ ID NO: 23743 - DNA, 2238 bp, Oryza sativa
agcttctcttactgagggggggggaaagattgagcaagaatgagtacaaccacagtactcagcaagccacaccggcggatgcatgattaatgcaagggggtacaaggggtaatgatataggggttaagttttgcagaaaacagcatttaaaagtcacttagttgcccaaagccatttataaagacgatcctagagctacataatattattaaacaaggccgtgaacccacacgaacctgccttaacccaaggcctacgatgattcagaccgaactggcaacccgaccctgggtcctagctcgtcccaagccaacccaggcccaccattccacattttagttgttaagcaaattttaagaattaaaacactaactggggtacattgctcggcttgcccataaccgagggcgcggctattcgaatagattatactctgatcagaggtgtacatctttacccacaagacacatcttcctcacgtgtaaccacgtgccacataccaccacggtatacggacggaagacgtgacatagttcccaacccatcctagccataaacaagagcaccgacccaaccccacctacggccggaacccccgggacaggcaggcaggattgagccccctagcagcaggacaccagccctgtgccatgacatctcgactaccgggccgcagctcgtgtagccttcatttgtcctagagatgtccatcgacccccgacttcgtccatctccatccgtgtacttttgtttataaccagactgagccacaaactaagccttacccactagacatgtggaagtacggtagtgctttgcaacagaggcccgagcttaatccttatagtacccgaggtacgactaaccaaacccaaccacgcacctcgagcccagcctaaaaccattttgggggttttgaatagagggggaggtgtgtgtccaattccaacataagccaaccattccatagtgtccaaatgatgtgagaattcccaaagtctaaagttataaaaccacctaatgttgcctaattaatcagcgaagcatctacctaaattcatactagtggaaccatgagtagagtacccactagttggggttttgtttatcctagggtgaacaaggtaataataacaatagcaataataatgtcttaacaaaggtaaataggcatggctaaataaaacagtgataacgcgggaatttaaataaagcggtaatgcattaatttaaatcaaaataattttataaactgggattcaatatgctcaaggatgatgtgacttgccttgctcagagagaacggccttccgaaccttcggcgacggccgcgaaccacgcttcgggaacctccggaacgacagaagctacgcaaagcacacaagcaaagctacaagcctataaagaagcaataacaatacataaaaagaaagcacacggttctttaggttataacaaacattaggagacttgaacgggtcgattcagagttcgtatgaccaagatatgatcatccgaagtttaatgctgttatatggagatttgcggattattataattaagctttgcaattataaaacatgtgtaagcgctagcctggaaaagacaggagggctgcgccgttgacatgcggaccccacatgtcaacctaaaggaccgcggtagaccgagtacacagagacggtccacgggtcgacggaagcagatcccgtgtgtcaatcgaggcgagtggccgacaaacggactccactagacaccacacgggctgcacccgtagaaaccacgctgctaccgagcgggcacactaacacggtcaccacacgcacaagcgaacgactaccgacaccggtacacgggtaccggggtcgacaaccgcacaacgggtacggggcgacaccgaaagaacgaggacggggcagcgagggagagggatccttaccaccacgcgacgaggcgtgggaacgacaacgacgaacgggcgcggcggagacggacggcgagggaacgacttcggcggcgatccttggacgaaggcgagacgcggccggcacgaggcttgacgacgcggagccgaggacgaagacgacgacggggctgcagcggcacacttgacgaacgcggacgacggacgagaacggctcgacggagggacgaacgccacgacgatgaggacgacgagaggacgacgacgacgacgacgaccggggccggcgaggagacgacgagggcagccggcgg

SEQ ID NO: 23744 - DNA, 16937 bp, Oryza sativa
gcacgggagagaggggacgacggcggggaggggtggtgcggccacgggggagctcgggaaggggctaaaacgagagaacgcatggagggggttccattttatagcggagggaagcgagccgagcacgggaggagcggggaacggcggcggaaatggcggccggcggccatggaaagcggccggagttggcgcgtccgttcccggcgattgggggcgccattcaagggggaattaagggggaaagagagaggagggaaaggggattaattccccctaatcaatttggaaagagccggcttgaatggagcggatttggaggaggaacggcgctagggttcacgggagagagaggaaggaggccggcggctggaggtcggggacgcgcctgacaggcgggacccacgcgggaggcgcgcggtcaacgcgcggcaacggcgcgcatgcacgcgcacgtgcgcggcacgggtgggaggcgcggctcggcttgggccgggtgaagccgaggcggcccaggaggagaggagggagaggcagcccgggacggagagggaggaggagggagtgggccgagaggaaggagaggaggcccaagagaaggagggagaggaggaaaagagagggaggagagggagactttggccgtgggccggaagagagagagggagtggcccaaaagaaaaggaggattatttttaggtttttctttttaataaactttgataattgtttttgttgcttaataattatttccggtgctctgaaaattcaagtaaaatttgagggctccttttagaccaaagagaatttaacaaaaattctccaggccacatttgaatttttcttgtatgtattttagtgtttgccaatttctttccgaattttaattaattctattattccttttagcgaatgatttttaatttcgggatgaatttatcaggacgtgacacctactccttatgatcccagcgtgctattaaggaaaaaccgaagaatagcaagggatcaactaagatactctcaaattattggttcattgatgtacttgtatagcgcaacgaggcctgacatctcatttgctgtaagcaagctgagccggtttgtctcaaatccgggagatgatcattggcaggctctggaaagagtaatgcgctatctaaagggcactatgagctatggaattcactataccgggtatccaaaagtactagaagggtatagtgactcaaactggatatctgatgctgatgagataaaagccacaagtggatatgcgttcacacttggaggtggcgctgtttcctggaagtcttgcaagcagaccatcttaacgaggtcaacaatggaagcagaacttacagcactagatactgcgacagttgaggccgagtggcttcgtgaactcctgatggatttgccggtggttgaaaaaccagtgccagctatcctaatgaactgcgataatcaaacagtgattattaaagtgaacagttccaaggacaacatgaagtcatctagacacatcaagagaagactgaaatctgtccactccggagtgatagcattggactatgtccaaacggctagaaatctggcagatcagtttaccaaggggctaccacgtaatgtgatagacagtgcatcgagggaaatggacttgatacccacctaaggttgcataatagtggaaacctgtccattgtgatcggagatcccgtgaatttggatggtgaaacaaactattgtgtgactgagagaagagacccttgaaaagggcttattttcatgatgtgcttctcttctttcctgcatggtaggatggcttatgtcttaatgtgatccgagtggcttttccaagcagagatgttgacctgcagaacatctcagaaggaacacacctatatgagttcgactgctagtcacagtctatgaggtttgggcgatctctagatactcatgaaaggcctggagtttgacttatatgctccaaacagaggggatgcgaacggcagcccagtaccagtcaaggttctgagtgaaacctgatcacacaaaacttacaattcaaggcatagtccattgttcagttgtggtctgatgtagctcatttcctaggtggaagttcaacataacagtctccaccaaaactctggtatatcaaacaggcacaacattgagaacatttcttatgagccttgaaatttggtggggattgttagaataattgggctaggcccaacttataatattaaatctcaaaggcccataataaatgttgaggataataataccaccttaggatttaagcgagaaatatctcaacctaaatagggagttattggaggctccctgttgaccagttgaggtgggggtcggaatgccacacgcgcgcgcgcgcgcgccgggccgggccgggccgggccgtggccgtggctggcggcgtgcgtgcgtcacgtcacgtcgctatccttttgcagccactaacccacgttcccacgattccctccgcaacagcgcatccacgttctttctcctgatagataaggaggccgcgagtccgatccgttttcttcgcttctttcccggtgttagtttctccttctccgcgcctgagttgctctcgcttccccgcttctgatctcttgcgcgcacgagagattggaaggagcagtgcctccgaaaccacaccttcgcctgagatctgcaccgggtaggcgggtgatctggtttttggggagtgcctcccgcacgactgctcatcgccatgtctggagttgccgccgccactgctggcggaggtggtacgccgccgccgccgacaggagctggatctggatccagagctggtgcgccaggaggtgccgtgaacgacaacaacaacggaggcaattctgcctcaccatccagcggagggccattctcggtgtataatcttctcctcctgctactgttgttagcgctattcctgttcccattgctagcgctatcgctatattatgtgcgctatgttcttgttcctgttctatatgatgcctctagcatgttatcgcgttactggtatgttcctgttcctgacattcatgatgcgcatagtatgttactggttatgttaagatcaccctacactgcttatgccatgatcattgtttcaatttcttggattaaaatatgccgattaatgactatatttccaacagtttcttgcctccgccttctgaattccttcttttgatcttgaacttctaccggctttccctaatgcacatcaactccaactccattgcttttctgagcattttcgttcacctttgcgaggcctacgttggtgtggtgccttgatctcttccgctactactacaagctccggtggatggaatccaacagaatatcaggatgttgtggatttcatcttcctgatggtatgaaggcggtttacatccccttccaatgcccatcatcccggagccaatggtggtcgaaatggttttattttgagataaaaaacctcgaccctgtactgatgttcccggaggacaagcctgagcattctcaggattggaccaccaagccttctctgacctcctcactcaagagtttgtcaatacaattagcagcctgcgagaatggggattgactgggtatgaagtctctcaagacttcattacccggtgtatccaaccgctccaggcccgtgctcaccctgcctttgactacatggggaaggatgacgagacgcggatctcgacgcggggtactcgttctcgtgtcatcgtctatatgtttcttttgctgtcattgtactcatatttatcctgaaatggtcctgtctccctttgcagatcttagcaacaagacggtggctcaacgcgtggggcgggtgctgataagcgttccgtcaggtgccgatgagccgacgagtgtcgtctgcgagttcaccaacgccgagaagtccgccatcatcaacataagtgtctgactccattttgttcacttgtctcctcttgatttgggaaacgaagtgacttcatcttgtacaggcactacccttggcggatgacattgggcccctcgccgaccgccaggccgccgcctctttaaaggaaaagatctccctgtagacgacgacggtgacgggatccatgacaagcggcaacggcaccaaaatccctaagaggaagtgggccctcactgctcctagtgccggttctcattcttgaacgagtggctctgaggtgagtgccttttctttttactctcggtatatcttgtttccggcgagaagtcagctcttatttgccttgttacttagggtattggcgatctccatctagctcccagactgctgaagagggccaaaaccaagtaagtgaaatctcgagctcttgttctcggagttataacttctgattttattctgtgttcaatcagcacccctttgtgtttttattgacagggcctccccagcgtcctcagctcaaagcgaggaccgtgtcgcgaccagcgcgtcgcctgtggccgccgcagtgcgcacttgatccaccgtcctcgtgccgtctccgactccgccaccgccagcctgtagcgaccctcgtattccacttccgaggtagaataccggtctacggctcattccttagtaagaatcaacttaccaagacctgagcacaccagagtagcatagcaaaaaacaattgtagcgaaacccattaaataaaaaccataagaaattagtttttatcaaaataataacactaacagtaccttgctcttctatatcatcatcaccttcatcatttagttgatgtagagatatgcaacacttgatcaatttttgcagaatcttctcgtcacctaattgttagctcaacactacaaggaataatatataggggatgagtacgaatggtactcaacaagtccaactatagcaatccaacaaatatatgcccataatccacctgcataatacatatatgtccaaagccaccataatccaacaaggaattttatgcatgttcataaaacagtgttgtaaaaactcatattaagtaattataaaatctactgcatataaggcaccaaaggtattagaacctccgataggttcctttcctaccgcattcgcggtttctacccaaaacagggagtgacatatcacacttcatacactctgcagaggtgtgtctctgtacccacagacgccttaaaccttttaatgcccacgcccgttggtgcttgaagcacactttatggtgtatgccggcaaggctaaggtcataagcttttcatcaatcccatctatcaattatctctgcgggtgattcccgcaacaacggcgaatcattggatcccgcaacaatggtgatccacatcatctaatcggattccacaacaacaacaaccctcatcactaggccacgctcacaggattcgcggaagtccttaagcccgcaggataaagccattaagaaagaactactaagctagcctatcccattccaggtcatgtggttgatacgatcgctacagcacttgaatgccatataacaattgttatttaaccttacgatgataaatatatacagctgaaccccgacaaccatggcaagttcagaatacacctatatatgaccgactgctccaccagccaatccaatccatcagcatatttattttaattatagaaagtataatttaatgctaggtgatacatatagattgcaattacgaaaatataacaagagttggtcaaaggtgttggacttgcttgcgatacccaaaattgaagatgaataaagagagaatctattctatgccactgagtttatcccaattcaacgattcaccagtgacattgtctctttctacaatataccgatgactttattaactgtctacaatatgccattgagatggggctctttttaaaaaatacccaaaatacccttagagacatacatggttaacagttaatttatctcattagaaagtttcaaaaaaataaaattttttatatggcctcctcacataacagggaagtatgtatacatattttcaattttttttggtatttttttagaaaaaatatttttttgtgtggtatactagagagaaatagcttacacaaaagataatagcaaaaaaaatcttatgttgcatatgaaagataatttacattaaaaaaacaacacaaaaaaatgttttatataggatataacatatatgctatattttataaaaatataaatagaaaaaaattgaaacttatatactgtgtaaggaggccacataaaagtttcacatttttttgaaacttctaatgagataaatcaactgttaatcttatatgtccataagggtattttaggtattattgaaaaataagcctaacccaatatcatattgtagaacaattgataaagtcaccgatatattgtagaaagagacaaagtcagtggtaaattgttgaactataacaaacttagttgtatagaatagattctctcatgaataaatcaatgaagaattccaagaaatccgatataaacgcccaactgaaagaaacaataaaacacaacaaaacacgagaatgtttatatgaatgcgatgcacatgatatgtctaaccgtaatgcacatgctggatatatataggttatggacttacttttattaacttttattttaagaacgagtaattattttacttaaagaaatttgattcactatagagattttattcaacagccctaagatatattgctttcatagaactaaatatatttgttttcttagaaaaatagtttataagatatatttcaagaaatacttttatttagatttataatatgaaagatttggttgcatatatatttaattcaaaaagacacactttaatttaatttaaaaatcatctgaagtgaattaaaataagtagctgtaataatacattagaatatgcaagaattaagtttgaatagtttaaagaatttaaatgtcatatattaatttttctttattttctaactctacctctaaattttattagcccaactactaaatcccaataaacacaagccacttagcccaccatcttcatctgagtcttttatccctatgccattaagaaagttgctgcttacctgtgtgccaccaaaaagtttggagttacttgtatgccatgagcccaactttcgttgacccgtatgctattttagatggatggagacataacagaggtgttaggggctctgtaaagacagttttgtccttgtgtacaataatgggtttaaaaaatcagaaaagtgaaaaataatttagaaaaggcgttaaaaatcaaaaaatggaaaataattttttaaaaaaggtaaaaatcagaaaaaagtgagaataaattttaaaaatgtttaaaaatctgggaaaaattgggaaaatgtgggaaaaatcttcttgatggcttgcttcttccttggtgtctccactgtccgtggagagacttcataggatgcaatgtcgtcatgaacaactggagggtgttcaatttggagagcaaaggggttattggatctagttacagaccttgtgtgaaagcaagaaaaggagatcagtgaggttgtaaatgacaagatcaggaaaagtgaaagatcatacctgctcgtcaccgaattgtcagtacttgctgatgttggtggccccttctttttggcggcgtttttaactctctttggcttctgtgtagcactggccaccacctcattgtgtgggaataccatgcctgatccaggagtggccacaacaatgctagtcactgtgttactggaagatgctttcttcagccttttttttggtggacccctgaaataaagtttgggaaattgttattttgcataggtaaacatcaagtgttgtaattgtgtagctatgtctaggaagtctacctctcagcctcatatgcagctatgtcatctggattgcctttcttacatgtgtaccaatggtgccctaactagtggcatattgggcacttatgttgccttttgccagtacctcccttagtgcctaatttcttcctactactacctccctccaaagctgatttcatcatgttcttccttcttcctcctgcagttgacttaagcaatgaaggatgcatgaagaagccatgggtgggtttggaccacatggacttgtcaggaatagagggcacagaaccttcatatgcaattttgaatttctcaattgaatagcactcatccacatagtcttcaagattggccccagggattgatgtgatgtaggcaatggcatgtttgcatggtattcctgaccattgccaagctctgcaagagcatgtcctctcttttatgttcactacaaacctgaaggtactagcagaatttcccttagcacaaacttctgcaatgccatcaggtgagcttgtgattacttcaatgtcaaggttatagctagctcctctcaacttctgcactatatgaggcaagatctttccttcaaacttttcggcaaccctttttcaattattccatttaatcaagatcatctgtctaatggtatccatcaagtcatccagatgcaggcccttctgatcctttacctgccaacatagcaatctaattgttagtaaacatgaaaatcaatgcaaagaaagtgttaaacaagacaagcttacccatttattgaatgcctcagcgaagttattggtaacataatccacttttgacaaagtggaaaattggctcctggtccacaatttcctgtgattttcctgaagatatttcatagcctctggtttggctacagccatggcttgataatgtttatcaaacatgcaaggactccaagaatatgcagatgcccacaggtgatcatcaaaaatttgtccactatgtctcttcttgaaattctgtactagatggtacatacactctctatgtttagcatatgaaaaaaccacactcaccccatacatcactgcttgcccacaatcagtgctgaatgtaagcccaactgggttgcctatagcttctttcaacctattcataaaccactcccaattctcatttgtttctgagtcaatgacaccaatagctactgggtacatccaattgtgaccatcaactgcacaagctacacacaaccggcccctgaaccttccatttaaaaatgtactatctactgcaagatatggcctacaacctcataggaaaccatcaacacaagctttcaaagcaaaaaacagcctattaaaccttattttgttgttgatggtatggtgatcaattacaacaaaggatccaggattagtatcctctatctgagccttaaatctatacaggttgtcaaaactgcaggaccaaggaccataaagtttatccatagcacgttgcctacctagataaactttcctgtaggttacctcaactttgtggctctccttcaacctcctcctcagctctttggcacccaatgtttcatcttccttcaaccaatcaagcacttgttcacagacccaaaactgtgtcactcctacacaagtgcctgccctcctagtgctttgacaattctcatgatcgtatgggttccttgtgatctgccaatttagacatcaatggttatttactaccaaaaaaaagacaccaatgcatatagagtgttacaaaaaatttaccttcactatgacttgatcactcaaaagagtggtatgaattctccacctacagcccacattcttgccactgcaatacaccctgtaccgagatttatcactcttttcaatgttatattggaactcatatttggtagcatgtgtagctaaagccaacttaaaagcattcatgtctgaatacatagtgcctactgccataggaggatcattcttgtcatagtctgcatcaggtttctgggaaggctctctatatgtaacaatgtcatcttcctctatttcatcttcctctacttcatcatctaacaatgtgtctggttcagattgactagtgggaatgggaggtgcaggaccaatgtcaatatacaagcattcatcatcaacactcacatgctcattggatgggtttgggctagcaagggattcactatctgcagatttagtatggtttagttcaactgattgcccactcccaatttcccactatgaaatgtcaggaggctcactatccaatccggcgtccatcctacagatgaataatcccccactgtgaaatgtcagtgttgaatggacaggaaagaatagaggttttacctcgctgcttccatgggcggtgacctggaggtggcttggaggcgacgtgggcacgggcggcgaccaggagccggcctggaggcggcttggaggcagggggcgccggcctgggggcgagggcgcaagggcgcgcctgcctggacgcgcggcgacaggcgcgcggcgatggggcgcgccacctgggcgcgcggcgacggggcgacggggcacgccggcctggggctacggggtgacgaggcgacaggccgacggggcgacggggcgccggcgaggctaggcgacggtgacggctccggcaaggtgaggtggcggcggtggtgtgcggctagggttagggtgcagcggcgtgcggcaaaaatgaggagagagcaagagaggagaaagtgagagtatagagctgaaaatagagtaggggcaaattagccattttcatacttgggtcccacatgtcggggatatggactcgttaagttctaacataaggtggacggaatggcacacgggtcaatgaaagttaggctcatggcatacaggtgactccaaacttttttgtggcagacaggtaaggagcaactttttttaatggcataggggtaaaagactctcttcctcttctctccctttctcgttatctttctttttctctcgctctcccctacgctgccacatcctcaggtctcgcccgccgctgttccctgcctccggcagccgccccgcagccgctgctggcctaaatcggttctgtggctcctcatgagtctgaccccaagctaaacctaacttccaacctcctcaaccctagatgcagctggcagcaaaactccggcgaggtaaggattcaggggaagttccctggcttccaccactgctacaaccacaactcctctcttctacttcctccttctctaatctctagtgttttgtactatcaaggtggttcttgtcacacccagaaatttagcccaaatttccagactattttgtgtattaaatccctgtccagtaccagccagggtacacaaaatgacaagtaatatacagttccaaacgtaaataaagcgtaaatacttacagaagaggcacttaatcctcacaccgaaaagaaagcagcagcagcagaaaagacgatcctagcagggcttcagctccactccacaggcaaaactcaactggggtctgagccttggtcttctaacttcgcctccagctcagaagcactacacttctgaaaaaaagggagaataatagcaaggctgagtacaaccaccgtactcagcaagccacaccgatgatgcagacgtgcaaggggatacaaggacggcttgtggctatttgcataaaggtggttgtaaaacattttattgagcaaaacagtaaaactattgagtaattaaagtaacattaaatctccactgatcaacgctacaccacgttgaacaggcccaaccaacccacctgaactacagtgcattgagtcgattttttaaggtgggactaatcacggtgaatctggtcgaccgcccataaccacgggcacggctattcgaatagttttactctggccagaggtttacaattgtaaccacaagacacagccccacgacatgtttccgtgcgccgacatgccaccaccacataccggaaagaggcagtgacaggacccttcgcataaccccctctaaccaagcacaccacacctcaggtttcacccccactcctcgcaaggcagcgggcagtcccctctcgtgccatggtgaatccggaagccacataggccgtcgcagggcccatccaaactccatcatgcccacccttacctggatgcgtcagctagaggaaagctacactacaagcccagccgttgcccacgctggcttgtggaaagtacgaggaattcttccagggtttcccgcgaaccggtccttaactgccatgggtgcgactagtaaaaccatgcacccacagcccaccattcagtcgcattttagttggataattacgaccactgaaacatggccgggtgtctcgagcacgcagctcgttctgatgctaaaaaggtctaatactgcaattatcccatcaactgagctagttgtaattaagcatggctaagcatatagttctagctaggtcacataagtaacatgagctagtcgatttattacccaatgttgacaaatgacatatatcaagtaaacatagcacaagcaagcagataggtaatacccggatcccatgtaattagcaagacatgcatgtttatttgcaaacggtaaaatatttataaattgggatcaacatgctcaaggggaatgtgtgacttgccttgcttcttcaaaacaatcttccgaactcttttcctcgcgaccgcgaacttccgaaacgacggatcctacacgctagcacgcaaaacgaggaaaaactctaataaacaccaagaaaacagtacatgaaaagtaaaaaaacatgtagagcttaattttagatgaatttttcaagttgaatggctcaaattggagttcgtatgaattagatatgaattttagaagttttgagccatttaaatgaatttctggaattaataccaatttattgcgcaattattatttatttttacaaaggaaaagcggactgctgacgttagcaagagggaggcgcggaccgcgtccacaaaaggggcgggccccacacgtcagcgacacaagggggtaccggcccaccgtggaccgagtccacggcggcgaccggccacgcgggcacgcccccgatggcccagatcagccaaggccgatcggacggctggggacggccgggtggcgcggcctggccatcacgcacacaaggccagcggcggtggcggcacacgggccgagcggccaccggcggcggctgcgcgacgcgagcaagcatgggaggcggccggcgaaggggagaaagagggaagggaaggggaggggaggcggttctcaccgtgggctaacgacggaagagggcggccggtggcgatcggaaagactcctcagcggcgagcggcacacgggaaatggcggacggacttcgcctcgacctaaggaaggagaagacgggattaggcgaggaaggggaggcatgaggcggcgggaaaagcggccggatgaagaggaagaggtggggcttaccagtgcgcgaggggagtggaactctggcggaattccggcgaagaggggcggcgaccgaggagcggcgatgttggggacagccacggcgcggcccggagtggttgggagcggcagcactcggcgaccggaggtggcaaaacggcggcggcctcgggttcgtggtggagaggtggttgcggcggcaggttggggaattagagcgagggccggtgtgcggcacgaagcggcggagctgatggtgggggcggcgcggcttgaggtggacgggaacagtggcaagcggcggccggaggtggcaaaacagtggcggcctcgatcttgatggtgggaatggtgctgcgggggtggaaggggagaacggagtggatgccggggcgcggcacgacgcggcggagcttttggcggcggcggcgcagcgcggcagcgacgggagcggcgggaaacggcggcgagcggcggagcgcgggctcgcgcggggagtacgggagagggtgtgagggactcggggaggagggggaaacggaagaggattgcccggggaaggtttatatagctccgggaggaggaaatcgtggccgggcggggaggatttgaaggaggaatgggcaccagtgacgtgggcgaggtggagctcgaataggcgcgaaaatttggggaaaaatgggggacggggtggaggagtgggcggcgaccacgtccgcacggtcggacgtgcgcgcgggaggctggaggcggcggttttagcggcgtagtgggcggcaatggcggttgccgctgggtggcttgaggttggggatgacaggtggggtccacaggtcccacctgtcagggagggagagagaggaagcgggatgggtaggaaaaatagactccaagggcgagcgggccgatggagagaggcggcccgagagggagagaaaggaagggggaaggggacgggccgcggggaggagggaggaggattgggccgggagcggcccaaagacgaagaggggagttttaaattgttttccatttaatttaattggttaaatgaactttgtgctattaaaattatttcttgagctccgaaaattcacagaaaaatctggaggatattttagggcacaaagaatattacaaaatattcttggccaatgatttttaaaggaaaattttaattcttccaataatttcacttgattgaattgatttaacttttatttaatttctaggaaatggattattaaatgatttttaatcccgaacaaaaatcagagcgttactgttctcccccttttctactactgatttatggttgtgatgcactgttgatacttgtagactaatcctaatggtcaacttgatgactctatgctatggattgtaattactagttctagggttctaggtcaattgatttgctagatttgatgatgcctatatgcccatgatgaatgaatgctcagatgaataaacctatgaattttattactgaaattaaaaccacactaacttgattatatccttatatatgcttatgaatgaattgaatgaatgagtgcgcatataaacagattaatgacatagttatgcaataatttaatttccactaacatgattatgttcttatacatgctgacatttagaagtaactgaaattatgaaatagtaacacactacatgaacagatctttataactgtttcactaaataacatattaaaccaccaagctgcatagtttgataattataataaaatatatataccatggattattgactgtagtccataaagcttgttcttgaggttagcagataatgatttgtttcattggacgatgtactgctactatctatgccttatagatcaacaactcaatttatgcaacaatttattaacatagttgatgaggggaggattaaactgttgatctgataataaacaattgctccaactagtaatctattttactggaatatgctactacatgttcctttttattttaatctgaactatcgatgtctttagaacaattcagtaaggtttaaactaactcttaactatttatgaaatcaggttcatggtaaattttaaaatatgagctagggttcaggtattaattcctaagtctaagatttgatttgctctatgcatcaagtatgatatatctgtatgaacaagatctgaatttctagatttgataatagcataagtctaatcacatacacacatacacatacacgcacacacacatacatacatacatacacagacacatacatacatacacacatacatacacacacatacacacacacacaacacacacacacagacagacagacacacacagacacacagacacacacacacacagagacagacacacagacagacagacacaggcacacacacagacagacacacaacacacacacacatactctctctcctctctttatatatatatatatgtatatatgtatatatatatatatatatatgttactacatggcgtaattgtaacatcgtggtgaaattgtagtaaactaggaatcgaaacaaaaatatacatgctaaccatatttttgttactacacaaaagtgtaagtgttactgcatggcagatacatgctaccacaagtttatgcagtaacactacaaaacttataatatttaccacactttcacaataacgttatgatggaattgtagtaatgtataatagatagtaataacacttatgatatagtattactacttgtggagagttaaatttcaaaagaccaatctttgaaggttctctctatccttgccccatgagtaaactgagccaattcatctctctctccatattactggaccttttttttcttactatacatattcttgcagtaacgttatcaagtaatcgcagtaacacattatgttactatgaaacttataatcgttactacatcttgtagtaacgatattacgtgattgcagtaacgcatagaagatcagcagtaatacttatgatatagaattactgctcggggagagccaaatttttaaaaaaccaatctttgaagggtaatatctctcacatcatgtactacttttaaaaaccgtttacaccatgatgttagaaaaggagtgcttatcgaaagtagatccgtcatgactatattatgaatacattccaatattgttactgcaagtaagacatggtgttactgcactatgaacatcgcgttactacgtcgttcatatctgatcccttccccctcccgatatagggtaagactattctacgttactacgtcgttcatatctgatcccttccccctcccgatatagggtaagactattctacacccagggtatagaatccccatcccttctcatctgatcccctccccctcccgatctccttactacgtcgttcatatctgatcccttccccctcccgatatagggtaagactattctacacccagggtatagaatccccatcccttctcatctaatcccctcc

SEQ ID NO: 23745 - DNA, 16035 bp, Oryza sativa
caggaatcaaaacaaaaatatatgggttaaagcctcacatgctaaccatatacttgttactgcacaaaagtagaagtgttactacatggtaggtgcatgttaccacttcaaagtagctatgttactgcacgataattgtagttttactatgtcatttttacgagatgaagattaaataggtgggctataggtaatgtctgtaggtcactttgagcgaggtctgattgatgtaggagtgttttgaacaatttcatacatttggtaaaaccatgttactgcatgtatatgcccttgttactgcaagttacccattctgttactgcacgtggagggttaaagttcaaagtgccaatctttgaaaagcaatatctcacaagatatatattattttttaaaatcgttcccaccatgatgctatagtgttactgcatgtagagggttaaacttcaaaatgtatctacgtactcccctcttcaagaaaccgttcttcctccctcttctcaagaaaaccggtctcctcccaccaatatagtgttactacattgttgacagaaaacacgtggcctgggagatctgcttaactccagtgcaggtccaaagctcgccttcggatatattagcatgccagttgatttgatcctgtaatcaacaagaaatagaagcaaagaaaccatagttaaatctataaatgatagccgatcggctagatgccgatgacatatcatttatccttaggccgatgttatccatgtatcgatcggcagtcatgaattagtaaagaagaactaaatctactcgatcggctgtagatattaacaatatatactccttatatcgatgcatacttaaatcaagtgattgggaaagatcggtcatcatgccgagacagtataaatcacttagatcaaaatatatgtcaataaaaagattagatatgtttatagcatagccgattagatggatctagcatgtatcggctaatacttcgatactactctatatcaagatattaaagcaagtataatatattgagcaaaagcctaacatacttaaatacagcaatatctcaatataaagggcagatttaacatgtcaatgaggcatatagaacaaatgaagttaaatcagatacgatcagctgaaactccgatactattcaaatcggcaactagaaggcaggctagagatcgatattctaagcacgacttaatagatcaaactaaactgatgcagcattaagtatgaaaagaagaacgatatctagacaatcaagccgctagaagtttcatagaatggtagatatctcatataatctagatcaacgtcaagatctaacctaatcggctgtcttctgcatacagatattggccgatagtagtctagatggcgatattgctagagattatgtaagatatatgataacttgatgaattacataaacaagattagagtgtcatgaagatggaagcactaatcctaagaacgcaatccatcacgacgaattttacctcttgttgaagatcgaaatcgatgcagctcaacctgaaagcaagaacccgtcgaaacaaaactaaagcaagaagggtggcgatgcgccgaaattgtgttgaacatgtgtgttaaaaattacttgggactcggggtctatttatacccgaggattacaagatatgcccataccggacacgaccattatctctaacaaactctaagataccacaagactttgcggcagacttttgcccacccttatctataaggaatttacataaaatatcctaattaatagatataattaccttcccaggactctatccatgcatggcaatcatcctgaagtacattcacttgaacccgatgtcgcacacaagtcgtattgtcggaatcggctatatcggcttatttagctcgactcagactcagccgatcttgtcgtagccgatctagacttcagccgattcctgccctgttttcaaactcgatctccgcttccgactttgcttcgatctaatcttctctccgacgctgatgttaccaaatttggttgttaacacatgccccccaagtccgagatatttgataatgttccggatttgccataagctgactccgagcaagtttcgcactccaccattattccagcgctttaaatactaaccgttacccccgagaaatctcacgccgtgacttccgttttcaccgctcaagcgaaaccttttctctcttttcttggcgattcctcggccgcaaaggcgattcctaggcgacttccttcccagcgagatctccgcccgcaccaatgtcgtcttccgccaacccacttggtgcaccatcggccgaacacgctgaggtaagttctcatcggctaaatccccttctttagtagcaaatcgatcttctccaatctgatatcactctctccctctggattgctttggatttgtagcacctttccaacctagttgcgattcccagcctggcgcatgaaaatcactactttcttggcccagtcggcaatccagaccccactgagtttattattggtgaaaccaataggatccccttcagattaaccaacccggatctaggtcactggaagaacaccttcaaatcctggccatccctagagaaagttccaccagaaaagagctggaccacatggttcaaacgtgtatcagccagcaagagggttcactgggatgaaattggaatcggccaagcacttgaccttactatagcgaactcagccaaagatgaacacctgatggcagctgcttcttacttctggtcaaacactaccaatgcctttctgttcaatcaaggaccgatgactccaactctcatagatatcagtatgatcacaggtctggatgttacctcatcggccaaccctatgagtttgaacacaaagaaccaatatgacttcaaaaccaaaagtatagggggttggtcaggctatgtggcagcatacatgggccaaggctcggtcacccctcgagaacatgtggctttcctattaatgtggctagaaaaatttcttttttgtggatcaagttgtggccccacaatcaactggcaatttctggctgaagctctagaaacaaagagacaaattctccttgggcaaaattctcctcggctatctataccagatgctgagcaatgcatcagctaagatagcagtcggctcagtagttagagcaggtggaccctagtggctactacaaacctggttaaacctgatagtcatgaaggttgtcaatcggccatccgtattagaagctgaattcccaagactagagccaattgtagatgatgatggagaagagcgtactcatcggagatgcacatcatatggagaatacgcttctacaccaactaatgccggagcaaaactatcggctgaactgctcaaggattagttttgtagcttctatgaagactttcagaaagatgctagaatctggttcctttatgaagactctgcacaacttgagcacccagtggacttcagattcgaagacatcaaccatgaagtataccaatcatgcagggaaatcttctcggctgcaatcagcccatgtatccttcctgttggcattcatcaaggaagaaacatccaagcttcttatgaattctatcatccaatgagctcagctagacaactcggaatgggccaactcccaattggcttgttctttgctgacaagatccaatgccgaggagggatttcatcaaccctgatgatggatcggctgcttagccttcaaggaccccctctgggcagtattgacaacatagaactggcaacattcagaagcaaaagcttcgataggtggtggggtgaatggaaactgcatttattccaccaaccagcttcaatatatatgacagacctctttccagatgttgtccctcaagtaagtctccaacttttcccaattttagctaaataactgtttggccaattaatcttaaccaatcgtccttttggtttgcagacaacggaatcttcccctcctcatcaaagcaacagtggcaaagacatccaatatgccccaggtttaattcctaacggaggtgggctatcccctccagttatcggctatgatgcccccaagacctcagctcttcttcaagggctcgttagagaaccagccgatgccagcaaaaagaggaaaaccagatcgtcggctgtaagcatcgtagccccaattaagaagaagaagacaaagaaatccaagccagctgatgatctgcctaccctggatccatccatcgaacaagctctggatgaagaggccattgaagacgaggttgatcaggccgtagccgaggtaagtgacactgaaagaacaccatcggcttcgcataaacaaacctctccaactccttctgctccggttcatttctcaagggtaagtgtttcttgttaatccctttcatgattattttgtcttatagccgatcactcccaaatcttataattgtagaaaaagaagactgcggtgaagaagaaatcggctgcagcaacatctaaaccagctccaccagtaagatagttttaactttcattagttaatttttagccgattctatttgacacttgtttccttttcagccttcacctcctccttctccttctgttcaacaatcatcaagtgatcagactccctcagctgcgggaagtcaccacgtcgaggaagaagaacaaccagctgctcctgctaccctagtaagtttcttttatcataacaagcattcaaatcggctgtaatcgtttaacctctaatctgcttctaaactgtcactgcaggtattagccgatcttttctcttttgacatcagggactaccttgatgaaggagaagaagataccacaagcaaagccttggctcctttatctgatgatgtgaagaaaactctaggaagcattttagatcggctagaggcatcatcgctaaacagcttggtggttgactgtggctcaatcaaggctcggctacatgagattcaagctttaatcctagatgagttagccgatatccttactccagccgtttctcttgagcaacaccaattcaaactggagaaagccatgttaagattagccgaacggcgagaacgtaaggatattgaggccactatccaagccaaccgacaacttgtgcatgaagagaagtccaaacttgatcaactatctgaaggcctaatcaagtctaacattgatcggcttgaggctcgcaagattgacctcttaacacaacttgaagaatgtaacgctgagctggatatggaacacaagaaactagccgatctccccaagtctattgaagaacagaaagcgagactcaaatcggctataaagcatgttgctgaactgaccaagtccctgaaagttatccctcgaaccgatgctcaagatgcccaagccatagaggaagtagagcagattaggcagaaggctatatcggctatccagcgatacttatcgcggtaatctttgtgtaataggacttagaatttttgtaatcggctaaaacattctgatactgtactgttggaacgatcctttgcgccgattaatatgactttgaaatttgcgcaaacaaaattgaaaattttactgcatgctgatatatatatgcccccctagttttacaatgtcgagagcattaataaaattatgaaataactaagggcgatataacaatatcggccagctcaaggctatgtaaacacatcggctatcatggatcggcaaaagtagccgatcatgcgttaacccaaacacttgggtaatatttcttcaaatatttaccattgagtgctcgcccataaacttcgccgtcaagcccttgcaacatatatgctcccttagacacaaccttatgaatatggaatggtccctcccaattcggcgaccacttgccgaatttactatcacgagtaccaatcggcaaaatcagcttccatacaagttctccttccgaaaaatatttagatataactttcttattataatgccgagcagcacgttccttatccttagtaacctttgcaagggctcgcaatcgtgactgaaccaaatcctccctctcatcagccataagattgtaatactcatcggctgttaaatcgttttgcagctccgttcgtcgagagccgattctaacttcccatagcaaaacagcctcatgtccataaacaagtttataaggaggaacttgaatcgatccatgacaggccatcctataagaccacaatgcttcggccaaccgagtatgtcattgccgaggataatcagaaatttttcgcttaatcaatttgatcaaacttttattagatgcctcggcttgcccattagcttgtgcataataaggtgaagaattcaacaacttgatacccacgctatcggtaaactgaacaaactcatcggacacgaagattgaaccttgatccgtagtaatagttcctgaacgaattgaatagcatccccagaatcaaccttcttcaaaggaatcgcctctacccacttggtgaaataatcagttgccaccaatataaatttatgccctttactcgatggtggatttatcataccgatcatatcaattccccaacctctgaacggccatggtttaataataggattcatagccgacgccggtgctcgctgaattgctccaaacttctgacaatcttgacatcccttataatatttgaaacaatcctccagcattgtcggccaaaagtaccctacacaccgaagcaaccacttcatcttgtgagctgattgatgaataccacaaatcccatcgtgaacttcactgattgcaaccttagcctgatcggcactcaagcacttaagtaataccccatcaatcgtctgataataaagctcatcatccaacagtgtatactttaatgccctataccttaatttcctggaagccgattgagatggattactcaaatactgatgcacatcatacctccaatcatcggctaacattgctgcaatctcaactttaacatctttgatcatcggcttataccccgatgccccttgggccaaatcattagcttcaagattttgttctcgagatacatgcttcaaagtaaccagctgaaactctttcattagttccaagcacttctcattataaaccatcaatgtatcattcttgcattcatattctcctgccaattggctgattactagcaaagaatcccccatgatttcaatagtatcggcttcaacttccttgagtaattgcaaccccttaagcactgcctcatattcagcttgattattagttgcatacggtttaatagtataagcgaactcgaaacatgcccccctaggggaaattatgactaagccgatgccacaaccatgagtacataccgatccatcaaagaataaagtccatggcactatctcaaccgagccgattgaatcatcacgatgttctacaataaaatcggctatagcttgtcccttaatcgcctttggtgattcataccgaagatcaaactcagtcaaggaaaatatccactttccaactcgtccctttaatattggagccgacagcatgtacctgactacatcggctttccatataacggtgcactcgttagataatagataatgcctcaacctcgtacacgaaaaatatagacacaagcataacttctccacaggagaataccgagtctcagcatccaagagccgtcgactgagataaaatacaactcgctccttcccctccaactcttgaatcaacaccgagccgattgacttctcaccagccgataaatataacctaaacggtattcctttctgtggaggaatcaaaacaggaggagagctgagatactccttaatattatccaaagccctttgctgctctgctccccaagtaaattgctgatcggcttttaacctcaataagggtgtaaaagattccaaccttctagacaaattagaaataaatcttctgacaaaatttatcttgccgatcatctcttgtagctccgtcttattttctgggggctgaattttcttgatcgcattaacgctcctttgggtcacctcaatccccctttcatgaacaagaatccccaaaaactggccggccgacacaccaaaagcacattttgttggattcatcttcaagccatactttctggttctctcaaaaactttccttaaatcggctatgtggtcctccacctctttagatttaacaaccacatcgtcaatatagacttcaaccgaccagccgattaaatcatgatatatataattcatggccctttgatatgttgctccagcactcttcaagccaaaagtcatgacgacccattcaaataagccgattgcaccaggacatctaaaagccgtcttatggatatcttcctcagccataaagatctgattatatcctgcattcccatccataaaactcaaaattttgttccctgatgcagcatcaactaattgatcggccactggcattggatattcgtcctttggtgtagctttattcaaatctcgaaaatcaatgcacaccctgaccttccattctttttaataactggaactatgctagaaacccattcggcatatcgacagggacgaataaaaccagcatcatacaatcgtttgatctcagctttaaccggctcgagcatatcagctttgcatctcctcggaggttgctggcgtggtctaacccctggcttgataggtagccgatgttcgacaatcgatcggctgagtccgggaatctcgtagtactcccaagcgaagcaatctctaaactcttttaggagctctatcagcttggttctaaactctggagacaaatttttgctaataaatgtcggccttggccgatcgcctggacctatgtctatttcctccaaatcatcggccgacataaaacctggaccttgcttgtcatcgagatcatctactgtatccttagcgtagacattcgaacccttcacaacgccctcaaagtaatagcttgggttctccatcttcgattggctgtatatcagaatcggacacttttagaaaatctccatcccagacttttccagataaacaatcaaggccatccatctcccaaagggctaaatcggcactggcaacgttaactgacctgtcggccggcacgacctctatcttgtcgccttgccattgaatcaagcattgatgcatagtcgaagggatgcaacaattggcatgaatccaatcccttccaagcaacaagttgtacgaacccttcccatcgatgacaaaaatcgtggtaggaatagtcttgctgccaaccgttagttccacatttagaacacctttggtttcagacggattaccaccaaagactttaagcaccatatttgtcttgatgagatccacggcgttcctacctagcttctcttcaatactctgctaaaagatatatatagagcaacaatgagtacaaaagtactcagcaagccaccacaaaaaatgcaataatgtacaggataatacaaggagtggctatggttactttgcgtaaagctgagttttcaaatatcatttcacaaacctaagacctagtataaactgatcaagttttaattccattgttcattaaacagcgacggttctgtccaccatccattgtgttcccaaggatagcttcccgccactggtcgtcatggttttctggggtttaccccttctcgcctctcgagaagttgatccaccagtacaaaatcatcatgcaacatcccacccaaccagtttaagaatttagagtctagcctagtataatacacgtctcggtgctcaataaccacgagcacggctattcgaatagatttagtttactcacactgcagtgaatgtacactttacccgtactccgcgacttgcccagcacatgagcctaagtcccaacgaatgagacttgccatggcaaagcctttcaacaacctcactttggcagtacccgctccatgaattttagtcctcatgcactctaggcgtccaaggtttctagcagtgagaggagttctggcgctcccgggaagggaagattcacacatgcattaagttatagttaagtttaggtttacacatggcagtcctaccgatggcgacaccactgtaggcacccacccctcgcggtcctaccaatggctgccccaccgtaggccctgcctcacacacatcaagaaaactactatgcagggaaactgcctccgctcggctatttactctgctaggtctatacccatacgagaagtacggttgtacgggggtcgtttcatgcttagcttcatggctcggtccttaactgaccagggacggcactagccttttccggacaccacccaagtcctccagccgccctagtcgaaaatatttgtttagttttcattttctttcacaaatcatctcatcaatgtcatggcaatgtggcactcatgtctccacatgccgtatctcaactacctccccaaggtagtttcccaagcatgaagcatttgataaatatgagaatgcatgaatctaaattagcattactaagcatttgtcataagtgactagggactcatacgtaattatgggtacaagggaataatgagataagtaataatcaaaggcatggcataataacaagtaggatattcattactgcatgcaattttatttgtaaacaaaacaatttcacaattgggatcaacatgctcaaggaatggggtgatgacttgcctgcttaggatagttcttattcttgatatgatcttgatcaaccttcacctcctgaaagctgcatacgttgcctcacgactaaccgatatacaatttctataatatgcgagaaaaccaatattcaagcaacaatcaaatatgcacaaacaaaatataattgttcggaatatacctagggctattcatatcactcgtgcttgctaatggattgtaaggtgctacgaagtctaaactatggctgctcacatacagaactcaatactcaggactacggaattatctatcaactattgctatgtggagttcatggctaaactagctttgatcgtaatttaaatggtgacaccctacaggagatttaccaacgctcagtggataatttaatcataacaagcgttctaacaggatggattatctaagcatggctctacaaatattactgtattagggttccaacgaattacatgctatgtaggttagattagtgtggtccataatattatagttaaagtttatctcaatgcataattttaccataaataatcctaagtcacggtcaaactataattgtgtgaggtcaagatttataattagtgttttatctactatacacgcttatcatagactcctcagtttaatatatgaaaaaggtaggttattgttcttgtgtatgatttaaatggactgtatagtagttgtgagtgcaataacatactaatattagatcatttactaagcatgagctatttactgtaagctatacagtatatgtgatgcaggtggatttggcgagttggtactatttatcaacttaagattgattaccaacttaaaagatactattccaaggaacatgacattaagtaattaatttcgtataggtgatttaatcacactagctctgttattatttctcataaacaagtttaagattcatctatgagtattaatattttagtaactttatgtaactaatttttaagtcatgaatttaattatatggctatcgaatattaaataagcactagtattttcctatacatccattcatttgagacatcacttatacttagtttatgtggttgctacagtgacaaaacatgttaaatatatttatttgacatctactctactgtacaatatcaattttatttattagcacatttttaagttgaccataatctaatcatttgatattaatatattttattaaatagtgagttatataccattggaaagcttatgaatttagatgaatttaggttcaagtttcactcgaatcggagctaaaatgaataagttatactaatttaaagattcaaatttgagttaatccgagaaattgtaaaaatgcactgttcataaatgatttatttttaatcggaaacattatccaaaacccactgtggttgacatgtgggaccggccctggttgacttagggtcaaacctgcttgtttaattaccattgggtcccgcctgtcataggaacaaaatatataattgtgttttcttagattttaactatagggaccccacctgccattgagtgggataatcaccgttagggataggattactgtgcgctaatcacatgtgggtcccacacggtttctctctctcctcatcttcttcttcctctcgcccgttaccgagcgaggcagaggcacggctcggcgcagccggcgtggccggcccgagccgggacggcagcgggcggctcggcgacggccggggtgaggcgcagaggagctccgacgatctcccgccgatggcagccggcgcgcgaggagacggggacgcgcggcgccatcaggcgacgccatgcccgagctcggctacaaggggcttcggtgctagggacatcctccggccgaattgaagggtgcgggagcatctacggcgtatggggattcgatttcacaaactatatggagaggggagctcccgggatagcctacccacggagggctcgccggcgacgaaacggcggccggggcggcacggccatgggcgctaatcgccgattttggagccggcgctagcaattagatgtatggaggacgctacgggcacgagggtgtaccgcgagacggcgagatggcaaaacgcggcaaagtggagctcgacacggtgcaggacaggggcagacagcggcgacgtaaggtgcttgacggcttttcttgatgtccagcggctacccggcttcccctatggcgacggcggcagcacggctcttcctccactccctccaacctccagctccggccggggagcctcacaatggtgatctgtagcggtggtgagagggtgatcgcaaggtgttcgatgaaatgcatacgagaagaaggctgagagggatggggattttgttgagggcttcgcttaggatgcaagcaaactatggggataagatcaccagcacatgcctaggcgagctagagtactaatggtgatcggataagagcaatgaggtggatgacgcggctgagattcatctccttctccattaaggttctgtggcttaatcatcacacctataacctatagactgcaggtctgggcgctagctggaggagagggctccattttatccattgggcgtggataggggcgatgggacgcgcgtgtctgggttatgaaggcaggcgtggtgacggtgatgcgcgcacatgggcgatggcgcagctccgtgtttcctggagagaatccaggagagcggttagaagtgcggcttggcgtggcacgggccctggcacgacgaggtacggaagggacgacgcgggcgcgggcgtgggtccggcgcgatgcgacgcacggcgcgatacaacgcgatgcggttgcggagcggctagtgcggtttggctagggttggggtcggacgcggctgaggggaaggaggcgcggttgcggcgcggcacgggcgtgactggcgcggccggaagcgatgtggtgcacgcggtagacgggatcgaacggttggcggacagtgaatagtggcggctgagaaaagagagaaaaggaagaaaaagggaaagaaaggaaagggaggggctaatctgcaaaagtgaatgggattgaaattgaattgaaatgtaatcaatatattttggttttgagaattcaaatgtttgatttcaatatttatttggttattcattagttcccaaatgaatttgctttccattaaattatccaaaaattatccaatataacctataagctttgatatttcttaaaaactaattaaatattctaatgtgaccttaataatacaatagcacattggtcgagtttatttgtataacaatgtattttacaaggacacgtttaatctattattccataaaagtaaattgatacttggtacaatattgacctaaatgtttaattaaacactcacataaacatattttatatataaagttcaatttatttgcatgacaaattattttacatgagtgaatccatcccatgagagactcaatgaaagttataaatattaatttaattattctagtggaacactcctatatatataaaatcattgtagtggcgactacttcgtggttacttagatgtcatgacacttgtcgacatggttcaagtatttaacatacaatttgtaattattaataattgacttgtgttttatttggcttgctatcatgtacacaaatatttataggattaataataattatcttattctaattacttcttagttgtacagctttagcttaatcttcaatcgtgacaatttatagtttggcaagcaatagcaaccataacatccagcatgatgcaaaagttttaaaaagttcgaaattttagtgatttttattattagggattttcaggatgttacactgaacgtagcatagggcatcaaattcaccgcggccccaccatcgaccatcatcttagacatcggcttcccattaacgtagtcgtttatatataatggtttaagatgccgattctctgtcccctcgggtttctcgaataccgcctgttctggtgacaggaccaacttagccgattcctcttccacttcatcgacatcggcctgatcgatcccgaactcagctggcaatgtaaagaccatattaattggtgccgctataacactcttcccttttgccaacctcttcacctcgtcatcttcagcatcattggctacgggaacctgattccagacacgccactcctgtctgtcttggttttggtttcctcagccgatgattgatttccttttcaacctcctgaaaacgctccctgctcctcaatctctggaccctccttttctgattcttcgtgaaaataccagaaggacaccattgattcttcctgatcgcctcatccccttggccacaatcctgattcatcggacccagtctctgatgaacagggagtctcgcctgtctcagccgattatccctattgtgtggtcagcttgagctctcgatgacatcactgcatccagggcaattttcgatagatggcaacctcatcccttcattccagcagaatctgaaaaactcgtaaccccaatgaggatcaccaataaatgctgctgcactggatcaccaatagatggaggtggcaaaaacatggcagcaacttgatcttgggtcggctgattcgcgatatgcccagtaggctgtggatgctcccttattaacaaccgagggtttatcggctggcctggcgtcatagctgctacagcaggtagaggagatgatgttggcgccgtcggctgagttgtgggtgcaacggagggaaccgcctgagaagatggctaaacatcagtgatcaacgatcgataattcgggaagacacctccttgcaaataaaccgggcctgcagcctaatgctcagctattgagccatcggctattgtcttcatcatgtttgacaatgtattgactagcactcctgattgattgatcaaagcatgatgcacagcgtaatcgacccgatcttgaaaattattgaaaaagtcctgtgctagttcattgttacgattaagatttcctccttgtggtccttgagcaccatcaccttgagcctcatcaccttgtgctccgtggactccttgcagattgtcgccttgatcgctcggggagccgtcggtagcacctttagcactcggttgggccgagccgcctggagcttgtttcacttctccatctttagaggaaccggtcccaggattatcagcaaccacttttatcttatacttctgaacaagcg

SEQ ID NO: 23746 - DNA, 4356 bp, Oryza sativa
ctctgtgcagtaacactgtgtcttacgtgcagtaacagcgttaaaatatagttcaaatatagttatgacggatctactttttgataagctctatttttctagcatcatggtgcaaacggttttaaaaaaccttacatcacttgggagatattgttcttcaaagcttgacaattttgcaatttgtctctccacatgtagtaatactatactattacttgttactacttgtcgttactacaatcgcatcacgatgttactgtaagtgtgcagtaaacactataagttcagtaacaatgcgttttgctgtattttttggatagtgttactgcacaaacacgtggtaacgtgtacctgccgtgcagtaacacttttacttttgtgcagtaacaagtatatggttagtatatgacacttttaacctatatatttttgtttcagttcatgatttactgcaattcaccataatattactgtcaaaagtgcagtaatgtcatatacaagcagtaacactatattggagggaggagaccggttttcttgagaagaggaaggaagaacggtttcttggagaggggagtacgtagatacattttgaattttaaccctccacatgcagtaacactatagcatcatggtgggaacgatttgtttaaaaaaatgcatatcttgtgagattttgcttttcgaagattggcattttgaactttatccctccacatgcagtaacagaatgtgtaacttgcagtaacaaaggcatatacatgcagtaacatggttttaccaaatgtataaaattgttcaaaacactcctacatcaatcagacctcgctcaaagccacctacagactttacctatagcccagatactcgatcttcatctcgaaaaaatcacatagtaaaactacaattatcgtgcaataacatagctacttggaagtagtaacatgtacctattatgtagtaacacttctaattctgtgcagtaacaagtatatggttagcatgttagacttttaacccatatatatatatatatatatatatttgaatttttatttacggaggatgatacacgcgcgctgagctacgggttaggagcggctacaacaatccgaataagggatagtagatatatttactaattactgcacactaagtatatcgttactatatttgattgacaatgttactaccgggatgcagtaacacatggtacaattgacaataatgtgtgaaggtaaatgctagtatagtttaggaatgattaattgctgcacgtcgggattaaatggcaatgcgtctcatatgttgctgcaataatctataattatcatgatcatgttaccgtagttgagtagtaactgatgtgcaatggtgtagtaacatgcatggtttgaagcgtacaataacgaccatcacaatgtaattactaatgtttaagtgcagtaacggcttatgagttctctcgtctggtggaatgatggatgttatacatttgaggtgtggagattatgggtaccccatacccacacggcatggttatccgactagttataggggataacttatatatatgaaatatgtaacagatcatgacttgggtattacgtttccctgtatattatggaacggcctaaagtcctggtttgataagattgtaaagtagatttaggaaaccgataccgtcttggttaaggtttctatcttgtaaccctgccccccaacctatataaggagggcagggagcccctctaggggcatgagacaacctgatcgtcagatctatactacacccggcggattcaaatccccaaacaggagtagggtattacctctcattgagagggcctgaacctgtctaaatcctttgtctccacatccatccacttttaggtctcgtgcgctaccccgttttattattgccgaattcatgtttcgacagttggcgcgccaggtaggggtgcgtcgaattacctgtcgaaaagtgcgatggaatcaacttcagaagaaaccccgagatcaatctcatcaatttcgatggctcaaatcttcaatcgggtctaccgttccaatttaatctctattagattaatttttaatcattgtttgatttcctgatattttgacgaatttcatatactggatgagatcgaaacacggccatcatcgtcgcctacttgggtgcccttgccgtgtccgagtgctcctctcttcctttcctggcagatggacgtgttgcaggagtggcacaggccgccaggattcgattcctgtttgcatgtatgatggttgatgggctccgccggctacctccgatgatggcatcatgccgaaagaacatcgagttagctgttagttgctggggcttatacatgttgcatggcacgtcgccggctatcactcatgatccagcctcactgctcgacttgagtttttcgtttcaatttgttatcaatatatattagattgatttctaatctcagattaatttcttgctattttttgttgttgttcgcatataactacgcggcactattgaggcgattgatgctggtcatggactcgaggcgtctcagctttccggtcgatcggccgcgagtccactccgccggcttgtcctcgccaccgccattgctgatagcaacaacgacttcaccaccggcctgcctccgtcgccgccgactggtgtccccgcctatacggttggttggcctattatgccaccgctgttgggcgtctacgactacaccgccggcctgcctccgtctccgccgactggtgtcctcgcctatacggttggttggtcacaccaccgttcatgggcgtctacgacttcaccgccggcctgcctccgtcgtcgccgactggtgcctccgcctacacggctggcctattatgccgccgctgttgggcgtctacgacttcaccgccggcctgcctccgtcgccgccgagtggtgcctccgcctacacggctggcctattatgccaccgctgttgggcgtctacgacttcaccgccggcctgcctccgtcgccgccgagtggtgcctccgcctacacggctggcctattatgccgccgctgttgggcgtctacgacttcaccgccggcctgcctccgtcgccgccgactggtgtcctcgcctatacggttggttggtcacaccaccgttcacgggcgtctacgacttcaccgccggcctgcctccgtcgccgccgactggtgcctccgcctacacggctggcctattatgccgccgctgttgggcgtctacgacttcaccgccggcctgcctccgtcgccgccgactggtgcctccgcctacacggctggcctattatgccgccgctgttgggcgtctacgacttcaccgccggcctgcctccgtcgccgccgactggtgtcctcgcctatacggttggttggtcacaccaccgttcatgggcgtctacgacttcaccgccggcctgcctttgctggatgtctacgtcctcaccgttggctcaccttcgttgccgtcgactggtgtttccgcttacacggctggcctattatgccgccattagtgggcatcttcgctttcgccgtcgaccgccttcgtcgccgccgactcgtgtcttcattgttattgatggacgactttgttcccacattggccacttctgccatcaccaaggggaatattacaaagctaagtcatcatttattttattctttatatgatatttttccttttcctctgcctcactacaccaattggtcttccattgagtagtgagtcgggggctacagatgttatatcatattttttataatatttatcttgattgcttgcgacataatctgagtacaaaagtacctatcgagttatggagttctatcttcctttgccaatggatggttgcctttgggccgattcctagcacccgggggctcgttggatggaccgagtaacgcaaggtgctaagtattattcggaataaatcaaaagcatagagatgagataaatttattttctgctcttaataattgcaaaagtacccgagtagtaaattctgattcgtgaaactttgttccattaatgacgaactcatgtcactcatatgcatgtttgggaagtgcctaggccgactcccggtgcttgatggttatgactagtcggacagagtgtttaaacgtacagagtcatctgctcggggaaatcaaaattgacaagaggagaaatacatatttataaatatttcaaaatacttgattttttctcgagtattatatttatatcagatactactcatcctatatgtttgttctgcaggatccagatccagatatgcataaaagggattcatggcttt

SEQ ID NO: 23747 - DNA, 1343 bp, Oryza sativa
attcctgcagcccattcaaattcaatttcaaactgttgggaaaaatgttatatagaaaaatgaccaaaataaaacttgtagatcttgaaaggctctacaactttgttgttgaccatatttccatttgaaatcatttactatccaaaaatatattatgactaataaaatgaattattacacaacagctatatattttgcactcatagatacaaatacttcaaatggaaaaatagtcatcggtgacgggccttagttatagcccgatagagattaatctatctcaatcgagcattactgatggcccgtcacagatgagtgatccctaacgggcctgattttcatctcaatcgggcattagtatgaaatttcatatcccacctttgatagatcaactaaagtgaaaccttccttgtcggctttgacaccagcgtgtagattcacccaatagcaacggaacaaaggaaccttgaacttgacgaagtttagctcctagatctcctcaatgcggccgtagtatgtgtttgacccaacttgatcctggaatgcatctatacggacgccgctgttttgcactgtgtttttgtcatcttgtttgacggtgtaaaatgtgtatccatttatatcatatccttgccatgtgtctacggtccaagacggtcccatccccaacaactgtactgtctcatttgggacatccatggacattgtcacacgattcttcaaccattcgttgaaccgagaattatgttatcagttaatccattcatcagattgccccaagttctcatctcggattttcgctaagtgctcctcaaagtatgggcctacttccgccatatgttggagcacagcgtaatgagcctacgcataggacgtgtcacgaccggaaatcacccaacaggcgttcccgacgtgcgtgtattattccttgtcccaggaggcaaggtacaccaaaagttgatacaatacagagtttaacaagcggaagcgtaaatagttaatttattacatgggcggcgaaggcccagcacacacaaagacaaacgggaaacaacggaagactagggcgacgaccacaggcacttgacggcaggcacgagctagacaccaaagccttcatcttccaggaactcctcttctgggtttgggaaaaaattgaacaagactgagtacaaccaccgtactcaacaagacacacccacaagtgcagaataaatgcaagggagtacaagggggttataatataaagggttagggtttgcagtaaacagcattaaaagacacttagttgctcaaagctattttgtaaatacggtcctagagctataccatattattaaaca

SEQ ID NO: 23748 - DNA, 1702 bp, Oryza sativa
ttaaattggttcattaaagttcaagttgcttaggcaaataaaataagacaggctccgacatagttacaccacacaccggcgtaaccatgccccacacgactcaacaagaagataaacgagaaagaacacacgcgcaggcctactaactgctcgtctaccgctgcgacgggccagggcggaaggtgagcaacagcgcatcctccgtgctacctacgccggaggcttccccctcctggggaaccacgggcgcaggtgcggcacgaggggtctcgacgaagcaggtccacgccagggactgacgaacaagctcgggcctggaggtgctcttgcgggcggtgatcttctggctgcggcagacgcggcgacgcttgggacggctgtcctctccctgggcgatcttgagctgatgcagctgcgcctccaacgcgtcgaggtccttcttgagctgcaggttctcctgacgcagctccaggatcttcaggttgttctccaccatgccacgacgcaccatctggtggaagtcgatacgagccgcgtcgtacgcctccaccatgcgtgccagatgcacgacggtagcgtcatcctccgagctggcgtctcggaaggtggcgtggtcgcgggctcctccgcgacgagggtggtagcggtagggcgagtgctgcaactcgtccgggtagcgctggtgaagggtgccgatggcgaggagagcggcgttctggcaagcggcggggaaggaatccccacccgcggtgactgccagcgaagtccgctcgggagagccggagaggatcactgcagtgacctcccaaccagcgtgaggctctgcatcctcaccctcctgctccgggagcggcctggcctggtaatccactccatgtggataccccaagaccacgcacatgcctcgcagctccaagacgaagccagtcatgtccaaaccacgacgggtaacgctgccggccatctacaaacaaaaacaaaagaaaagcaacatttaaaagatcagattttgacgataaatgaagcagcaagacaaagagagagtagcgggttttcacaaataataaaggatttttatttttttgaaaatatagctaaggcttgggatctacggctcgtcctagggtcaagggaggctctgataccaacttgtcacgaccggaaatcacccaacaggcgttcccgacgtgcgtgtattattccttgtcccaggaggcaaggtacaccaaaagttgatacaatacagagtttaacaagcggaagcgtatataaaattactacatgggcaacgaaggcccagcacactcaaagacaacgaaaaacagcggaagactagggcaacgatgtcacgtcctgataaattcatcccgaaataaaaatcatcttctaaaaggaataatagaattaattaaaattcgaaaagaaattggcaaaccctaaaatacgtacaagaaaaattcaaatgtggcccggaggattttgttaaattctccttggtctaaaaggagccctcaaattttagtggaattttcagagcacaaataataattgaaaagaaataaacaaagttgaaaaggtttatgaaaagaaaaaccctaaaagaagtcctcttttcccccccccccttccttcttgggccggctcggcccagtccctccctttatattttcccccgcggaccatcggtttcccccgcgcgcgc

SEQ ID NO: 23749 - DNA, 19017 bp, Oryza sativa
ttcgtgagggttcacggccgtgattaataatactgtatagctctaggatcgtctttataaaatggctttgggcaactaagtgacttttaaatgctgtttactgcaaaacttaatccctattattattctcttgtacctcccttgcattaattatgcatccgccggtgtggcttgctgagtactgtggttgtactcattcttgctcaatccttcccctcttcagtaagagaagcttcggagaagatgtcttaggtggagtcctggcttataccccagttgagcgcctgtgaagatggagccgtaggcccgctagtccgctgctgtttatttttgattgtcaggcctgaagcgcctttgtaataatgtaaatattatcgatataataaagatgtgtcttttatatcatgtttgtgtggtgtaccccggcttttcctgggacatggattaatacactagcgttcgggaaaaggcaattttcccggtcgcgacaagctggtatcagagccatctcgactgtaggataagccaagtggataaaacctaaggacatattttataaatgaaactatttgcgaaagctcctctttttctccttcccctaatgctatttgcaaaaggtttactcccttcttccttcttcggatttcaactagtactagatggtcaggtcagtgaagaagaggacatcgtcagttgtttgccgaagctccagaagactgcaggatctgctagtgaagtggaggaagcagtgaagccagctgtgaagcaggagtgaagatcttggagaacccgtcgcagaacctaagccaccctctagggtagagtcgttagtcgtgtgtttccttgtttgtgtgtgtagcgcgtggtttgcatcagtggggtgtgatgtaaccatgctaggttgtttgcttaatcaacctgcagaataagtgaaacaaacaacacatcagcaagaagagttagttcctttaaggtcctatccttagtttctaatctgtctctcccctttgttttccctctctccctctccaaacctttgcaacagatggctgacaatgagaaaggcaataaggttagaagtcaggacattggtacctcaagctcccgagtgaatgaagcaccagacaccagttgtgcggcagtggtccaacacctgattaaccagaacaaattgcttatagagatactacagcagcatcggatgccaattttgaacccgagtcagatgcaatctcaagtgcagttggaggcagtccaagcactcacaccacaagtcagagcaccgccaacatcccagaaggcccctcatgccatgccacatgttgacccaaaagaagcaagggcactacgcaaggaactgtcctcagcagaaaagaaaagcaccaatgcgaaccgaagatgaagtccgtaagatgatcattaccagcacagaatggcctccaccaggaatgacaaaatgtcagagaagaaattcctcccgaggtgcacaacagttgacagagcatcttttagctaatggaggtagagtgtctggtagtgaagattcagatcaagtctcctcagatgatgaagatgcgaagtctccccaaggttttaaccagaataaaatagaacttaaggcatgctctcgttgtggagaaatcggtcatgttgccagctcgtgtgcctttacatgcgttcgttgtgaggaagaccatccacccgataggtgccctatgagcaggatcacttgtttcttgtgtgaaggaactgatcatgtaccaaaagattgtcaactcagttttctgctgacgaagaagatggccgaccaacacgcccattctaacggagagaagcatcaaggaaacacaaatcctcgccaacattacagtttcagcctaactccagtgccaggacagaggaatcaaaatgagaaaagaaaatgccgagttcgggaagatatctgttgcttcaattgtcaaggaatgggtcatttcgccgacaagtgcccaaaaccgagaaacatagctgccggcacgtcagtccacgcaactccctgcaatcagaagcttgctcctcaacgaattgtcatccatgcatcccgaagcagtcctatagcccgcgttgcaacagctccaattccaatgagtgcactaccacaaggtgtcaatgctcaatttcagccccagccaccagctggcaagacagaggccagtatctgcgttgtacctttggaagttccaatacaccagctgagaaatcaagtacaagatgaagaacccgagtgtaagaaagttaatgtttgttacaactgcagtgaagaagggcattactccaaaaactgtccccaaccaaggcaaaatcggcctccacattaccgccaatttacacgaagcggacattcccatcgtattgtggtcactggagcaaacgccgtgcccgtaaggcctcgtgttaatcagaacccatagcagaaacaatgcaccaatgctcctcctgctgcacctgactcggcaataaatcttagcaaccattctctgcatcgacagcctcagcaaagaattgtcgtagatggaagaagttgtgtctctccccgacctactccaggccgagccaagagcaatcaacctccggagggcgataccaagcagaagaccgtcatccgcttcaaccagcaatcagaaggaagcttctcctgtgaatgatagcattatgcagtcctagcacatcatcacagaaccaatcaaggatgcagtcactggaacaatgccagctatatctctccagaatcaaaatgagcagccatgtttgtggttttcagttcgctacttatcgtggtgtaatcgaaagtttgcagcaaccatgtaatacataaatatattcatgtctataaacagtgagcttgctatgcttatggatgattcatgttgagaatacaatgtaccgatgttaagcaccgtccctttttgtttaaggcagtgcctcgtattcatgtaataagggagaaatgtgtaatacagacaagttccatgaggattcgtttgaaagatgcggatatgtgatcatgtgtataattgtttactgacaaaggagacctagggtctcgtgtcagaggaactatattctaacctcgagttaataaccaacctgtggatggaaaagaaaaacaattaaactgtgttgggttaaaaagccaacgagacagtagttgaggataggagtttggatacgccttttacagatcaagataaggattgttggaggaaaccccgaagggtacccgccatgcctctacattgataagatcggatacacctgccgacagataaggagatccaggagacatcaatatttgagaacataatagtcgatggttggtaattagtttatctggtatcagaaaaaggtcaaaggtgatgtggcagaagaacaatttggatgctccccatctcgaggaagcactaaagatgaccatcggcaattaaaccctagtggtatagatacagatagcaggcaatgtatttccctgaaggtagtcagtgcagcttttgacgaaccacatcaaggtttcactgaaaggcagcaagccaaaggacctcatcgtccccagaagcgtccgcaatccacattaaagaataccacctgttagagataagccgaaagatgattgaaaaaagagattggcaaagatgttctctagcataaaagaagtaggccgaaaggtgattgataaacagaaacatgctctgcatcgctcacggaagacccctgattgtaattgccccgcaacagtcaccttgtcattaagtaagcaagatgacctaggtaaaaatgtttctatgaaggcaaggagtgaaatcttcaactcggtatcagatgctacacggagtgaaaagtgcaagcaccggttaccaggtaatgccatgtcttgggagatgatccaatgggaaagaacacatcaaggttaaaggtgtaaaggaatacgttgagtgctaactgatgacaacatgaagagaatagcggaaagtaaactgaacataaagaaagtgaatctgagttgcttgttcgtgggagctattcccagttatgaaccaagtgatatgttcgaagatagtctacagaggtcagattaaaatcacctctaacaacgaagcttcagatctggcaggatcacgatcagacaataagaagtccagcagtaaaactatttgggaagacgtcaaagcatgccaagtgggataagttggctctgttgagaaacataattcaaaggcaaaattatcgaccctcgcatcgaatagcagaagtagctagcacccggagaccaggaaagctaatatgaggcagtttgtggcaagttagaagtaaatgacaagcctgatatccttatgatgacaagcatggtatcctagtaatgacaagcaggttacgacgcatgacatgaagtggtaacttgtatgaggttgactccaaagatatgaactatgcgaagttctggaacggaagcatcactgaactaccgcaacctagtctgagtcagccaaaaggtgcaccctggtccaagtcaggtgaagagaagattccatccgcaacaggaggtcgagccaagcagtccagagtggagaagttttgctaggcaagtttgttataaaagacgcaacggaagaagtcagacaagaagagaagaccgcccaacctatcttcttgctagcctcctcgaatctcggggacgagattcttgtaaggggggtggatttgtcacgtcctgataaattcatcccgaaataaaaatcatcttctaaaaggaataatagaattaattaaaattcgaaaagaaattggcaaaccctaaaatacgtacaagaaaaattcaaatgtggcccggaggattttgttaaattctccttggtctaaaaggagccctcaaattttagtggaattttcagagcacaaataataattgaaaagaaataaacaaagttgaaaaggtttataaaaagaaaaaccctaaaagaagtcctcttttccctccccttccttcttgggccggctcggcccagtccctccctctctctcttcccccgcggcccgtcggtctcccccgcgcgcgcgcgccgctgacaggcgggcccgcccgccgccctcgctgacgggtgggtcccacctgtcatctccctccccgcgccgcgcccgccgccgcccgtgccctagcgccgccgccgccgtcgaatccgccgcatcccgccttccccgcgcgccataaagaggggcgaattactccccgcgtttccctctcccgtttcccccgttttcccctctctctctccctcggattcgtccggattcatcccgcaatcgtcgccggcgtcttcaatggcggccgagatctccgcgcgcggtttcctctctccccggccgcgctctccccctcccgttgctatatattcgatccccgtgcttcgctcttccgtttccgccgctcgccgctcgctctcgccgtcggattcgtgctcgcgccgtgctcctctctctccgccgtcgccgtcgaccttcggttcgccgccgacgtcgctccggacgtccttccgactcggcgacccctccaccggcttcgccgcgttgtcgccgaccccgtccgccgctccgcttcgcccgtcgactgccggagcgccgtcgccctcggcatcccgacccgcgccgccgtcttcctccgctccggccgccgttctcgtcgtcgtcgttgtcccggggtgagccgaggaccgccgttcgccttcccccttccctcctctctctcgggcgccgctccgccgcgccggtggtcgccggcggtgaccatcggggcgcgggcgcgccgctcccgtcggccgcgccggcgaggccgccctcgggcgcgccctcgcggctgccaagtgggcccggccgtcagccgcccgcgcccgcgggtgcggctgacgcgcgggacccacggcgccgaccgccgccagccgcgtgcgcccggtccaccgtggaccgtggggctgacgcgtgggccccacttcccgtggacccggtccgcgcgcccgctccctcggctgacgcaataaacatgatttttaattaaaatttaaatgaagaaattcgcaaatatccatttaaagagcatataaacttcaaatggccataacttggccatttgaactcggaattggaccgttcaagtctctaatttttccttaagaagtcaagaacccatttttgtgctttgttcctgcttgttgtatggagtttattagagtaaaaagccttttcttttccgtcggtcgtgtagacgctgcagcttcggaagatccgcccttcttggaagttgaagccggcgtttgggaaagtgagcaaggcaagtcacatcatctttgaacatattgaatcccagtttgtaaaattatgttgatttaaattattgcattatcgctttatttaaattcccgcgttatcactgttttatttagccatgcctatttacctttgttatgaccttattattgctattgttattattattaccttgatcaccctagattaaacaaaacctcaactagtggacactctactcatggttccactagtatgaacttaggtagatgcttcgctggttaattaggcaacattaggtggttttataactttagactttgggaattctcatatcatttggacactatggaattgttggattatggtggaattggacatacacctctcttcctctttcaaaacccctaaaacctgttttcggtggagtttgggtgcatgccagttttgggaagtagcaccccggccactataaggattaagctcgggcctctgttgcaaagcactaccgtactaaccacatgtctaatgggtaaggcttaactcggtgctcagtctagtcctgaacaaaaggacacggatagagatggatgaagtcattgcgacgatggatatctctgaggcaaatgaaggctacgcgagctgcggctcggtaatcgagatgtctaggcaaatgaagactacacgggtcggtgcccgttagtcgagatgccatggcactggactagtacgcgggtggtctcacccctatgtgtgtggcgcacccggtctagatcttgttgctaggggctcaaccctggcctgcctgtcccgggataccggccgtaggcagggttgggtcggtacttttgttcacggctaggatgggtgaagggttatgtcacatctttacgacgggttccaaggccatggaatgcggagtaaagatgtgtcttgtgggtaaagatgtacacctctgatcagagtaaatctattcgaatagccgagccctcggatatgggcaagcctagcaatgtacccaagtcagtgttttaattcttaaaatttgctcaacaactaaaatatggaatggttggcctgggttggcttgggacgagctgggacccaggtcgggttgccagttcggtccaaatcatcgtaggccttgggttaaggcaggttcatgagggttcacggccgtgattaataatactgtatagctctaggatcgtctttataaaatggctttgggcaactaagtaacttttaaatgctgtttactgcaaaacttaatccctattattattctcttgtacctcccttgcattaattatgcatccgccggtgtggcttgctgagtactgtggttgtactcattcttgctcaatccttcccctcttcagtaagagaagcttcggagaagatgtcttaggtggagtcctggcttataccccagttgagcgcctgtgaagatggagccgtaggcccgctagtccgctgctgtttatttttgattgtcaggcctgaagcgcctttgtaataatgtaaatattatcgatataataaagatgtgtcttttatatcatgtttgtgtggtgtaccccggcttttcctgggacggggattaatacactagcgttcgggaaaaggcaattttcccggtcgcgacaaacgaccacaggcgcttgacggcaagcacgagctagacaccaaagccttcatcttccaggaactcctcatctgggcttgggaaaattaagcaagactgagtacaaccaccgtactcaacaagacacacccacaaatgcagaataaatgcaagggagtacaagggaattataatataaagggttagggttgcagtaaacagcatttaaagacatttagttgctcaaagctactttgtaaacgcgatcctagaacgctacaaagttattaatcaaggccgtgaacccacacgaacctgccttaacccaaggcctatgatgattcagaccgaactggcaacccgaccctgggtcccagctcgtcctaagccaacccaggccaaccattccatattttagttgttaagcaaattttaagaattaaaacactaacttgggtacattgctcggcttgcccataaccgagggcgcggctattcgaatagattatactctgatcagaggtgtacatctttacccacaagacacatctttctcacgtgcaaccacgtgccacataccaccacggtatacaggcgaaagacgtgacatagtttccaacccatcctagccatagacaagagtaccgacccaatcccgcctacggccggaactcccgggacaggcagacggaactgagcccctcgcagcagggcaccaaccctgtgctttttgacatctcgactaccgggccgcagctcgtgtagccttcatttgccctggagaatgtccatcgacccccgacttcatccatctccaatccgtgtacttttgtttaagactagactgagccacaaactaagccttacccactagacatgtggaagtacggtagtgctttgcaacagaggcccgaagaccggtccttatacggccgaggtgctaccatcaaaaccatgcaccccgagcccagcctaaaaccattttaggagattttgaatacagggggcggtgtgaagccaattccacaataatccaacaattccatagtgtccaggtgatatgaatatttcccaagtctaaagttataaaaccacctaatgttacctaattaaattgcgaagcatctacctaaaatcatactagtgataccacgagtagagtgtccactagttggggttttgtttattctagggtgaacaaggtaataataacaataacaacaataataaggtcataacaaaggtaaataggcaaggctaaataaaacagtgataacgcgggaatttaaataaagcgataatgcaataatttaaatcaacataattttataaactgggattcaatatgatcaagatgatgtgtcttgccttgctcgttttcccaatcgacggcttcgacttccacgaagagcggatcttccgaagctgcagcgtctacacgaccaacggaaaagaaaaaggctttaacactaaataactccacataacagcagaaacaaagcacaaaaatgggttctttacatcttaaggaaaaattagagacttgaacggtccaattccgagttcaaatggccaagatatggccatttgaagtttatatgctctttaaatggatatttgcgaatttcttcatttaattttcaattaaaaatcctatttattgcgtcagccgagggagcggggcgcgcggaccgggtccacgggaagtggggcccacgcgtcagccccacggtccacggtggaccgggcgcacgcggctggcggcggtcggcgccgtgggtcccgcgcgtcagccgcacccgcgggcgcgggcggctgacggccgggcccacttggcagccgcgagggcgcgcccgagggcggcctcgccggcgcggccgacgggagcggcgcgcccgcgccccgatggtcaccgccggcgaccaccggcgcggcggagcggcgcccgagagagaggagggaagggggaaggcgaacggcggtcctcggctcaccccgggacaacgacgacgacgagaacggcggccggagcggaggaagacggcggcgcgggtcgggatgccgagggcgacggcgctccggcagtcgacaggcgaagcggagcggcggacggggtcggcggcaacacggcgaagcggacggaggtgtcgccgagtaaggaggaagtccggagcggcggcggcggcggaacggagctcggcggcgatggcggagagagcggagcacggcgcgagcacgaatccgacggcgagagcgagcggcgagcggcggaaacggaagagcggagctcgggcaacgtttaaatagcgccgggggaaggaaagagcggccggagagggaggaatcggtcgcggagatttcggccgccatagatgcgccggcgatgaatgcgggaaggaaatcggacgaatccgagggagagagagaggggaaaacgggggaaacgggagagggaatcacgggagtgattcccctctctttaatgcgcgcggggacggcgggatgcggcgcaatccgcggcggcggcggcgctagggcacgggcgcggcggcgggcgcggcgggaggaaggcgatgacaggtgggccccacccgtcagcgagagcggcgggcgggcccgcctgtcagcggcgcgcgcgcgcggggaggccgatgggccgcgggggaggagagagagagagggagggagaagtgggccgagccggcccaagaggggaggggggggagaaaaagaacttcttttaggattttcttttttttataaaccttttccactttgtttatttcttttcaattattatttgtgctctgaaaattccactaaaatttgtttaagcattttaggcttttaggaaatatacaaaaatcctccaagcctcgtttgacttttacatttgcacattttaattgttggaggctttcacatgaattttaattattctttgcacaatttcgaggatagattttagagtcgatttgggacgcgacaggacgcatgatcgggcctaattcttttccttccgattgtgccaacacctgacaaccttccctcgtgatgagacgcaggaactccgataggatcggcatcggacaggtaattgacgcagaactcaatagcctcctcggtcgtgtaaccttcaatgatgctccccttgggtttagctctgttacgaacgtacgacttcagaactcccatgtaccttccaagcggccacatttcccttagaaaagccgggccacatagttttgtttgcttcaccagatgaacagggagatgaaccattatatcaaagaaagacagtggtaaaaacatctccaggtgacagagggtattcacaatatcggtctgcaacccatctagattttttggatctataaccttctgtccaattgcattgaagaaggcgcacagacattggatcgtgtgacgcactttcggtggtagaatgcctctgataggaactggcaagatttgtgtgattagcacgtggcaatcgtgagacttcattccaacaagttttagatcgtccaatttaacatacttacttatcctcgcttaatagcccgatggaactttaatatccttcaagcatgataacattgcgattttctcatctttcgacaatgtgtggcaggctggagggaggtacactctacctgtctttgcatctcatatgggctggagttcactgcgaatattcatgtcctgtagatcaaggcgcgtgttcaacccatcctttgtcttcccgagaatattcaacatcaggccaaccaaactctcacacacattcttttctatatgcatgagatcaatgcaatgatggacatcaggatctttccagtaaggtagccgccaaaatatggattttttcttccacatacccttctcctttgtgttgttacgttttcttttcttcccacactcattgcttatgtccttgaccatattgtggacctcatctccgaacaaatctttgggagtaggctgaagttctctcttaccgttaaaatatttcttctttcttctaaatgcgtgacgtggcgggacccacctccgatgacccatgtataccatctttcgtgatttcttcagccactggctttgtgtatgttacttgcaatcggagcatgccttctttccttttatagtttgtctggaaagatcaccgagtgcagggtagtcattaatggtgcagaacaatagaactcttagcttgaacaatatgcatcccaagtttccatactttctttccaaagaatctcaagatcgtcgataacaggctccaggaatacatcgatatcattgtcgagttgcctcggaccttggattaataagcacaacataatatatttccgtttaaagcataaccatggcgggaggttatagttcgcaataagaactagccaagtgctgtgagtactactcatgtcaccaaaaggattcatgccatccgtacacagacatatcctcatgtttctagggtcggcagcaaagtctttgtgttttcgatcgatattcctccattcaatcgaatcagctgggtgtctaagcataccgtcattccttctctccgtggcgtgccaacgtactaagttcgcttcgttcaagttggcaaagttctcttgaaacgatcaatgataggtagataccacacaacctttgccggaccacccctctttgacttctttccttcgtcagcacttttctttcgcttgtatcgagaagccttgcagacaggacaagcatccaagtccgcatattgcttgtggtacaatatgcagtcgtttggacaagcgtgaattctacggacctctaagcccagtggacacagaacctgctttgcttcgtatgtcgtctcgggcaatgtgttctcagcaggaagcatagccttcaaaattcctaaaagatcagtgaaactcttgtctgtccatccactacttgccttcagcttcattaggtccaacgtaactgacaacttagtgtgttttgctttgcatccagtgtacagaggcgtctcggaatcactaaccaatgtgctgaacttcatggaatctctctcattctgggctaggtcctcaacgtcacgtaacatgtcttgcagcagatcgtgatccacatcaaccatttcaccgcccaatggacaaggtataaacatgtcatgctcatcttcatcttcttgattatgcgcaccacttctgtctgctgctgctccacttcctgattcttgctctccatccttaacccaacatgtatagcccttcatgaatccacgttgtatcagatgaccgtgtacatcctctccgctatcaaacatattctcattcttgcaatctgcacatgaacacatgtaatcattgtttcttcttttccgatcctcctccgcggcgttcataaaaattattacgccctttctgtactccgtagaatgatgttttaaatttttcgcatacatccaacttcgatcaattgcaaaagtaagacgtgatcaattacaaaataaaaaaaataaattagaggcacatcttataagatcagtattgcaaaagcaagacatgatgaaattgctcaattaatgattaatattactaacttgattgctccattttgatcacttttggaaattttctgttttccttggaaaaaagacaaaaaatcgccccctacatcctcccaccaaaatagtgaacagtgggatacagttacactaggtggtggggggtatttataccgtgcaacaaatatctgtaacagccctaaaacaatcaaccgtgacgggcatacaagtaatatctatcgggccttaataaaagcctatcaaagaagagtgtcatctgtgatgggcattaaacatatctcaatcgggcctctagtttgtcacgccccgaaatttagcccaaatttccagactattttgtgtattaaatccctgtccaggaatcagccagggtacacaaaatgacaagtaataaacagttccaaatgtaaataaagcgtaaatacttacagaagaggctcttagtcctcacaccgaaaagaaagcagcaatagcggaaaaaagcgatcctagcggggctttagctccactccataggcaaaactcaactggggttggagccttggtcttctaacttcatctccagctcagaagcactacacttctgaaaaaggggggaataaaagcaaggctgagtacaaccaccgtactcagcaagccacaccaatgatgcagacgtgcaaggggattttattgagcaaactgatgcagacgtgcaaggggattttattcaagaatggcttgtggctatttgcataaaggtagttgtaaaacattttattgagcaaactggtaaaacagttgagtaattatagtaatattgaatctccaatgatcaacgctacaccatgttgaacaggcccaaccaacccacctgaactacagtgcattgggtcgatttattaagtgtgggactaatcacggtgaatctggtcgatcgcccataaccgtgggcacggctattcgaatagttttactctagccaaaggtgcacaactatacccacaagacacaatccactggcatgtcaccgtgccatcatgtgcccaagatgaacacgtcaccacgtcgagtgattgtgacaagacccttcatataactctcccataaccatccacaccacgctaaggtttcacccccactcctcgcaagtcagcgggcagtcccctcatgcgccacggtgaatccggcagctggacaaccggacaccccggccgacccaactccattatgcccaccctcgccactggtgcctaggaaagggtcgagctatacttcagatcaagcaattatccactcctgcttgtggtagcactgtaagtcttccagggtttccgtgaaccggtccttaattgacatgggtgcgactcacaaaaccatgcatccacagcccaccattcagtcgcattttagttggataattatgaccaattaaacatgtccgggtgtctcgagcacgcagctcgttctgatactaacaaggtccaatactgtaattatcccatcaactaggctagtggtaattaagcatggttaagcatatagttctagctaggtcacaaaagtaacatgagctagtcaatttattacccaatgttgacaaaggatagatatcaagtaaacatggcacaagcgagaagataggtaaaccctgatcccatgtattagcaagacatgcaattttatttccaaacggtaaaacatttgtaaagtaggatcaaaatgctcaaggggaatgtgtgacttgccttacttcttcactttgatcttctaaactcctttcctcgcaacagcggacttccaaaacggcagaaactacactctagcacgcaaaacgaggaaaaactctaataaaaaccaagaaaacagtacataaaaagtaaacagacatgtacagctcaattttagatgaattttgcaagttgaatcgccctatttggagttcgaatgaattagatatgaattttagaagttgttgagccattaaatgaatttctataattattatcggtttatgacgcattaattaaatattttcacaaaggaaaagggctgccgctgatgtcagcaggggaagccggcgccgacacgcgggccccgcacgtcagcggctccaaggggagggcacacggtggaccaagtccaccgcggcctaggcggcgccgtggaccaagagcacgggcggtccacaggcagcgcccaaaatcggcaacggagggagctggcttgccaggcgtcggtggcacaaggccggacggccaccggcggcggtggcgcgacgcagcggcggaaagaggggaatgggagaggagacggagggggtcctcaccgaggggcgccagtgacggtacgacagagctcgggcggagagggggcggcggcgctccggcgacgggcggcgccaacagaggggcggccaaggggcaccgtgacctgaggaaggtgatggatgggttaggcgagcgcggggtgggcagccggaggcaacaaagcacggcgacggagctcacctcgcgcggggcagatggcgttccggcgggggatggcgatgttgaggaggcagccaagggactcctcgtcattgcaaagccgaaggaggcgacggcgcatcgcgaggtggtctgggacggcaacaggaggcggcaaatgcggcggcggcctcaggttggtggtgggggtggtttttcggtggtggttgaaggaagaggagcggctgccggggtggagctcggcatggcgatgctgacggcggcggcggcacagcgcagcggccattagggcagtagtggtggccggctggacgcgacgggaggcggtggtggctcggatgcacggtggaatggcgtttggcggtggttttgtgggttcgaagtggaggtcggggtggagcttgatgcggcgaagccatcggtggaaacggcacagcacggcggcgacgagaatggcggtggtgggcggctgaacgatgccggcgagcggcggaggttggtggcgcggtggggcggctttccggtggctattggggaatatggagtggctgctgaggtgtggcaaagagcggcgaacgcgatggcgcaagcggcgcggcgcggggacggcggcagcggccggctggagggtcgccggtgagcggcggcacttgggctcgcatggggagcacgggaaagggcacgaggagctcagggaggaaggggaaacggaagaggagagcacggggaggctttttatagcgcgagggagcaacggggaggccggggagtggagaatttggagcggcaacggccggcgacgtgggcgacatcgtgggtgaagtggagctcgatcccagtgcgattttcgggggaaacgtggggagagtgtagaggaggtggacgggaaccgatttcatgcagtttgggcgcgagggtgcgagcgggaggagccagaattggtagcgacgtgggcggcaaatgggcggcatggcggctacggcagtgggtcccgcggtcccacttgtcggcctaagggagagagggagcctggggttatttagacttcaaggacgagcgggccgagggagagaggcctgcccgagaggaaggagggagggggaaacaggccaaggagagaggagtgcttgggctattaaaattacttcttgagctccgaaaattcacgggaaatttcagaaagtattttagggcacaaagaatattacaaaatattcccagccaacgatttttaaaggaaatttttaattccctctgtaatttacttgattaaatttctctaacttttatttaatatctaggaaatggattattaaatgatttttaatcccgaacgaaaatcggggcgttacagttggtgcccgtcacagatgactgtcatctgtgacgggcttcttttagggcccgattgagatatggaaccctcatctcaatcgggcctcaactatggcccatcacagataagtgtcatccgtgacgggctttagttttatgccgatctaccatggctatgcgaccatatctcaatcgggcgaaacttcggctcgattgagattacttacttgtgacggcccgcaaattccagtcttgttaggggccgtcacagatggaaggatctgtactagtgggatttgaatttgagcctcctgacagcatcaacttcaaacggacctagctgccgttcaagaaggaatttcggggtctatgatgacttgatggaaagctaatggagtctacttttatatgattttggtcacacgtcaatattcctaatttgttatctggaatcgacaaaacaagccatgtaactcatccagtccgaatctgatttgggcctttggccttgtaattgtgtcgtaggctaaacctaggggggtgtgcggcaaccctaggacatccctaatcatatttattatgtagccataatagtctagagttgggttttgcttggattatttctgccattgaaatttcatcgctagttcggtttgtggaacccctaattcgagtgtttaatcatttttatgcaattgagttgttatctaccttgttattgcttgtgttatttgattagcatgcaggtttgataaggaaagggatgtggtgctgcaattgcagggtttggatcttgttgatcggaagccggatcgtgtgcgttatgtttctgccaaatcgagtgtccgttaggtaaatttatctacccataaccataaaaataccacacaaaaaagtcatttacctagataatttgagccattgcattgttccgctatattttgtttccttgaattttaagttgcatcgtcgtgtcgagtgcttgttcagttttagatttaattttagttttgagtattgcatctgttaatcactttaggtctagtcacgtgagttttgggtctagttctgcatctcgttggttgttgccggggaccttgaaaaatgaatctaatgatcgtcgagtttccgtttttatggtttgtacaagttttcatcgagcggatttagatttgcttggttgctagggcttatgccatatgcttttgcagttttgtattgcacgtaaggaagcaggaagaggacgagagttgtgtcgattggatcggttgcacttttggttcagccgtgcacgacaagtaaagaccgaggttgactccatgataagtctgactttggcaacccatcaagacctatttgaggttttctccgtccggtgcctatactttgtgttttagaaggtggtgactaatatttgttacggaattgaaggtgttgactatccgaccggccgtctcatctgtcgccgactggtatctccgcctacacggctggcctattatgctgccgttgttgggcgtcaacgacttcactgtcggcttgcctccatcgccgccgactggtgacctcgcctatacggttggttggtcacaccaccgttgttgggcatctacaccttcactaccagctgccgtcatcaccgccgactggtgttttcattgaccattaatggacgactttgt

SEQ ID NO: 23750 - DNA, 838 bp, Oryza sativa
ggaccgccgcttcgtttccccctttccctcccctttctcgggcgccgctccgccgtgcctatggccaccgccggcgaccataggggcgcgggcgtgccgcctcccgccggccgcaccggcgtggccgcctccgggagcgcctagcggctgccgcgtggggcccggccgtcagccgcccgcgccctcgggtgcggctgacgcgtggggcccacggcgccgcccggtgtgagccgggtgcacccggtccaccgtggaccgtgagactgccgcgtgggtcccactcccgtggacccggtccgcgcgccctctccccggctgacgcaataaatccatttttttttaaattaaaatttaaatgaagaaattcgtaaatattcatttaaagagcatataaacttcaaatggccataacttggccatttgaactcggaattggaccgttcaagtctctaatttttccttaagaagtcaagaacccatttttgtgctttgttcctgcttgttatatggagtttattagagtaaaagcccttttgttttccgttggtcgtgtagacgctgcagcttcagaagatccgctcttcgtggaggttgaagccgacgtttgggaaagcgagcaaggtaagtcacatcatccttgaacatattgaatcctagtttataaaattatgttgatttaaattattgcattatcgctttatttaaattcccgcgttatcactgttttatctagccatgcctatttacctttgttatgaccttattattgttattgttattatttccttgttcaccctagaataaacaaaaccccaactagtggacactctactcatgg

SEQ ID NO: 23751 - DNA, 685 bp, Oryza sativa
gcagctcgtgtagccctcatttgcgttcgagaatgtccatcgacccccgaatttatccatctcccatccgtgtacttttgtttatgactagactgagccacaaactaagccttacccactagacatgtggaagtacggtagtgctttgcaacagaggcccgaagaccggtccttatatggccgaggtgctaccatcaaaaccatgcaccccgagcccagcctaaaaccattttaggggattttgaatagagggggcggggtgaagccaattccacaatactccaacaattccatagtgtccaggtgatatgagaatttcccaagtctaagttataaaaccatctaatgttacctaattaaatagcgaagcatctacctaaatttaaactagggataccacgagtagagtgtccactagttggggttttgtttaatctagggtgaacaaggtaataataacaacaataacaataataatatggtcataacaaaggtaaataggcatggctaaataaaacagtgataacgcgggaatttaaataaagcgataatgcaataatttaaatcaacataattttacaaactgggattcaatatgctcaaagatgatgtgacttgccttgctcgctttcccaaacgtcggcttcaacctccacgaagagcagatcttctgaagctgcagcgt

SEQ ID NO: 23752 - DNA, 9886 bp, Oryza sativa
cgttgttagatgtgattttgatctgacctctatagattatcttcaaacatatcacttgttccataactgggaatagctctcacggacaagcaactcggattcactttctttacatttggttcacttcccactattctcttcatgttgtcctcagttagcattcaacgtattcctttacacctttgaccttgatgtgttctttcccgatttctcttatcaatcacctttcgacctacttctttgcctggtaataaacatctttttcgatatcttctatcaatcaccttttgacctttgtcaactaagtactcttcactccgagagttgtggatgcttctggtgacgatgtggtacttgagcctgctgcctttcagagaaaccttcaagtggttcgtcaaaagctagactggcggttgttgcctttgatccaaagaggacacatctgaaactctcagtccaaacaaaagtctctttgactttttaatccaacacagtttaattggttttcttttccatcaacaggttggttattaactcgagattagtatatgattcctctgaaatgagaccctaggtctcctttatcagtgagcaattatacacataatcacatatccgcatcttccaaaagaatcctagtagaacttgtctgtattacacatttctcccttattacatgaatactaagcactgcctaaaaggaaaggtgcttgacattggtacattgtttctgctatgggttctgattaacacgaggcctcacgggtacggcgcttgctccagtgaccacaatatgattgggaggtctgcttcgtgtaaattggcagtaatgtggaggtcgactttgccttggttgcaggcagtccctcgagtaatgccctggttctttgcaattgtagcaaatcaacgtcttctttgctgagctatccgtctggggacgatcattctgacttggagttggaattggtggctggaaatccttgctaacattggcatcagtggtaccatagttgctatcaccatcggagtctttctcagagtcacaattgctagggttgtcattttgggtgccatcattgatactatcgtcgacatcttagtgaatgatgttgacattgcacgcttgattcgagtggtcactaatggggcaagaagcatggttgttggtggtatcatcatcatcattagtattgctaatgttgttgtctgcattgtgtccatcttcttggggcggaaactcttgatgcgcaacagaagatccggtgatctgaagtggctcagtgcgctgtctttggttaccacatggaaatactgggattctgacaatccttctcttacagttcttcatccgattatgctcactttcgagttgtatggctttgtccacaagtttctcaaaatcttcataatcctctaggagtagttgcactgcaagctcatcttttaacccctggagaaacttctcttgtgtgtcttcatccgtctccacatcttctggtgcatagtgagccaaacgatagaactcgtgcaggtactctgtgacggtcaaatctccttgcttcaggtagcgaaactctcgttttctcagtgtgatcattcctgcgggaacatgtgatctcttgaatacagatgaaaactcgtcccaggtgatggtatgtccttctggccgtgatgcttcatagctatcccaccactctgaagccggtccaaccagctgaggagttgcgaagccaacccgctcctggtctgtgcactgaatcaaccccagcttcttctcgactatgcgcaaccaatcactggcttccataggatcgacggcaatggcaaaggttggaggctcagttttgagaaattctgataacttgcactgttgctggactgtaggtactcgaacgttggttgcccctgctgggttgttccaattctgtaatagttgaaaggctgttgccaacatgttggtttggttaaccacaatttggattagctctggtgaggtttcgttgatgcttttctcattcccattggtttgggttctttatcttgtacttgatttcttggctgctgtgctggaacatccaaaggtacaatgccgatactagcctcggtcttgtcaactgatggctggggctgaaattgggcattgacaccttgtggtgatgcactcgctggagttggagctgttgcaacgcgggctataggactgcttcgggatgcatggatgacaattcgctgaggagcaagcttctgattgcagggagttgcgtggactgacgtgctggcagctatgtttctcggtttttggcacttgtcggcaaaatgacccattccttgacaattgaagcaacagatatcttcccggactcggcattttcttttctcattttgattcctctgtcctggcactggagttaggctgaaactgtaatcttggcgaggatttgtgttgccttgatgcttctctccgttggaactggcgggttggttggccatcttcttcgtcagcagaaaactgaattgacaatcttttggtacatgatcagttccttcacaaaagaaacaagtgatcctgctcgttggacacctatcgggtggatggtcttcctcgcaatgaacgcatgtagtggcacacgagctggcaacatgaccgatttctccacaacgagagcatgccttacgttccattttattctggttgaaaccttggggagacttctcatcttcatcatctgaggagacttgatctgaatcttcactatcagacactctacctccattagctaaaagatgctctgtcaactgtggtgcacctcggaaggtatttcttctctgacgtttggtcattcctggtggaggccattctgtgctggtaatgatcatcttacggacttcatcttcggttcgcattggtgtttttcttttctgctagggacagttccttgcatagtgcccttgctcatcacacataaaacaaatgatacttgcttcttttgagtcaacatgtggcacgccaccatgggtcttttgggatgctggcggcatgctgacttgtggtgtgagtgattggactgcctccaactgcacttgaggttgtatctgactcaggttcagaattggcgtctgatgctgctgtagtatctctataagcaatcggttctggttaattaggtgttggaccagtgtcacacaactgttgtctggtgcttcattcactcgggagcttgaggtaccaatgtcctgacttctgaccttattgcctttctcattgtcagccatctgttgcaaaggtttggagagggagagagggaaaacaaaggggagagacagattagaaactaaggataggaccttaacagatctaagtcttttgctgttatgatgtatgttaggcttattctgcaagttgattaagcaaacaacctagcatggttacatcacaccccactgatgcaaaccacgcgctacacacacaagcaaggaaacacacgactaacgactctaccctagagggtggcttaggttcggtgacgggttctcaagatcttcactcctgcttcacagctggcttcactgcttccttcgcttcgctagcggatcctgcagtcttccggagcttcggcaaacaactgacgacatcttcttcttcgcaaaactgaccatctagtactagttgaaattcgaagaaggaagaagggagtaaaccttttgcaaatagcattaggggaaggagaaaaaaggaactttcgcaaatagttttatttataaaacatgtccttaggtttatccacttggcttatcctacagtcgagatggctctgataccagcttgtcgcgaccgagaaaattgcattttcccgaacgctagtgtattaatccccgtcccaggaaaagccgggatacaccatacaaacatgatataaaagacacatctttattatatcgataatatttacattattacaaaggcacttaaggcctgacaatcaaaaataaacagcagcggactagtgggcctacggctccatcttcacaggcgctcagctggggtataagccaggactccacctaagacttcttctccaaagcttctcttactgaaggggggagaaaggtagagcaagaatgagtacaaccacagtactcagcaagtcacaccggcagatgcatgattaatgcaagggggtacaaggggataataatataggggttaagttttgcagtaaacagcatttaaaagtcacttagttgcccaaagccatttataaagacgatcctagagctacacagtattattaaacaaggccgtgaaccctcacgaacctaccttaacccaaggcctacgatgattcagaccgaactggcaacccgaccctgggtcccagctcgtcccaagccaacccaggccaaccattccacattttagttgttaagcaaattttaagaattaaacactaacttgggtacattgctcggcttgcccataaccgagggcgcggctattcgaatagattatactctgatcagaggtgtacatctttacccacaagacacatcttcctcacgtgtaaccacgtgccacataccaccacggtatacggacggaagacgtgacatagttcccaacccatcttagccataaacaagagtaccgacccaaccccacctacggccggaacctccgggacaggtaggcaggaatgagcccccagcagcaggacaccagccctgtgccatgacatctcgactaccgggccgcagctcgtgtagccttcatttgtcctagagatgtccatcgacccccgacttcgtccatctccatccgtgtacttctgtttataaccagactgagccacaaactaagccttatccactagacatgtggaagtacggtagtgctttgcaacagaggcccgagcttaatccttatattggccggggtgctacttcccacaactggcatgcacccaaaccccaccggaaaacaggttttaggggttttgagagaggaagagaggggtatgtccaattccaccataatccaacaattccataatgtccaaatgatatgagaattcccaaagtctaaagttataaaaccacctaatgttgtcctattaatcagcgaagcatctaccctaattcatactagtggaaccataaatagagtacccactagttggggttttattttcctagggtgaacaaggtaataataacaatagcaataataatgtcttaacaaaggtaaataggcatggctaaataaaacagtgataacgcgggaaattaaataaagcgataatgcaataatttaaatcaaaataattttataaactgggattcaatatgttcaaggatgatgtgacttgccttgctcgctttcccaaacgtcggcttcaacctccacgaagagcggatcttccgaagctgcagcgtctacacgaccaacggaaaagaaaaggcttttactctaataaactccatataacaagcaggaacaaagcacaaaaatgggttcttgacttcttaaggaaaaattagagacttgaacggtccaattccgagttcaaatggccaagatatggccatttgcaagtttatatgctctttaaatggatatttgcgaatttcttcatttaaattttaattaaaaacccatttattgcgtcagccgagggagagggcgcgcggaccgggtccacgggagtggggcccacgcgtcagcctctcggtccacggtggaccgggtgcacgcggctggcggcggccggcgccgtgggtcccacgcgtcagccgcacccgcgggcgcgggcggctgacggccgggccccacctggcagccgcgggaggcggccgaaggcggcctcgccggctcgaccgacgggagacgcgcgcccgcgccccgatggtcaccgccggcgaccaccggcgcggcggagcggcgcccgagagagcggagaggagagggaagcgagagggacggtccacggctcaccccgggacaacgaggacggcggaaacgacggccggagcggaggaacgcggcggcgcggttcgggacgacgaaggagacggagctccggcggtcggcgggcgaagcgaaggggcggacggggtcggcgacaacgcggcgaagccgatggaggtggcgccgagtcgggaggaagaccggagcgacgacggcggctaaccgaaggtcggcggcgacggcggagagagaggagaacgtcgcgagcacgaatccgaaggcgagagcgagcggcgagcggcggaaacggaagagcggagctcggggaacgattatatagcgccgagagggggagagcgcggccggagagggaggaaacgggcgcggagatctcggccgccattgattgcgccggcgaggattgcgggcgcgattcgaacgaatccgagggagagagagagggaaaagagggggaaacgggagagggaatcacgggggtgattttccccgtctttaatgcgcgcggggacggcgggatgcggcgaaatccgcggcggcggcggcgctagggcacgggcgagcggcggcgcggcgcgaggaggaagacgacaggtgggacccacccgtcagcgagggcggcgggcgggcccgcctgtcagcggcgcgcgcgcgcgggaggccgatgggccgcgggggaagagagagagagggagggactgggccgagccggcccaagaagggagggggggggaaaggacttcttttagggatttttctttttataaaaccttttcaactttgtttatttcttaataattattatttgtgctctgaaaattccactaaaatttgagggctccttttagaccaaggagaatttaacaaaaattctccgggccacatttgaatttttcttgtacgtattttaatgtttgccaatttcttttcgaattttaattaattctattattccttttagaaaatgatttttatttcgggatgaatttatcaggacgtgacaattaccagggcaagcagctcccggagcaggagggtgacgatgcagagccccacgctgcttgggaggttactgcagtgatcctcactggctcacccgagaggacgtcgttggcggtcaccgcgggtggagattccttctccgccgcttgccagaacgccgcactcctcgccatcggcactcttcaccagcgctacccggacgagttgcagcactcgccctactgctaccaccctcgtcgtggaggagcccgcgactacgccaccttccgggatgctagctcgaaggatgacgctaccatcatgcacctggcgcgcatggtggaggcgtacgacgcggcccgtatcgacttccatcagatggtgcgtcgcgggttggtcgagaacagcatgaagatcctggagctgcgtcaggagaatctgcagctgaagaaggacctagacgcagtggaggcgcagctgcgacagcttaagatcgcccagggagaggtctgtcgccccaagcgtcaccgcgtctgccgcagcctgaagatcaccgcccgcaagagtacctccgggcccgagcttgttcgtcagtccctggtgtcgaaactagatttcggcaataataaaagggggtggctatcaagctggaaaagtgtatgggtttggagacgaaggatttatacaggttcaggccttcttattcaagaagtaataccctactcctgtccggggatgaatccgccgagtgtcttattgattgtataatttggagaaaatcaacaactgcccctagaggcacccggatcccccttatatatgggaaggagtccgtgttacaaaagataatctatatccctaacggaatatgcagatacagataaaatacagtcgtaaccgactaagtctcaaggtaattccttgacgtacaagttgagaaacaaacccgaaatacaaataagatattctatccatattcggtatcctatattcagcccaaatatcatcaccgtgtagatatgggatatccataatctccacagtagcccccgagacctttgcagtcaaccatcatagccttctcaaagataataatccgagtgcttcaaacttttcatgccaaggcctgccgagtagcgaagacgaagactgtaaagggcgaaaagataaagaatatggtgcatcgaatagatgcacctaattaggtgtagcccccaactatgtgattagttaacaaactaaacatatagttgaagacaaaataatagcacaatcgtgcatcatatgacaaaagcatacgcggcacctaaagaggtattatagccgactgctttttagccataataaaaggaatccgagtggttaacactctaaaaggttcacgaatgaacatacttgacaggcatccgaataaaaaactccaaagattacccaccaaatattataaaaattatagtaatgaataagtctaatagcctaggctatgactatttaccataatgaaaacaggcatataacataccaaagaaatgactatggtaaaaacaagtcatttcaagttaacccagacagcttttgtagcctaaaaaagcttacaaaaacagcataacacctttctgtcgggcaccttttaatttgcattgcaataattccaaagaattatatgaccgcgtaaaaaggattttatcagcattgggcaacactattgtgcgcataaattgccaaagcaaaaaatgcctaagtccctaaggagcacaatgggccacgctgttaaaagtactgggctgaggtactgttcaggcctaagcccatttgcacctccgatacccttaacaataaattccgagatccaagcgtcacttcgtcttccccgccggaactctcgccattttccccaatccctgctacagtacagagctgcgccaacaaactagggttcatcattccactcgaatccaccttcgaaaagttcagcaaaatccttcccgtgatccaccgccgcaatccctcacctctccctagccatccctcgaatcaaatcagcgcattcgggtaaaatcgatggcggaagagaaagaaagctttgaaggccaatgggcaccatccgacgtaacggaggagaacctgaaggagatggtggcgcacggcgttctccctgccaaggagatcatcgggtggcggccagcatgcggtgaggcttttccgtcccccgatacacacgaggttgtagtcttttcccatttcttctatggcggcttcgctcttccgacctcaaaatttttccgcgggatattaagcttctatggaatcagcttgcatcacctaaatccaaattccatagtccacatcgccaatttcatccatgtttgtgaagccttcttgggaattaaaccccacttcgctctatttcgccgaatcttctttctcaaaccccaaccgaacaagagtaagccatgtgtagtcggaggggccggatttcagctgaggggaactctgagccagaagtacttctcgatgcccttcaagacttcaaacaaaggatggcatgcgaactggttttatgttcagaaccctgagcctgctcttcccgagtactcttgtcttcctccggtgtaccaagatacttggaactctcttccgatcggggatgaagctgctgtcacgcccagaaattcacgaaccagaatttctaagctgaatgtgcattaaacccctgtccaggaccagccagggtacacaaacgacaattgttgacatacagatccacgtcttacaaaaatataaaagattacaaatgcagcggagaaagataaaagcgagctaagcctgaagacttgactcctgcagcgggcgactccattccacaggcaatccttgacgggcagcgacgaaaccaacctcttcgagacatcttcaactggg

SEQ ID NO: 23753 - DNA, 42671 bp, Oryza sativa
gcggaaacggtggagtgaggcacggggagcgtttatatagtgttgggagtgaaagagggcgaccggaggggaaggaaaccggcgcggcgatctcgggctgcatcaatggcgccggcgaggtttgcgggagtatttccaaacgaatccgaggaagagagagagggaaaagtggggggaaagggagagggaatcacggggagtgatttccccctctttattgcgcgcgggggcggcgggatgcggcggaatccgcggcggcggcggcgctggggcacgggcgaggcggcgggtgcggcgcgaggtaggggatgacgggtgggccccacccgtcagcgagggtggcgggcgggcccgcccgtcagcggcgcgcgcgcgggggaaggccggatgggccgcgggggagaggagagagagggagggagctgggccgagccggcccaagaggagaaggggggggaaaaggacttgtagggtttttctttttataaaacctttttaactttgtttatttcttaacaattattatttgtgctctgaaaattccactaaaatttgagggctcctttttgaccaaggagaatttaacaaaaattctccgggccacatttgaatttttcttgtacgtattttaatgtttgccaatttcttttcgaattttaattaattctattattccttttagagaatgaattttaattttgggatgaatttatcaggacgtgacagctgcactgcacagtgtctagctttttccccacggcatgcaaccaatccaaagcatccacggggttattggagctagagaaggtaggtgggcggatgcggaggaactcggcgagtttagagtgttgtgggggtggtggtggagcattctgttgtggcgggttttggaggtggtggaggaaagcggtcatcatgttggcttgctgggcgaggatttgggtgagaatggcgttggtgtctggtggtggtggtggaggcggaggaggaggtggaggtgggttgccctggtggtggtggttgctgccttcaggttggtcgccatcaccggtagcagcatttctcctggtcgtcaccatctgaaaaccccacacagaaccagcaaacagagaaagagctaacaattaaaactaaccacccacgactaccattattcttaattttattactgctattaaattggttcattaatgttcaagttgcttaggcaaataaaataagacaggctccgacatagttatgccacacaccggcataaccatgccccacacaactcaaaaagacaaacgagaaagaacacacgcgcaagcctactaactgctcgtctactgctgcgacgggccaggacggaaggtgagcaacagcgcaccctccgtgctaccaacgccggaggcttccccctcctggggaaccacgggcgcgggctcggcacgaggggtctcgacgaagcaagtccacgccagggactgacgaacaagctcgggcctggaggtgctcttgcgggcggtgatcttctggctgcggcagacgcggcgacgcttggggcggcagatctctccctgggcgatcttgagctgatgcagctgtgcctccaccgcgtcgaggtccttcttgagctgcaggttctcctgacgcagctccaggatcttcatgttgttctcgaccatcccgcggcgcaccatctgatggaagtcgatacgagccgcgtcgtacgcctccaccatgcgcgccaggtgcacgatggtagcgtcatcctccgagctagcatcccggaaggtggcgtagtcgcgggctcctccgcgacgagggtggtagcggtagggcgagtgctgcaactcgtccgggtagcgctggtgaagagtgccgatggcgaggagagcggcgctctggcaagcggcggggaaggagtctccacccgcggtgactgtcaacgaagtccgctcgggagagccagagaggatcactgcggtgacctcccaaccagcgtggggctccgcgtcgtctccctcctgatccggaagcggcctggcctggtagtccactccgtgtggataccccagggccacgcacatgcctcgcagctccaagacgaagccagtcatatccaaaccacgacgggtgacgctgccggccatctacaaacaaaaacaaaaagagaaacaacattttaaaggtcagattttgatgataagtgaagcagcaagacagagagagactagacagttttcacaagtaacaaaggatttttatttttgaaaatattgctaaggcttgggatctacggctcgtcctagggtcaaggggggctctgataccaacttgtcacgaccggaaataacccaacgggcattcctgacgtgcgtgcattaatccttgtcccaggaggcaaggtacaccaaaagttgatacaattcagagtttaacaagcggaagcgtaaatagttaacttattacatgggcaacggaggcccagcacacacaaagacaaacgggaaacagcggaagactagggcgacgaccacaggcgcttgacggcaggcacgagctagacaccaaagccttcatcttcaaggagctcctcttctgggcttgggaaaaattgagcaagactgagtacaaccaccgtactcaacaagacacacccacaaatgcagaataaatgcaagggagtacaatggaattataacataaagggttagggttgcagtaaacagcatttaaagacatttagttactcaaagctattctgtaaacacgatcttagaactatacaatattattaatcaaggccgtgaacccacacgaacctgccttaacccaaggcctatgatggttcagaccgaactggcaacccgaccctgggtcccagctcgtccgaagccaacccaggccaaccattccatattttagttgttaagcaagttttaagaattaaaacactaacttgggtacattgctcggcttgcccataaccgagggctcggctattcgaatagattatactctgatcagaggtgtacatctttacccacaagacacatcttcctcacgtgtaaccacgtgccacataccaccacggtatacagacggaagacgtgacatagtttccaacccatcctagccatagacaagagtaccgacccaaccccacctacggccggaacctccgggacaggtaggcaggattgagcccctagcagcaggacaccggccctgtgccatgacatctcgactaccgggccgcagctcgtgtagccttcatttgccctagagatgtccatcgacccccgacttcgtccatctccatccgtgtacttttgtttatgactagactgagccacaaactaagccttacccactagacatgtggaagtacggtagtgctttgcaacagaggcccgaagaccggtccttatatggccgaggtgctaccatcaaaaccatgcaccccgagcccagcctaaaaccattttaggggattttgaatagagggggcggggtgaagccaattccacaatactccaacaattccatagtgtccaggtgatatgagaatttcccaagtctaagttataaaaccatctaatgttacctaattaaatagcgaagcatctacctaaatttaaactagggataccacgagtagagtgtccactagttggggttttgtttaatctagggtgaacaaggtaataataacaacaataacaataataatatggtcataacaaaggtaaataggcatggctaaataaaacagtgataacgcgggaatttaaataaagcgataatgcaataatttaaatcaacataattttataaattgggattcaatatgctcaaagatgatgtgacttgccttgctcgctttcccaaccgacggcttcgacttccacgaagagcggatcttccgaagctgcagcgtctacacgaccaacggaaaaggaaaggcttttactctaataaactccacataacagcagaaacaaagcacaaaaatgggttcttgacttcttaaggaaaaattagagacttgaacggtccaattccgagttcaaatggccaagatatggccatttgaagtttatatgctctttaaatggatatttgcgaatttcttcatttaaattttaattaaaaaccgggtttattgcgtcagccgagggagagggcgcgcggaccgggtccacgggagtggggcccacgcgtcagcctctcggtccacggtggaccgggggcacgcggctggcggcggccggcgccgtgggtcccacgcgtcagccgcacccgcgggcgcgggcggctgacggccgggccccacctggcagccgcggggcgcgcccgaaggcggcctcgccggcacggccgacgggagacgcgcgctcgcgccccgatggtcaccgccggcgaccaccggcgcggcggagtggcacccgagagagaggagggaagggggaagcgagagggacggtccacggctcaccccgggacaacgaggacggcggaaacgacgaccgaagcggaggaaagcggcggcgcggttcgggacggcgagggcgacggagctccggcggtcggcgagcgaagcggaggggcggacgaggtcgacgacgacgcggcgaagccgatggacgtgacgccgagacgggaggaagtccggagcgacgacggcggtgaaccggagctcggcggcgacggcggagagaagatgcgacggcgcgagcacgattccgacggggagagcgagcggcggacggtggaaacgtaggacagaggcacggggaacgtttatatagcgccgggagagagagagagcggccggagagagaggaatcggccgcggagatcgcggctccatcaatagcgccggcgaactttacgggaataaaatcggtcgtatccgagggagagagagaggggaaagtgggggaaacgggagagggaatcgcggggaataattccccccactttaatgcgcgcggggacggcgggatgcggcggattcggcggcggcggcggcgctagggcacggacgggcggcgggcgcggcgcgaggaaggcgatgacaggtgggccccacccgtcagcgagggtggcgggcgggcccgcctgtcagcggcgcgcgcgcggggaggggccggtgggccgcgggggagaggagagagagggagggagagttgggccgagccggcccaagaagggaaggggggaaaagaagacttttagggatttttctttttataaaccttttcaactttgtttatttcttttcaattattatttgtgctctgaaaattccactaaaatttatttacgcattttaggcttttaggaaatatacaaaaatcctccaagccttatttgacttttaaatttgcacattttaattgttggaggctttcacatgaattttaattattctttgcacaatttcgaggatgaattttagagtcgatttgggacgtgacaggtatactcacaatcagaggaagaccatcagcagcatctccgtctggtgttgggaaagttgcgggaacaccaattgtatgccaagctcagcaagtgtgagttctggttgtccgaagtcaagttcttagggcacgtgatatctgctaaaggagttgctgtggatcctgaaacggtgaccaccgttactgattggaagcaacccaagacagtcactcaggttcgtagctttttgggtttggcaggatactatcgaagattcatcgagaacttctccaaaatcgctcgacccatgacacagttgctgaagaaagaagaaaaatttgtgtggagcccgcaatgcgagaaggcgttccaaactctcaaggaaaagctagtttcctcgccagtgttaatcttaccggatactcgcaaggacttcctggtgtactgtgacgcttcgcgccaaggattggggtgcgtgctcatgcaggaaggccacgtggtagcctatgcctcccggcagcttcggccccatgaaggcaactaccctacccatgatttggagttggccgctgtggttcatgctctaaaaatctggcggcattatctcattgggaatcgctgcgaaatatatactgatcataagagtttgaaatacatcttcacctagtcagatctgaatcttcggcagagaagatggttagagctcatcaaggattatgatgtgggaatccactatcaccctggtaaggccaatgtggtcgcagacgcgctgagtcgaaaaagccgttgcaacactcttggcgtccgtggcattccaccggaacttcatcaacagatggaagccctgaacctaagcatagttggtcgtggattcttggctacgctggaagccaagcctaccttgctcgatcaaatccgcgaggctcagaagaatgatccagatatgcatgggatcctcaagaatatgaaaaaaggtaaagccgctggtttcacagaagatgaacatggaaccctatggaacagaaatcgtgtatgcgttccggacgacaaggaacttaaacagttgatacttcaggaagctcacgaaagtccctattccatgcatcctggcagcacgaagatgtacttggacttgaaagaaaaatattggtgggttagtatgaagcgggaaattgcagagttcgtggccctttgtgatgtgtgccagcgtgtcaaggcagagcatcaacggccggtcggatttctccaacctctacaagtaacagaatggaaatgggatgaaattgggatggatttcatcaccggacttccaaaaacccaaggcgggtatgactctatatgggtagtcgtggaccgactaaccaaggtagctcggttcattccggtgaagaccacctatggagggaacaaactagctgaactctacttcgctaggatcgtgagtctccatggcgttcctaagaaaattgtatctgatcggggaagccagttcacctctcatttctggaagaagctccaagaagagttgggtacctgcttaaatttcagcaccgcgtatcacccacagacagatggacagaccgagcgtctaaatcagatcctagaagatatgcttcgcgcatgtgtcctagattttgggaagacatgggataagagtctcccctacgccgagttctcctacaataacagctaccaacccagcatacagatggcaccgtacgaagcgttgtatggccgcaaatgccggacaccgctattgtgggaccaagttggggaaagcgaagtgttcgggactgatatcctgagagaagctgaagcgaaggtcaaaaccattcgggataatctaaaggtggcacagtcccagcagaagagctatgcagataaccgacgccgtaacctggaatttgcagtggatgactttgtgtatctccgggtcacgctgttgcgaggcatacactggtttcagaagaaagggaagctcgcacctcggtttatgggtcctttccgtatcattgcttgacgcggagaagtcgcttaccagttggagctgcccgcctccttgggcaacgtgcatgatgtgttccatgtgtcgcaactcaagaaatgtcttcgagtgccatccgagcaggccgactcagagcagattgaagttcgcgaagacttcacctacgtggagaggccagtgaaaatcctggacaccatggagcgcaggaccaggaaccgggtaatccgtttttgcaaggtccaatggagcaaccacgccgaggaagaagctacatgggagcgtgaagacgagctgaaggcagcccatcccgatctcttcgccagttcttccgaatctcggggtcgagattccgtttaaggggggtaggtttgtcacgttccaaaacgactctaaaatatatcccttaaatgatgcctagaataattaaaatccgtgtgaaagcctccaacaattaaaatgtgcaaagttaaaagccaaataaggcttagaggatttttgtaaatttcctaaaagactaaaatgcgtaaataaattttagtggaattttcagagcacaaataataattattaagaaataaacaaagttaaaatgattttataaaaagaaaaaccctaaaagtcccccttccctcccttgggccggcccggcccatctctcctcccccctctctctctctcctctccccgcggcccattcggcctctctccccgcacgcgcaccgctgacgggcgggctcgccagccaccctcgctgacgggtggggcccacccgtcatccccttcctcccgccgctcccgtcacctcccccgcgccctagcgccaccgccgccgcgaatcctgccgccacccgccgtccccgcatgcaataaagtgggggaaatcactccccgtgatcccctctccctttccccccatttttcctctctctctctcgcgttcaaacgggcggatttgcccccgcaaatctcgccggcgccattgatggtggccggacctcccgtgccggtttccttccccaccggccgctctctcccccttccaacctatttaaaccctgcccgcgcctccctcgcccgtttccgccccttgccgcaccgtctccccgccggaatcgagctcgcgccgttgccctctctctcctccatcgccgacgacctccggccggccttctccgctcgccgggaccgtctcccgcctcggcgtcgcctcctccggctttgccgcaccgccgtcgaccccgtccaccccctcgccgagtccgccgaccgccggaacaccgtcgaccccgtcgacccgagacgcgccaccgccttcctccgctccggccgcctttttcgtcgtcgccgtcaacctagggtgagccgtggaccgccgcctcttttcccccttcccttcccctctcttggccgccgctccgccgtgcctatggccgccgccggcgaccataggggcgcgggcggcgccacctgccaaccgcgccgagtggccgccttcgggcgcgcagagtggccgccgcgtgggggccggctgtcagccgcccgcgccctcgggtgcggctgatgcgtgggacccacggcaccggccggtgcgagcccgggtgcgcccggtccaccatggaccgtgaggctgccgcgtggaccccactcccgtggacccggtccgcgcgcccctccccctcggctgacgcaataaaccctttttaaattaaaatttaaatgaagaaattcgcaaatattcatttaaagagcatataaacttcaaatggccgtaacttggccatttgaactcggaattggaccgttcaagtctctaatttttccttaagaagtcaagaacccatttttgtgctttgttcctgcttattatatggagtttattagagtaaaagcccttttttttccgttggtcgtgtagacgttgcagcttcggagatccgctcttcgtggaggttgaagccgacgtttgggaaagtgagcaaggcaagtcacatcatccttgaacatattgaatcccagtttataaaattattttgatttaaattattgcattatcgctttatttaaattcccgcgttatcactgttttatctagccatgcctatttacctttgttatgaccttattattgttattgttattatttccttgttcaccctagaataaacaaaaccccaactagtggacactctactcatggtaccactagtatgattttaggtagatgcttcgctggttaattaggcaacattaggtggttttacaactctagactttgggaatactcttatcacctggacactatggaatggttgaattattgtggaattggattcacacctccccctctattcaaaaccctcaaaatggttttagggtgggctcggggtgcatggttttgatagtagcacctcggccatataaggaccggtcttcgggcctctattgcaaagcactaccgtacttccacatgtctagtgggtaaggcttagtttgtggctcagtctggttataaataaaagtacacggatggagatggacgaagtcgggggtcaatggacatctctatggcaaatgaaggctacacgagctgcggcccggtagtcgagatgtcatggcacaggcccggtgtcctgctgctaggggctcagtcctgcctacctgtcccgggggttccggtcgtaggtggggttgggtcggtactcttgtctatggctaggatgggttggaaactatgtcatgtcttctgtccgtatgccgtggtggtatgtggcacgtggttacacgtgaggaagatgtgtcttgtgggtaaagatgtacacctctgatcagagtataacctattcgaatagccgcgccctcggttatgggcaagccgagcaatgtacccaagttagtgttttaattcttaaaacctgcctaacagctaaaatgtggaatggttggcctgggttggcttgggatgagctgggacccagggtctggttgccagttcggtctgaatcatcgtatgccttgggttaaggcaggtccgtgtgggttcacggccatggttaataatattgtatagctctaggactgtgtttacaaagtagctttgagcaactaagtgacttttaatgctgtttactgcaaaccctaaccccctatattatagctcccttgtactcccttgcatttattctgcacatgtgggtgtgtcttgttgagtacggtggttgtactctgtcttgctcaatttttcccaaacccagaagaggagcccctggatgatgaaggctttggtgtctagctcgtgcctgccgtcaagcgcctgtggtcgtcgccctagtcttgcgctgtttcccgtttgtctttgtgtgtgctgggccttcgccgcccatgtaataaagtaactattcacgcttccgcttgataaactctgaaatgtatcaacttttggtgtaccttgcctcctgggacaaggaataatgcacgcacgtaaggaacgcccgttgggttatttccagtcgtgacatgcattgtggacgaaacttttaccattatgtggtcgacggcgctatcgaccgatgttggattttccgccaactcagttgatgcgcaactgctgcgtttttaggtgggacttcctaactcttcatacgcagcagcagcggcggcctgggggttctgttgctcttcttggatctcttgcctaatcttggccctcattgactcgagcttttcgtcgaattcagatgtcagctcagctcttattgacgcccggatcttggcttcaaggcgtgcatctttctccgccttgttggaagtccgcttcttgtactgccacgcgtagtctggaaatccatacttctagggaacggaagacccaacgccccgtgtccgtccacgatgttccttgttgcccaacgctttcgtgagaaggtcgtcctcgcgtctttgagagcaggcctcttgcgaggcttattgctcggcaaccaactccttctgcattataatttagtggggttaaataaactgcacgatgggaaacaatgtgaatatctagtttgactagacacttagtatagcttcgtacactcgttgatcttctggattgtcacgtcccaaaacgactctaaaatacatcctctaagatatgcctagaataattaaaaaccgtgtgaaagcctccaacaattaaaatgtgcaaagttaaaagtcaattaaggcttagaggatttttatatatttcctaaaagcctaaaatgcgtaaataaattttcgtggaatttttagagcacaaataataattattaaggaataaacaaagttaaaatgattttataaaaagaaaaactctaaaaagtcccctttcccttcctctccttcttgggccggctcggcccatctccctccccctccctctcctctccccacggcccatccggcctatccccgcgcgcgcgccgctgacgggcgggcccgcccgccaccctcgccgacgggtggggcccacccgtcatccccttcctcccgccgctcccgccgcctcgcccgcgcctagcgccgccgcctccgcgaatcttgccgcctcccgccgtccccgcgcgcaataaagtggggggaattattccccgtgattccctctccctttccccccatttttccctccctctctccctcggattcgtttggaaaccgttcccctaacctcgccggcgccattaatggcggccgggtctcccgcgcccatttccccctcctccggccgccctctctcactcccaaccctatataaaccctccccgagctcccaccaccgtttccgccactcgccgccctctcttcccgccggaatcgagctcgcgccgtcgctctctctctccgccgtcaccgccgagctccggtccgccgccatggacgccccggaccacctcccacctcggcgccgcctccttcggcttcgccgcatcctcgccgacctcgtccacctctccgtttcggtcgccgaccgctggagcatcgtcgaccccgtccaccctagccgcgccgccgccttcctccgctccggtcgccgtttccgtcgtcgccgtcgacccggggtgagccgtggaccgccgcttcgtttccccctttccctcccctctctcgggcgccgctccgccgtgcctatggccgccgccggcgaccataggggcgcgggcgcgccgcctcccgccggccgcaccggtgtggccacctccgggcgcgcctagcggctgccgcgtggggcccggccgtcagccgcctgcgccctcgggtgcggctgacgcgtggggcccacggcgccggccggtgtgagccgggtgcacccggtccaccgtggaccgtgagactgccgcgtgggtcccactcccgtggacccggtccgcgcgccctctccccggctgacgcaataaatccattttttttttaaattaaaatttaaatgaagaaattcgtaaatattcatttaaagagcatataaacttcaaatggccataacttggccatttgaactcggaattggaccgttcaagtctctaatttttccttaagaagtcaagaacccatttttgtgctttgttcctgcttgttatacggagtttattagagtaaaagccttttcttttccgttggtcgtgtagacgctgcagcttcagaagatccgctcttcgtggaggttgaagccgacgtttgggaaagcgagcaaggcaagtcacatcatccttgagcatattgaatcccagtttataaaattattttgatttaaattattgcattatcgctttacttaaattcccgcgttatcactgttttatctagccatgcctatttacctttgttatgaccttattattgttattgttattatttccttgttcaccctagaataaacaaaaccccaactagtggacactctactcatggtaccactagtatgatttttggtagatgtttcgctggttaattaggcaacattaggtggttttacaactctagactttgggatattctcatcacctggacactatggaatggatggattattgtggaattggattcacacctccccctctattcaaaatcctcaaaatggttttaggctgggctcggggtgcatggttttgatagtagcacctcggccatataaggaccggtcttcgggcctctgttgcaaagcactaccgtacttccacatgtctagtgggtaaggcttagtttgtggctcagtctggttataaacaaaagtacacggatggagatggacgaagtcgggggtcgatggacatctctagggcaaatgaaggctacatgagctgcggcccggtagtcgagatgtcatggcacagggccgatatcctgctgccaggggctcagtcctgcctacctgtcccggaggttccggccgtaggtggggttgggtcggtactcttgtctatggctacgatgggttggaaactatgtcacgtcttccgtccgtataccgtggtggtatgcggcacgtggttacacgtgaggaagatgtgtcttgtgggtaaagatgtacacctctgatcagagtataatctattcgaatagccgcgccctcggttatgggcaagccgagcaatgtacccaagttagtgttttaattcttaaaacatgcttaacaactaaaatgtggaatggttggcctgggttggcttgggacgagctgggacccagggtcgggttgccagttcggtttgaatcatcgtaggccttgggttaaggcaggttcgtgtgggttcacggccttgtttaataatattgtatagctctggaatcgtgtttataaaatagctttgagcaactaagtgtcttttaatgctgtttactgcaaaccctaaccctttatgttataacccccttgtactcccttgcatttatcctgcacttgtgggtgtgtcttgttgagtacggtggttgtactcagtcttgctcaattttttcccaaacccagaagaggagcccctagaagatgaaggctttggtgtctagctcgtgcctgccgtcaagcgcctgtggtcgtcgccctagtcttccgctgtttcccgtttgcctttgtgtgtgctgggccttcgccgcccatgtaataattaactatttacgcttccgcttgttaaactctgaattgtatcaacttttggtgtaccttgcctcctgggacaaggaataatacacgcacgtaaggaacgcccgttgggttaattccggtcgtgacatggatttggcatgaagattgtgccatcagcattcttctggtacctagccctggccctgttcctagcccgagggtgtgggatatcgccaaagacgagcggcgtgttcgattcctccgcttcttcatcctcatgctgtcattcctctttcttaccagcatatccggcggtgccaagccggtgcggatgctggttcttggtctggagcaatcgatatgcctcgcttctagctttggactcgggggtcgacttcttcgcatggaattcctcctagacttgttccgtgatccaaggaaatttctctcttagatctggattcgccgggttgtagacgaactcgccgactagcttagtcttgaagttcttccaagcattgcccataaccttgaaagcagtctgcctgatacagtcctcttgctcgataggataatcgaagctctccttgaacattagcccaacaatgtccttctctgcggccagcatgtgcttgatgtcatcttgcagaatactgaatttctgccgacctatgaccccgcagatagacctaaatcggctcaatattttccttggagttgttggcaaccctacttggtccaccgctgttatgcggaaccgttccttagggattttgttccctgtcctaggagtacgtgcccttgaggacccactagttgtcgtcgacattggttcgccttgctgagacatcgtctactttttttcaaaataacgaaaatacacaattcagtgctaaaatctattacaatgaattgaatgtcacttataaataaatgaaacatatcaataaactaaattgcacatctcatccttataaaatgaattgaatgtcacatataaataaactaaactgtcacgaccggaaataacccaacgggcgtttcttacgtgcgtgcattattcctcttcccaggaggcaaggtacaccaaaagttgatacagctcatagtttaacaagcggaagcataaatagttaatttattacatgggcggcgaaggcccagcacacacaaagacaaacgggaaacagcggaagactagggcgacgaccacaggcacttgacggcaggcacgagctagacaccaaagccttcatcttccaggaactccttttctgggtttgggaaaaaattgaacaagactgagtacaaccaccgtacttaacaagacacacccacaagtgcagaataaatgcaagggagtacaagcgggttataatataaagggttagggtttgcagtaaacagcattaaaagacacttagttgctcaaagctattttgtaaatacggtcctagagctataccatattattaaacaaggccgtgaacccacacgaacctgccttaacccaaggcctacgatgattcaaaccgaactggcaacccgaccctgggtcccagctcgtcccaagccaacccaggccaaccattccacattttagttgttaagcaggttttaagaattaaaacactaacttgggtacattgctcggcttgcccataaccgagggcgcggctattcgaatagattatactctgatcagaggtgtacatctttacccacaagacacatcttcctcacgtgtaaccacgtgccacataccaccacggtatacggacggaagacgtgacatagtttccaacccatcctggccatagacaagagtaccgacccaaccccacctacggccggaacctccgggacaggtaggcaggactgagcccccagcagcaggacaccggccctgtgccatgacatctcgactaccgggccgcagctcgtatagccttcatttgtcctagagatgtccatcgacccccgacttcgtccatctccatccgtgtacttttgtttataaccagactgagccacaaactaagccttacccactagacatgtggaagtacggtagtgctttgcaacagaggcccgaagaccggtccttatacggccgagatgctactatcaaaaccatgcaccacgagcccagcctaaaaccattttgatgattttgaatagagggggaggtgtgaatccaattccacaataatccatccattccatagtgtccaggtgatgagaatatcccaaagtctagagttgtaaaaccacctaattttgcctaattaaccagcgaagcatctacctaaaatcatactagtggtaccatgagtagagtgtccactagttggggttttgtttattctagggtgaacaaggaaataataacaataacaataataaggtcataacaaaggtaaataggcatggctagataaaacagtgataacgcgggaatttaaataaagcgataatgcaataatttaaatcaacatacttttataaactgggattcaatatgttcaaggatgatgcgacttgccttgctcgctttcccaaacgtcggcttcaacttccatgaaaagcggatcttccgaagctgcaacgtctacacgaccaacggaaaagaaaaggcttttactctaataaactccatataacatgcaggaacaaagcacaaaaatgggttcttgacttcttaaggaaaaattagagacttgaatggtccaattccgagttcaaatggccaagttatggccatttgaagtttatatgctctttaaatgaatatttgcgaatttcctcatttaaatgttaattttaaaaaaagtttattgcgtcagccgaggggagggggcgcgcggaccgggtccacgggggtgggacccacgcggcagcctcacggtccacggtggaccgggtgcacctgggctcacaccggccggcgctgtgggccccacgcgtcagccgcacccgagggcgcgggtggctgacagccgggccccacgcggcagccgctcggtgcgcccgaaggcggccactgctgcgcggccggcgggaggcggcgcgcccgcgcccctatggtcgccggcagcggccataggcacggcggagcggcggccgagagaagggagggaaagggggaaacgaggcggcggtccacggctcaccctaggtcgacagcgacgacgaaaaggtggccggagcggaggaaggcggcggcgcggctcgggtcgacggggacggcggcgctccggcggtcgacgagcaaaacggaggggtggacaaggtcggcgaggatgcggcgaagccgaaggaggcggcgccgaggtgggaggtggtccggggcgacgacggcggcggaccggagctcggcggcgacggcggagagagagagcgacggcgcgagctcgattccagtcgggaggaagggcggcaagaggcggaaacgaacggatgaggtgcggggagggtttatatagggttggaagggggagagggtggccggaggggaaggaaactggcgcggcgctctcgggctccatcaatggcgctggcgggattaggggagggtttccaaacgaatccaagggagagagggagggaaaattgggggaaagggggagggaatcacggggaataattcccccctattgattgcacgcggggaggacgggggcggcgggattcgcggcggcggcggcgctagggcgcgggcaaggcggcaggagcggtgggaggaaggggatgacgggtgggctccacccgtcagcgaggctggcgggcgggcccgcccgtcagcggcgcgcgtgcggggagaggccggatgggccgaggggagaggagatggagggggagggagatgggccgagccggcccaagagggagagggaggggaaggggactttttagagtttttctttttataaaatcattttaactttgtttatttcttaataattattatttgtgctctgaaaattccactaaaatttatttacgcattttaggcttttaggaaatatacaaaaatcctccaagccttatttgacttttaactttgcacattttaattgttggaggctttcacacggattttaattattctaggcataatttagaggatgtattttagagtcgttttgggacgcgacaaacctaccccccttaaacggaatctcgaccccgagattcggaagaactggcgaagagatcgggatgggttgctttcatctcgtcttcacgctcccaagtagcttcttcctcagcgtggttgctccattggaccttgcaaaaacggattacccggttcctggtcctgcgctccatggtgtccaggattttcactggcctttccacgtaggtcaagtcttcgtgaacttcaatttgctctgaatcggcctgctcggatggcactcgaagacatttcttgagttacgacacatggaacacatcatgcacgttgcccaaggaggcgggcagctccaactggtaagcgacttccccgcgtcgagcaatgatacggaaaggacccacaaaccgaggtgcgagcttccctttcgtctgaaacctgtgtacacctcgcaatggcgtgacccgaaggtacacaaaatcgtccactgcgaattccagattacggcgtcggttatctgcataactcttctgccgggactgtgccacctttagattatcccgaatggttctgactttagcttcagcttctctcaggatatcagtcccgaacacttggctttccccaaattggtcccacaatagcggtgtccggcatttgcgtccatacaacgcttcatagtgtgccatttgtatgctggcttggtagctgttattgtaggagaactcggcataggggaggctcttatcccaggtcttcccgaaatctaggacacatgcgcgaagcatatcttctaggacctaatttagacgctcggtctgtccatctgtctatgggtgatacgcggtgctgaaatttaatcgggtacccagctcttcttggagcttcttccaaaagtgagaggtgaattggcttcccctatcagatacaattttcttaggaacgccatggagactcacgatcctagcgaagtagagctcggctagtttgttccctccataggtggtcttcacaggaataaaccgagctaccttggttagtcggtccacaactacccatatagaatcatatccgccttgggtttttggaagtccggtgatgaaatccatcccaatttcatcccatttccattctggtacttggagaggttggagaagtccggccggtcgttggtgctctgccttgacacgctggcacacatcacaaagggccacgaactctgcaatttcccgcttcatactaacccaccagtatttccctttcaagtctaagtacatcttcgtactgccagggtgaatggaataaggactttcgtgagcttcctgaagtatcagctgtttaagttctctgtcgtctggaacgcacatccgatttccgttccatagggttctgtgttcatcctctgtgaaaccagcggctttaccctgtttcatattcttgaggagttcacgcatatccggatcattcttctgagcctcgcggatttgatcgagcaaggtaggcttggcttccagcgtagccaagaatccacgaccaactatgcttaggttcagggcttgcatctgttgattaagttcgggtggaatgccacggacttcaagagtgttgcaatggctttttcgacttagagcgtcggcgaccacgttggccttaccaggatgatagtgaattcccacatcataatccttgatgagctctaaccatcttctctgccgaagattcagatctgactgagtgaagatgtatttcaaactcttatgatcagtatatatttcgcagcgattcccgatgagataatgccgccagatttttagagcatgaaccacagcggccaactccaaatcatgggtagggtagttgccttcatggggccgtagctggcgtgaggcataggctaccacatgaccttcctgcatgagcacgcaccccagtccttggcgcgaagcgtcacagtacaccatgaagtccttgcgagtatccggtaagattaacaccgacgaggaaaccagcttttccttgagagtttggaacgccatctcgcactgcgggctccacacaaatttctcttctttcttcaacaactgggtcatgggtcgagcgatattggagaagttctcgatgaacctccggtagtatcctgccaaacccaagaaactgcgaatttgagtgactgtcttgggttgcttccaatcagtgacggcggtcactgtttcggggtccacagcaactcctttagcagatatcacgtgccctaagaatttgacttcggacaaccagaactcaaccagagctgacaactaaaactaaccactcacgactaccataattcttgaatttatttctgctattaaattggttcattaaagttcaagttgcttaagcaaataaaataaagacaggctccgacacagttataccacacaccggcataaccatgccccatacgactctagcagaaaaacaaacgagaagaacacacacgtaagcctactaactgctcgtctactgctgcgacgggccagggcggaaggtgagcagcagcgcatcctccatgctgccaacgccggaggctccatcctcctgaggaaccacgggcgcgggcttggcacgaggggtctcgacgaagcaggtccacgccaggtgtggagattatggatatcccatatctacacggtgatgatatttgggctgaatataggataccgaatatggatagaatatcttatttgtatttcgggtttgtttctcaacttgtacgtcaaggaattaccttgagacttagtcggttacgactgtattttatctgtatctgcatattccgttagggatatagattatcttttgtaacacggactccttcccatatataagggggatccgggtgcctctaggggcagttgttgattttctccaaattatacaatcaataagacactcggcggattcatccccggacaggagtagggtattacttcttgaataagaaggcctgaacctgtataaatcctttgtctccaaacccatacacttttccagcttgatagccacccccttttattattgccgaaatctagtttcgacagttggcgcgccaggtaggggtagcgtcaagcttctcgccgatcagtgcaatgggttccgtctccggcatcgacgacctcgtcttcccacccgggcagacgtttcggttcggcagcctcgacttcgtcaccaacaacttcggcaagatctctctccttgactcggtgtcagaccagtcgggagagaaccggatttcagtcccgtttggactcccaaacgcggctgaaagttacttcaagaccatctcaatcgagtcggcttcaaaccactcgggtgagatcgcatcttctccaacgacaccagatcaagatgatggggcttacccaccgatcctgatgaagttccccgacgatttggcggccatctccatcatgacagcgtctccatcccgtaggcctaggcggaagtcggcttcaacaccgatttcgcctagcttcagggaagtcggcgtcatcctccaaccactcggcacggtttcgacggatcagctggatgactactacagctcccccaccgtcgactcgcgccccaccgacatcgtggagtacgacgagtattgctctcgctacaacgacccggatctcgacgacttcgacgaaagcctagatgacaactacacccctctctacttcggcgtcttcatggccgataacgagacggaggagcaacgccaagcccgggagaccgaagcacgtcgcgagactgagcgtcgccgactggaggaggagcgtcaagcacaagaacaagaacggctacggcgtgagcagcaggagcgtgagcggatgtcacgaccggaattaacccaacgggcgttccttacgtgcgtgcattaatccttgtcccaggaggcaaggtacaccataagttgatacaattcagagtttaacaagcggaagcgtaaatagttaacttattacatgggcagcgaaggcccagcacacacagagacaaacgaaaaacagcggaagactagggcgacgaccacaggcgcttgacggcaggcacgagctagacaccgaagccttcatcttcaaggagctcctcttctgggcttgggaaaaattgagcaagactgagtacaaccaccgtactcaacaagacacacccacaaatgcagaataaatgcaagggagtacaagggaattataatgtaaaggggtagggttgcagtaaacagcatttaaagacatttagttgctcagggctattttgtaaacacgatcttagaactatacaatgttattaatcaaggccgtgaacccacacgaacctgccttaacccaaggcctatgatgattcagaccgaactggcaacccgaccctgggtcccagctcgtcctaagccaacccaggccaaccattccatattttagttgttaagcaagttttaagaattaaaacactaacttgggtacattgctcggcttgcccataaccgagggctcggctattcgaatagattatactctgatcagaggtgtacatctttacccacaagacacatcttcctcacgtgtaaccacgtgccacataccaccacggtatacagacggaagacgtgacatagtttccaacccatcctagccatagacaagagtaccgacccaatcctgcctacggccggaacccccgggacaggcaggcaagactgagcccctagcagcagggcaccaaccctctgccatgacatctcgactaccgggccgcagctcgtgtagccttcatttgccctggagaatgtccatcgacccccgacttcatccatctccaatccgtgtacttttgtttacgactagactgagccacaaactaagccttacccactagacatgtggaagtacggtagtgctttgcaacagaggcccgaagaccggtccttatatggccgaggtgctaccatcaaaaccatgcaccccgagcccagcctaaaaccatttttggggattttgaatagagggggcggggtgaagccaattccacaatactccaataattccacaatgtccaggtgatatgagaatttcccaagtctaaagttgtaaaaccacctaatgttacctaattaaattgcgaagcatctacctaaatttaaactagggataccacgagtagagtgtccactagttgaggttttgtttaatctagggtgaacaaggtaataataataacaataacaataataatatggtcataacaaaggtaaataggcatggctaaataaaacagtgataacgcgggaatttaaataaagcgataatgcaataatttaaatcaacataattttacaaactgggattcaatatgctcaaagatgatgtgacttgccttgctcgctttcccaaccgacggcttcgacttccacgaagagcggatcttccggagctgcagcgtctacacgaccaacggaaaaggaaaaggcttttacactactaaactccacataacagcagaaacaaagcacaaaaatgggttcttgacttcttaaggaaaaattagagacttgaacggtccaattccgagttcaaatggccaagatatggccatttgaagtttatatgctctttgaatggatatttgcgaatttcttcatttaaattttaattaaaaatcccatttattgcgtcagccgggggagagggcgcgcggaccgggtccacaggagtggggcccacgcgtcagcccctcggtccacggtggaccgggagcacgcggctggcggcggtcggcgccgtgggtcccacgcgtcagccgcacccgcgggcgcgggcggctgacggccgggcccacttggcagccgcgagggcgcgcccgaaggcggcctcgccggcacggccgacgggagggggacgcgcccgcgccccgatggtcaccggcggcgacctccggcgcggcggagcggcacccgagagagaggagggaagggggaagcgaatggagcagtcttcggctcaccccggtcgacggcgacgacgggaacggcggccgaagcggaggaaggcggcggcgcggttcgggacggcgagggcgacggtgctccggcggtcggcgagcgaaacggaggagcggacggggtcgacgacgacgcggcgaagccgacggaggtgacgccgagtggggaggaagtccggagcgacggcggcggtgaaccggagctcgtcggcgacggcggagagaagatgcgacggcgcgatcccgattccgacggtgagagcgagcggcgaacggcggaaacggaggaggagagcacggggaacgtttaaatagcaccgggagggggagagagcggccggagagagaggaaacgggcgcggagatctcgggtccattgaaagcgccggcgaggtttgcgggatgaatccggacgaatccgagggagagagagaggggaaaacgggggaaacgggagagggaatcgcggggaatgattcccccctcattatggcgcgcggggacggcgggatgcggcggaatccgcggcggcggcggcgctagggcacgggcgagcggcgggagcggcgggaggaaggcgatgacaggtgggccccacccgtcagcgagggcggcgggcgggcccgcctgtcagcggcgcgcgcgcgggggaggccgatgggccgcgggggagaggagagagagggagggagagaagattgggccgagccggcccaagagggaaggggggggaaaagaagacttcttttagggtttttctttttataaacctttttaactttgtttatttcttttcaattattatttgtactctgaaaattccactaaaatttatttacgcattttaggcttttaggaaatatacaaaaatcctccaagccttatttgacttttagatttgcacattttaattgttggaggctttcacatgaattttaatttttctcggcacaatttcgaggatatattttagagtcgatttgggacgtgacagcggactgcgaaggaggctgaggatcgacggcagcgaactttgcaagcagggcgccgagcgcgtgatctcatcggccaacaagatgttgaagggacaccggttttccgcacccctcaacagaatgcggttgccgcgatcaccctcctcgacaccctcctcaaggaaaacgagctcaatcaatctgatcacgtcgtcaacatcttgaaccagacgaagaccatgattgcagcttcggtcccagttaactccgaaagcgtccacacgccgactggcagccgagtcccccacttccgatctcatgactaccgtcatccaagcctcagcatcaccggcgcaggatccaatcgcaggagcaggggtcacgacgagcggtccgttcactcacctcccgaccatcatagggagcgccgagtggaacggcctcgctcaccacctcgtcgccgccccgtcgatcttcgcgacacaatcatacagcgccgagcagctcgaggccatcatcattcgccggaccgccacgacgacgaccttgacggagtagcagccttcaccgacgacctgcgtcgagtggattggccagccggcttcaagccgactggaatagagaagtacgacggtaccactaacctagaatcgtggcttaccgtctacggtctcgcaatccgcgcagcaggaggagacagcaaggccatggcgaactatttaccagtggctttagcggattccgcccgatcttggctccatggattgccccgtggtacaattggatcttgggctgaattacgcgaccacttcatcgccaacttccaaggcaccttcgagcgtcccggcacacaatacgacctctacaatgttattcagaagtccggagaatcccttcgagattacatccggtgattttctgaacaacgtaacaagatctccgacatcaccgacgacgttatcatcgccgcattcaccaaagggattcgccacgaagaattggtcggcaagttcgggcgtaagcctcccaggacagtcaagcttatgtttgaaaaagccaacgagtacgccaaagccgaagacgccgtcaccgcatcaaagcagtcgggtcccagttggaagccaaacaagggtacgctggctacgggaggaggtggaagtaacaaccataaggaccgcaagcgtaagcctgaggaacttgttgcaaccgccactcactcttcccgacagcgttcgcgcgtcaacacgttcgacaagatcatgaactcccaatgcccgcaccatcctaactccaaccacgtggccaaagattgtttcgtctacaagcagtttgcggagcaatacaccaagactacacggaagaactctgacgaagaacaaagcacgtcgaggaagaaggacgacggtgacaccccggcaggatttcaagaccaccgcaaggagctcaaccatatcttcggcggccccctggcttatgagtctaaaagaaaacaaaagttgactgaacgggagatcaatgctgttcagcccgacacgccccaatatcttcgatggtcagaaattgcaatcaagtttgaccgctcggatcatcctgaccgagtggtccacccggggcggtaccccctagtactagacccagtggtccgtaatgtcaagcttcgcagaaccctcatcgacggcggcagtgcactcaatatcctcttcgccaagaccctggatgatatgcagattcctcgctccgagctaaaaccaagcaatgcgccttttcacggagtaattccaggattatccgcaactccactcggccagatcaccctcccggtcacttttggcactcgggaaaacttccgcacagagaatatcagctttgaagtcgccgatttcgagacagcataccatgccatactcggacgcccggcgttagccaagtttatggccgtcccgcactacacttacatgatgatgaagatgcctggtccccgaggagtcctatgcctacggagcgacatcaaacaagccgtcacatgcgacaaggagagttgcgacatggcccaaacccgcgagatggcgtctgcccgagaggatatccgactggctgcagccacggcgagcgaaggagaagtgcccgctaccaagatttcaaaaagtggagaaagcgaagccaagactaaaaagattcccctagacccttctgattctactaaaactgctgtaataggcgcctagttagattgtaaataggaaagcgcgctcatcacctttcttcagaacaataaagatatctttgcatggaaaccatatgatatgcccggtattcctagagaggtgattgagcactccttacatgtcaaagaagatgccaagcctatcaaacaacgactccgccgattcgcacaagacaggaaagacgcgatcaaggaggaattaaccaagctgttagcggcaggcttcattaaagaagtccttcatcccgactggctggcaaacccggttctagtacggaagaaaacggggcaatggcgcatgtgtgttgattatactgacctcaacaaatcttgccctaaagatccttttgggttgcctcgcattgaccaggtagtcgactcgacagccggctgtgagcttctcagttttttggactgctactcggggtatcatcagatccgactgaaggaatccgactgcttgaagacttcattcatcacgccctttggagcatattgctacgtcaccatgccgttcggactaaaaaacgcaggagcaacttatcaacgtatgatccagagatgcttctcaacgcagatcggccgcaacgttgaagcctatgtggatgatgtagttgtcaagaccaagcaaaaggatgatttgatctcggatctagaagaaaccttcgcgagcatccgcgctttcaggatgaaattaaaccctgaaaagtgcaccttcggagtaccgtcagggaagctgcttggttttatggtgtctcataggggcatccaagccaacccggagaaagttactgctatcctcaacatgaaaccgccaagtacccagaaagatgttcagaagctgactggatgcatggcggcgctcagccgatttgtttcaagacttggcgagcgggggatgcccttctttaagctactgaagaaaacagatgatttccagtggggacccgaagcacagaaggccttcgaagatttcaagaaactcctcaccgagccaccagtcttagcttcaccacatccgcaggagccgttgttgctgtatgtatcagccacctcccaggttgtgagcacagtcttggtcgttgagcgcgaggaagaaggccatgtccagaaagtccagcgaccgatttactttgtcagcgaagtcctagccgactccaaaacgaggtaccctcaggttcagaagctgttatatggtattctaattactaccaggaagttatctcactacttccaaagtcactcggtaacggtggtcacatcatttccactcggtgatatactgcacaaccgcgaagcaaacggacggattgctaagtgggctttggagttgatgtctttagacatatcattcaagccccgaatttcaatcaagtcccaagcgttagctgattttgtcgctgaatggaccgagtgccaggaggatacccccgcggagaagatggagcactggaccatgcattttgacggatcaaaacgactttcgggcactggagcaggagtagttttaatttccccaactggagagagattaagctatgtgctttggatacatttttcggcgtcccacaatgtcgccgagtatgaggcgctccttcatggactgcggattgcaatttccctagggataaagcgtctgatagttcgaggcgattcacagctggtcgtcaaccaagttatgaaagagtggtcctgccttgacgacaacatgatggcatatcgacaagaggtacgcaaattggaagacaagttcgatggactcgagctcagtcacgttcttcgacacaataatgaagccgccgacagacttgccaactttggatccaagcgcgaggcggcaccctctgatgttttcgtcgaacacctttatacgccgacagtacctcacaaagatactactcaagttgcgggcactcatgatgtagctatggttgaagccgattggcgagagcccctcatacgatttttgacttctcaagaactcccccaagacaaagatgaagccgagcggatttcaaggcggagcaaactttacgttatgcatgaagctgagttgtacaagaaaagcccttcagggattctgcaacgctgcgtatctttagaggaagggagacaattgctgaaagacatacattctgggatatgcgggaaccatgctgccgcacgcaccattgtcggcaaagcttaccggcagggtttcttttggcctactgcagtgtccgacgccgacaaaattgtgcgcacgtgcgaaggttgccaatttttcactagacaaattcatctactagctcaagagttgcagaccatcccattgtcttggccgtttgcggtttgggggctcgacatggttggcccgtttaaaaaggcagtcggcggttacacgcacctctttgtggccattgacaaattctccaagtggattgaagctaaaccagttgtcacaatcacagcagataacgctcgcgacttcttcatcaacattgtgcatagatttggagtgcccaatcggatcattactgataatggcagacaattcactggcggagtttttaaagacttttgtgaagactttggaattaagatttgctatgcttcagtggcgcatcccatgagcaatggacaggtggagcgagccaatggcatgatacttcaggggattaaagcgcgtgtttttgaccggctaaaaccctatgccggcaaatgggtgaaccagctgccatcagtactttggtctttgcgaactacacccagtcgggccacaggccagtcaccttttttccttgtctatggggcagaagcaatgttgccaagtgaagttgaattcgagtctttacgctttcgaaatttccgtgaagaacgctatgaagaggaccgagtggatgatttgcaccgattggaagaagtccgcgaagcagctttgattcagtcggctcgatacttacaagggttgcgacgatatcataatcgcaatgttcgatcccgtgcctttctagtcggcgacctggttttgaggaaaattcaaactacacgagatcggcacaagttatctcctctatgggaagggccatttattatctctgaagtcacccgaccaggttcctatcgactcaagcgcgaagacggtactctcgtcgacaactcttggaacattgaacatcttcgtcgtttctacgcttaggcttatcattgtacttccctatcttgactgtcaacatcaagttttcttcttgaagttgtcagtcgggggctatcatcataataatggagtggattttttatcaattcaatttgcttgctcggtttatcattgccttgtttggttttttctacttagtctgcgaggactgaaagtttttaatagcttctttgggttttaggctcaacaaagcttgataaaagcttttaagaaatcaacgacttggccagaattatcaagcacagcataaatacaccagtattgtacaagttgagcctccatttgttacatttatactcagtcagaatcagtcttttcatcatcagaattgttactactcggctgaaggtcggtattgcggaattgttctacaacgtcatttgcaatcttgtcagccgcgttttgagcattgctgataagatcaagagcagcttcttcgcttgtcccgtctgcaaagccatcaatggcgtcaatttcaatccttgggtacaaggatttggtcatcgccaatgccatgctagctcccatacttccagctttcttgatattcttgaaatatacatccggagcaactctcagcttgtcgaagatttcggttgcgtcgagtgcactcggaccactgttattgaggaacatagcttggacaagtggtgtagcgacattagcaacttcatctcttgctccttcaagcctcttgatcttaccaaccaggacgtcaaattgagcttgagatttgattttgcggtctacaaaacacatttatggtaaaaatctactgcattaaaaagagagaagtttagattgtcagctggcggtaccttcaacctccttcaaggccgagtccctttgcgcagccagttctactttgtctcttttcaaggcttcaatttgtttctccatttgagccatcctggtggcttgcgctgtttgcaatccgaacggttgaggatatagttctgacagcgtaacttaatgggacagatctagagattaccttttgatgaaccactcagctcgaagtttgaatcctggagctgagcaattcggtcccttaattccttctctgtctttttggcaagctccttggcctcatgtagctggtccctaactgcttcaagagttcccaaatgaggaaccagcttttctaaagttgcggtcttggcctcattgcgaagatggattctctgcatgatggttcatggtttagttctgctaaagagaaaacaaagtcatcaaaggcagtcgcctggaagatttacattcacaatacgagtggcttctccaagcgccttcttcagctggcacacttcctcatcttctttttgacgatttatgacgatgccggcagcttgtgagttctcgtcccaccatttgagtaagataggagggcgagagtcgtcagccgcctttatgcggggaatttcttcttcgtcatcgcctggtggtcctgatgtatttccaagacgttaggcgaataagtaagagttgttcaaactggcatcacttgagaagatgagttacctgagggtgttcctagctgagcgtgaggtgatccttgttctttatttggagacccaatcatcgagtcgttaccagcctcaggtccttgagaagtcgtcgtctgcgcttcaacttcgggaatttcttgatctggacctacatccgactggtttccagtcgggggctcttgagttgtcgtagtttcagttgctgccgactggtttccagttggaggctggtcactcggattggctttatcacctgaagtatgggcgccagtcggctggctctcggcagtcggctcagaatccttggatgaacttggctctgtcacagccggatcaagatcttttccagttggatctatgtcggatggtttcctgcaaagtgtcctttcaatattcagtattatttctatgagagaagcatgtcaaagggaaatggtaccgagaggtttatacctggaagatgttctaatctttggcattgggcggccagccagttttttcctgggagtggtatgctttgggagttttttgggcaagtctttgttcccagatttgttgccgtcgtcgccttcgtcgtcgttaagcaccagctttctcttgcgagaacctgtctgtccagtcggattggaggtttgaggttgcggatctgatctgattgttggccctccacctccctgaacggtgtgttggcgaggagaccggcgctgagtgattggggggtcagacttcatcaatacatattcctgaataagatacctctacggttagttaactcaacatgaagacaagattatgttttggtcatgggttgaagatttcggatacatacctgcggaggcggattgaatgcgttatatggcacaactggcagctgatgtgagtagctgacgacaatagcgtttgagaagattttatacattctctccttcaagattttaaaatccagagagtctggttcttcacgattaggatcatgcttgccgtcaaactcgaatgccgtacgggatctttctttaattggtgccaatcggcatttgataaaatgccgagtaatctgctctccttgtaagccttgttctttgagttttagcatgcgatccatcaactccaaggcttgggcagctgtcacaccccgaagttttcctcccaagccaaaattgtaattttcaaatgaccccaagaaaatgcaggtgaaatcaggagaaaaccctaagaaagtaatgcaaataataatcggacttgacatgtggaatttttcttgagttctacatgtcaaaattcattaacaggatttttagtggaattttcagagctctagaaataatttcaaccaattaaaattgagcaagcaatattttattccagggaaaatcctttttcctttttctttttctttttcctctctttttcctcctttttgtcaaatgggccgtcggcccatttctccttttcctccccctcctctctgttgggccggccgcaggccgaggcccagccggcagccggccgcccgcctccctccctcccggggtcgccgacaggtgggacccacctgtcggacccgtctcccacctcccgcctctcccgctcgcgccgccgcgcccgcaaccgtcgccgcgcccacgtctccgccttcctcgggccacgtcgaccacgcccgcgcgtgcgccgcgtctcccgcgcccattcccctctctctcccgctcgcgcccgcgcccgagatggccgggattcgaaaaccgaatcccgcctctctctcctccccactcccccgcgtcggccggcgattcccgccgctcccggccacgtccggttccctctccccctatttaagcatcgccggcaccccctctcgctttttccccatttcgccgacctctcccgagctccccatcgctcccgcgccgtgcaaccccttgccgccgcctttttccgctctccgggcgccgctagccgccgctaggctcgccgccgtcttgcgccgtcgccgccgttagattcgcggggtcgagatctacctcgtccgccccttccccgttgaggttcgccgccggagacccatccccgtcgtgcgccggtgagtgacgccatggccgccgccttcggccggcgctctcgctctctcgcgctcttccctctccctctaatccctctccttttgttcgttaggaggttccggagctcgtcccgccgtcgccatcgtcctccgtcgcccgccgtcgtcgaccgttgtcggtgaggccctcctcctcgttttctctctcccgcaccgtttagccgccgcgtcgccgcctagctgcgtagccgccgctcctcctctagccgccgctctccgccgccggtcggtcgccgtcggccgtcgccttgcgccgctgccgcatgcgcaccgccgccgcgtgagcgctgcgccgccggcgccatggtcgccggttcggcttgcgccgtgcccgcgcgccccggccgcgagctcccaccgccgtccgatctacccttgggtagatcggggccgtcggttcggccgccacgtggagccgccgccccttccatctcccgtgtcgctgaccggtgggccccgcatgtcggcgccgagccgcctgtgctgacgtcagccctggaatatattgcgcaataattaattaaggactttttctttattagtaaaaacacagtgaatcttctaaaattcataactaattcatccgagctccgattaagtccattcaagtctcagtaaattcataaaaatgtgtagaatccattaaaaatggctttgttatctgtttcagtagtcttatagcatgttttgcttgtgtgctttgtttgtcgcgtagatttcggccgtttcgtcgatccgtggtttctcgaagacgttgctgtggttccatcattgcgagagcaaggcaagtcatgcaatacaattgatcatattgtacctaatttacaaatgtcccgcatttctattaaatattgcattgttttacaatatcatgtgggatgggtcctattactcagctatatgttgttttccttatgccattgataacttgggtattaaaatgactagatgttggtttaggagatgcttagccatgcttagttcaactagtgcataaaaggggaccacattaaagcatagacttgattattggcaatagctctggattagtgccaccgcaatggtgttggctaattaaaatacactacatggtgggctgtgggtgcatggttttgctagacgtgcccatggcgattaaggaccggttcgcgggatgccctggaagaatttatcgtacttaccacaagccagcgtgggcaacggctgggcttgtagtgtagcttttctctagccgacgtacccaggcgagggtgggcgtgatggagttgggtcggccggggtgtccggttgatcggctgccggattcaccgcggcacgaaaggggggctgcccgttgcctgctggggacgggggcgaaccctaaggtgtggtgcgatcggttagagggggttatacgaagggtcctgtcacggcctctttccggtatgtcgtggtggcatgccggcgcacggaaacgtgtcgtggggctgtgtcttgtgggtacagttgtacacctctgatcagagtaaaactattcgaatagccgcgcccgcggttatgggcggtcgaccagattcaccgtgattagtttcaccctagttagcttttggaactggttagttcaggtggtggtttgggcctgttgcaacgtggtgtaacgttggacagtgattggttaatatggattaattactacaactgttttactgctttcaactactgctttgaaatgccggctttatgcaaaagaacctttagcctcccttggatatatcttgcatcatacctcctcttccggtgtgacttgctgagtacagtgggtagtactcagtcttgctctcttttcccccacaccagagttgaagtccttcccagttgaagatgtctcgaagaggttggtttcgtcgctgccgtcaaggattgcctgtggaatggagtcgcccgctgcaggagtcaagtcttcaggcttagctcgcttttatctttttccgctgcatttgtaatcttttatatttttgtaagacgtggatctgtatgtcaacaattgtcgtttgtgtaccctggctggtcctggacaggggtttaatgcacattcagcttagaaattctggttcgtgaatttctgggcgtgacaagttggtatcagagccgaccttgaccgtaggacaagccaaatggaaaaacctaagagccctctgaatccttttcattgcatatgttctttgcaattggatttgttccgggaaaattgggatctgttcttgtggttcaagggaaaaatcttggtcgctcgtttaagtggggtttttcaaaacaagtcagtctagggttttagtaaaattattgggatttattcgtcagacagttggggtttgatgggtgaaatgcattaggtcctagctctataacatgggttgcaaggtgtttatgcttcgtttgttattattaatatgtatctaatttctcattattttgtcattatgtgagtctgtcttatttattcgctctcatgcaaaatgatctatgcataaaatttcgcttttattcgtttcccttatttgagtcttttattgctttatttaaatttggatttgagcatgcattgattcctatccctctgtactctttagatgtcagacctattctccgatcgcaagcgccgctccaagcttcagagtcgccacccttagctttatcgtcttcttagtctgtttgcgtgctagtttttgtgtttaggtttgttgcttgtgggttagtcggcagtcgatatcatgtgtgagtggtatgacagcctttattaggagttgtgtgcctctttttcagtgttttaatcaagattaagatgattgcacttaatcttataagaaagattagtttccgagccgtctgttttcttcctttctcttatttctacctatcctcctccagatggtgaagacaagggacgatccccgtgactccaacgacgccagtggcagcgaagagcagaccgatggagctcatgtcagtggtgcatctggcagcagatcatctccaccgcccgaaaacccaacagtcactcaaatgatgacaatgatgatgcaacagatgcagcaacattaccatcagatgttgcagcaggcgcaacagaaccagcagtttggtcctccaccatcacacgtgtccaaactgttagactttcttcgtatccagccacccactttctcaagcaccaccaacccaatggaggccaacgactggcttcgtgctattgagaagaagctgatccttctgcaatgtaacgaccgagagaaggttgcttttgctacacatcagttgcaaggtcctgcttctgcttggtgggatcactacgtggtgacccgtccagatgcaacggaggttacttgggcagagttttgtcaaagcttcaggaaggcacagattcccgaagggattatggcacaacagaagagagagttccgtgcattgcaacaaggaaccagaacggttacagagtacctgcacgagttcaaccgcctcgcgcgctacgctcccgaggacgtgcgcaccgatgctgagaagcaggagaagtttttgtttgggctcgatgatgaattgaccaaccaactaatctccggagtctatgaggactttgagaagcttgtggacaaggctatccgccaggaagagcaacgcaacaaaatagaccgaaaaagaaagacagctcagatcagctttcctcaggggaacaatcagaagcctcgtttcatgacgggacagctaggtgggccttccaccctgatcgtctgtcagcaccgtccctatcgcccgagtaacttcaacaacgattacaatggtggcagtcacaacaacagtaagcagcacaaccacaactcgactccacccccactaatggcaccagctcagtcagatccgccagctgtgtcagttcagttagaacaacccaagaagggggctgtaggaaagccaggaccctgcttcaactgtggcaagcacggccactttgctggcaagtgtccgaagctgaatcgcactggacccaggttcatccaggcccgcgccaatcatgtgtctgcagaggaagcacaggcagcaccagaggtcgtgttgggcacgtttccagtgaactcatatccagcaacagttctctttgattcaggtgcctcgcattctttcatttccaaaagatttgctgggacacatggattatcggtagtggaacttaaaataccgatgcaggttcatacccctggaaatgatatgaggacagcacactactgcccctcggtgactatagagatcaaaagatcaccgtttctatccaacctcatccttctcgaatctaaagacctggatgtcattcttggaatggattggttgaccagaaacaagggagtgattgactgcgcaagccgcaccatcaccctaaccaacgacaaaggggagaagatcaccttccgttccccagcgtcgcagaagtccgtagcgagtctgaatcaggctgctattgagggtcagacagaaacagtggagaaaagtcccaggaagttggaggatattcctatagtacaagagtatcctgaggtgttcccagaagacctcactacaatgccaccgaagagagaaatcgagttccggatcgatttggcacccgggactgctccaatttacaagaggccgtacagaatggcagctaatgagctagcagaggtcaagaagcaggttgacgaacagctgcagaaagggtacatccgaccgagtacttcaccttggggtgctccggttatctttgtggagaagaaagacaagaccaagaggatgtgcgtggattatcacgcccttaatgaggtcacaatcaagaacaaatatccgttgccaagaattgatgacctgtttgatcagctaaaaggagctaaggtgttttccaagatagacctacgatcaggctatcatcagttgagaattcgggaagaggatattcccaagacagccttcaccactcggtatgggttgtttgagtgcacggttatgtcctttggactcaccaatgcaccggctttcttcatgaacttgatgaacaaagtgtttatggagtttcttgacaagtttgtcgtggtattcattgacgacatacttatttattcaaaatcagaagaggaacatgagcagcatctccgcctggtactcgagattttgaaggagcaccagctatatgccaagtttagcaagtgtgacttctggttatcggaggtcaaatttctgggtcacatcatttctgctcaaggcgtggcagtggatccatcaaatgtggagtcagttacaaagtggaccccaccaaagacagtttctcagatccggagttttcttggacttgcgggctattaccgtcggttcatcgaaaatttctctaagattgccaggcccatgacacagttgctaaagaaagatgaaaaattcaaatggtcagctgagtgcaaccaaagttttgaagaactcaagaagaagttagtctccgcaccagttctaattctgccagatcagacgaaagacttccaggtctactgtgatgcatctcgccaaggattgggatgtgtgttgatgcaagaaggcagagtggttgcatatgcttcgcgacagttgcgtccacatgaggccaattatcccactcatgaccttgagttggcagcagtggttcatgctctgaaaatctggcggcactatcttattggcaaccgctgtgaagtttacactgatcataagagcctgaagtacatcttcacccagcccgacttaaatctccggcaacgaagatggctggagttgattaaagattatgacatggggatacactatcatccaggcaaagcaaatgtggtagcagatgctctgagcagaaagagctattgcaatgcagtatgtaccgaaggcatgtgtgacaaattgcagcaagatcttgagcacctaaatttgggcatcgtagaacacggatacgtagctgccctagaggcccggcctacgctcgtggatcaagtcagagcagctcaggtaaatgatcctgaaatagctgagctaaaaaaaaatatgagggtcggaaaagcccgagatttccatgaggatgagcatggcacaatctggttgggagaaagattgtgtgtgcctgacgacaaagaactgaaggatctcatactcacagaagctcatcaaactcagtattcaattcatcccggcagtactaaaatgtaccaggacctcaaagagaaattctggtgggtcagcatgagaagagagatagccgaattcgtcgcactctgcgatgtttgtcagcgagtcaaagcagaacatcagaggcccgcaggactgctacaaccccttcagatcccggaatggaaatgggaagaaatcggaatggatttcataacaggtttgcccagaacatcgtcggggcacgattcaatctgggtggtcgtggatcgactcaccaaagttgctcattttattccagtacacactacctatactgggaaaaggttggcagagctttatctttcaagaatcatgtgtttgcatggggtacctaagaagattgtatctgatcgaggaagtcaattcacttcaaagttttggcagaaactgcaagaagaattggggactcgtttgaatttcagcacggcttatcatccacaaacagatggtcagaccgagcgagtaaatcaaatcttggaagatatgttgagagcttgtgcacttgactttggtggagcctgggataaaagtctaccgtatgcggaattctcttacaacaacagctaacagtccagtttgcaaatggcaccgtttgaagcattgtacggacgaaagtgccgcacaccacttttctgggatcaaacaggtgagcgccaactgtttgggacagaagtgttaaccgaagcagaggagaaagtcaggaccgtcaggaaaagactgcgaatcgcccagtctcggcaaaagagttatgctgataaccgccgaagagagcttactttcgaagcaggggattatgtgtatcttcgtgtcactccgctccggggagtacatcgttttcagacgaaaggcaagttggcaccacgcttcgtgggaccatacaaaatcttggaacgaaggggagaagttgcttatcagctagaacttccatccaacatgatcggcatccatgacgtgttccacgtgtcccaattaaagaagtgtttaagggtacctgaagaacaggctgattcggaacacattaatatccaggaggacctaacttatgtggagaagccggttcgcatacttgataccagcgaaaggagaaccagaaacaaggttacccggttttgccgagttcagtggagtcatcattcggaagaggaagcaacctgggaaagggaagatgagttgaaagccgcccatccgcatctcttcaccagctcctccgaatctcggggccgagattccgtttaaggggggtaggtttgtcacaccccgaagttttcctcccaagccaaaattgtaattttcaaatgaccccaagaaaatgcaggtgaaatcaggagaaaaccttaagaaagtaatgcaaataacaatcggacttgacatgtggaatttttcttgagttctacatgtcaaaattcattaacaggatttttagtggaattttcagagctctagaaataatttcaaccaattaaaattgagcaagcaatattttattccagggaaaatcctttttcctttttctttttctttttcctctctttttcctcctttttgtcaaatgggccgtcggcccatttctccttttcctccccctcctctctgttgggccggccgcaggccgaggcccagccggcagccggccgcccgcctccctccctcccggggtcgccgacaggtgggacccacctgtcggacccgtctcccacctcccgcctttcccgct

SEQ ID NO: 23754 - DNA, 659 bp, Oryza sativa
ctggagttgattaaagattatgacatggggatacactatcatccaggcaaagcaaatgggggttaaggcccccaaaagaaaaattggcctttttcccttggaaagcccaagaaaaaaagaagcttatttgcaatggcagtatgtaccgaaggcatgtgtgacaaattgcagcaagatcttgagcacctaaatttgggcatcgtagaacacggatacgtagctgccctagaggcccggcctacgctcgtggatcaagtcagagcagctcaggtaaatgatcctgaaatagctgagctaaaaaaaaatatgagggtcggaaaagcccgagatttccatgaggatgagcatggcacaatctggttgggagaaagattgtgtgtgcctgacgacaaagaactgaaggatctcatactcacagaagctcatcaaactcagtattcaattcatcccggcagtactaaaatgtaccaggacctcaaagagaaattctggtgggtcagcatgagaagagagatagccgaattcgtcgcactctgcgatgtttgtcagcgagtcaaagcagaacatcagaggcccgcaggactgctacaaccccttcagatccggaatggaaatgggaagaaatcggaatggatttcataacaggtttgcccagaaca

SEQ ID NO: 23755 - DNA, 2046 bp, Oryza sativa
cactcccgtggacccggtccgcgcgcccccttccctcatctgacgcaataaacttttttttaaattaaaatttaaatgaggaaattcgcaaatattcatttaaagagcatagaaacttcaaatggccataacttggccatttgaactcggaattggaccagtcaagtctctaagttttccttaagaagtcaagaacccatttttgtgctttgttcctgcttgttatatggagtttattagagtaaaagccttttcttttccgttggtcgtgtagacgctgcagcttcggaagatccgcttttcgtggaagttgaagccgacgtttgggaaagcgagcaaggcaagtcgcatcatccttgaacatattgaatcgcagtttataaaactatgttgatttaaattattgcattatcgctttatttaaattcccgcgttatcactgttttatctagccatgcctatttacctttgttatgaccttattattgttattgttattatttccttgttcaccctagagtaaacaaaaccccaactagtggatactctactcatggtaccactagtatgattttaggtagacgcttcgccgcttaattaggcaacattaggtggttttacaactctagactttgggatactcttatcacctggacactatggaatggatggactattgtggaattggattcacacctccccctctattcaaaatcctcaaaatggttttaggctgggctcggggtgcatggtttagatagtagcacctcggccatataaggaccggtcttcgggcctctgttgcaaagcactaccgtacttccacatgtctagtgggtaaggcttagtttgtggctcagtctggttataaacaaaagtacacggatggagatggacgaagtcgggggtcgatggacatctctaggacaaatgaaagctacacgagctgtggctcggtagtcgagatgtcatggcacagggccggtgtcctgctgctgggggctcagtcctgcctacctgtcccggaggttccggccgtaggtggggttgggtctgtactcttgtctatggccaggatgggttggaaactatgtcacgtcttccgtccgtataccatggtggtatgtggcacgtggttacacgtgaggaagatatgtcttgtgggtaaagatgtacacctctgatcagagtataatctattcaaatagccgcgccctcggttatgggcaagccgagcaatgtatccaagtttgtgttttaattcttaaaacctgcttaacaacaaaaatgtggaatggttggcctgggttggcttgggacgagctgggacccagggtcgggtggccagttcggtctgaatcatcgtaggccttgggttaaggcaggttcgtgtgggttcacggccttgattaataacattgtagcgttctaggatcgcgtttacaaagtagctttgagcaactaaatgtctttaaatgctgtttactacaaccctaaccctttatattataattcccttgtactcccttgcatttattctgcatttgtgggtgtgtcttgttgagtacggtggttgtactcagtcttgcttaattttcccaagcccagatgaggagttcctggaagatgaaggctttggtgtctagctcgtgcttgccgtcaagcgcctgtggtcgtttgtcgcgaccgggaaaattgccttttcccgaacgctagtgtattaatccccgtcccaggaaaagccggggtacaccacacaaacatgatataaaagacacatctttattatatcgataatatttacattattacaaaggcgcttcaggcctgacaatcaaaaataaacagcagcggactagcgggcctacggctccatcttcacaggcgctcaactggggtataagccaggactccacctaagacatcttctccgaagcttctcttactgaagaggggaaggattgagcaagaatgagtacaaccacagtactcagcaagccacaccggcggatgcataattaatgcaagggaggtagggctgcagga

SEQ ID NO: 23756 - DNA, 9022 bp, Oryza sativa
gtgcgccgcctcccgtcggccgtgccggcgaggccgccttcgggcgcgccccgtggctgccatgtggggcccggccgtcagccgcccgcgccctcgggtgcggctgacgcgtgggacccacggcgccggccggcgcaagccgcgtgcacccggtccaccgtggatcgtgaggctgccgcgtgggccccactcccgtggacccggtccgcgcgcccctcccctcggctgacgcaataaatccgattttaaattaaaatttaaatgaagaaattcgcaaatatccatttaaagagcatataaacttcaaatggccatatcttggccatttgaactcggaattggaccgttcaagtctctaatttttccttaagaagtcaagaacccatttttgtgctttgttcctgcttgttatatggagtttattagagtaaaagccttttcttttccgttggtcgtgtagacgctgcagcttcggaagatccgctcttcgtggaagttgaagccgacgtttgggaaagcgagcaaggcaagtcacatcatctttgagcatattgaatcccagtttataaaattatgttgctttaaattgttgcattatcgctttatttaaattcccgcgttatcactgttttatctagccatgcctatttacttttgttatgaccttattattgttattgttattattaccttgttcaccctagattaaacaaaaccccaactagtggacactcttctcatggtaccactagtatgattttaggtagatgcttcgctatttaattaggtaacattaggtggtttttcaactctagactttgggaatattcatatcacctggacactatggaatggtttggttattgtggaattggcttcacaccgctccttctattcaaaatccccaaaatggttttaggctgggctcggggtgcatggttttgatagtagcacctcggccatataaggaccggtcttcgggcctctgttgcaaagcactaccgtacttccacatgtctagtgggtaaggcttagtttgtggctcaatctggttataaacaaaagtacacggatggagatggaagaagtcgggggtcgatggacatctctaggacaaatgaaggctacacgagctgcggcccggtagtcgagatgtcatggcacagggccggtgtcctgctgctaggggctcagtcctgcctgcctgtcccgggggttccggccgtaggtgggattgggtcggtactcttgtctatggctaggatgggttggaaactatgtcacgtcttccgtccgtataccgtggtggtatgtggcacgtggttacacgtgaggaagatgtgtcttgtgggtaaagatgtacacctctgatcagagtataatctattcgaatagccgcgccctcggttatgggcaagccgagcaatgtacccaagttagtgttttaattcttaaaacctgcttaataactaaaatgtggaatggttggcctgggttggcttgggacgagctgggacccagggtcgggttgccagttcggtctgaatcatcgtaggccttgggttaaggcaggttcgtgtgggttcacggccttgattaataatattgtatagttctagaatcgtgttcacaaaatagctctgagcaactaaatgtcttttaaatgctgtttactgcaaccctaaccctttatagtataactcccttgtactcccttgcatttattattcacttgtgggtgtgtcttgttgagtacggtggttgtactcagtcttgctcaatttttcccaaacccagaagaggagcccctagaagatgaaggctttggtgtctagctcgtgcctgccgtcaagcgcctgtggtcgtcgccctagtcttccgctgtttctcgtttgtctttgtgtgtgctgggccttcgctgcccatgtaataaattaactatttacgcttccgcttgttaaactctgaattgtatcaacttttggtgtaccttgcctcctgggataaggaataatacacgtacgtaaggaacgcccgttgggttatttccggtcgtgacataaggagcgcccgttgggttaattccggtcgtgacaagttggtatcagagccccccttgaccctaggacgagccgtagatcccaagccttagcaatattttcaaaataaaaatcctttcttatttgtgaaaatcctttagtctctctctgtcctgctgcttcatttatcgtcaaaatctgacctttaaaatgttgcttttctcttttgtttttgtttgtagatggccggcagcatcaaccgtcgtggtctggacctgactggcttcgttttggatctgcggggcatgtgcgttgtcctggggtatccgcatggagtggactaccagggcaagcagctcccggagcaggagggtgacgatgcagagccccacgctgcttgggaggttaccgcagtgatcctcactagctcacccgagaggacttcgttggcagtcaccgcgggtggagattctttctccgccgcttgccagaacgacgctctcctcaccatcgacactcttcaccagcgctacccggacgagttgcagcactcgccctaccgctacaaccctcgccgcggaggagcccgcgactacgccaccttccgggatgctagctcggaggatgacactaccatcatgcacctggcgcgcatggtggaggcgtacgacgcggcccgtatcgacttccatcagatggtgcgtcgcgggttggtcaagaacaacatgaagatcctggagctgcgtcaggagaatctgcagctgaagaaggacctagacgcgctggaggcgcagctgtgtcaactcaaggtcgcccagggagaggtctgccgtcccaagtgtcgccgcgtctgctgcagccagaagatcaccgcccgcaagagcacctccaggcctgagcttgttcgtcagtccctggcatggacctgcttcgtcgagacccctcgtgccgcacctgcgcccgtggttccccaggagggggaagcctccggcgtaggtagcacggaggatgcctgttgctcaccttccgccctggcccgtcgcagcggtagacgagcagttagtaggcctgcgcgtgtgttctttctcgtttatcttcttgttgagtcgtgtggggcatggttacgccggtgtgtggtgtaactatgtcggagcctgtcttattttatttgcctaagcaacttgaactttaatgaaccaatttaatagcagtgataaatttaagaataatggtagtcgtgggtggttagttttaattgttagctctctctctgtttgctggttccgtgtggggttttcagatggtgacgaccaggagaaatgttaacaccggtgaaggcaaccaacccgagggcagcaaccccaacccccaaggcaacccacccccaccaccaccaccagacaccaacgccattctcacccagatcctcgcccaacaagccaacatgatgactgctttcctccaccacctccaaaatccgccacaacagaatgctccaccaccccctccccaacactccaaactcgccgaattcctccgcatccgcccacccaccttctctagctccaacaatcccgtagatgcgttggattggttgcatgccgtggggaaaaagctagacacggtgcagtgcagcgatgaggagaaagtcatcttcgccgcccaccaactgcaggggcccgcatctctatggtgggaccatttccaggctacgcagccagaggggcagcctattacttgggcccgcttcaccgccgctttccggagaacccatgtgcctgccggagtcatggcccttaagaaaagggaattccgagagttgaagcaaggcaaccgctccgtgatggaatatttgcttgagtttaacaacctggcccggtacgccccggaggaggtacgggaagatgaggagaagcaagagaagttcttggcaggaatggaccctgagctgtccgtgcgtctggtctccggggactatccggatttccaacgtctggtggacaagagcatccgcttggaagccaagcacaaggaactggagtcgcacaagcgtcgcttggcgaatttccgcaaccaacagggggctaaccaaagggtccgctacaccaatccctatccagggggatcctcctcgcaacagcaacagcagcagcaacctcgctccgcgccccgacctcaattcgtggtgcgcgtcccacagccgcagcaacagcagagttagcaagggactcgtgcgccccgtccccctacgccagccgtgcagcctggccaaggccgtagggacgttcaatgtcagcagcgtctgtgcttcaactgcttcgagcctgggcactttgcggataaatgcccaaagccgaggcgccagcaaggccaagcgcctccccgctccagcaacggtggtaaggatgtcattcggggtcgtgtgaaccacgtgacggccgaggacatgctgacaactccagacgtcattgttggtatgttcctcattcattccatccctgctaccattttgttcgactctggagcttcccactcatttatatctgtgccattcgtggggagaaatcagttgggggtagaaaggcttaggaaccctctgctcatcaccacccctggaggggttatgacagcgaagtattatagccctgtcgttcctatagaaattcagggaattccttttccctcggatctgatccttctagacaccaggaacttggatgtgatccttgggatgaattggttggctcaattccaaggagtagtggattgtgcaagacgcactgtcactctgtaccgagggccggaacaaccggttgttttctttgcacccccaacctctgtcggtagttcagaacttcatcagataggactgtcggaaatccccatcgtcagagagttcggagacgtgtttccggaagaactacccggtatgccgcccaagcgagagattgagttccggatagatcttgctccaggaaccactccccagtacaagcgaccctaccgtatggcatcaaatgaactggccgaagtcaagaaacagttggaagagttgaaagaaaaggggtatatacggccgagtacttccccctggggtgctcctgtgatttttgtggagaagaaagacaagacgaagaggatgtgcgttgactacagagctctcaatgaagttaccatcaaaaacaagtaccctcttccccggatcgatgatctgttcgatcagcttaaaggtgccactgtattctccaagattgatcttcgctccggatatcaccaattgcgtattcgtgaagaagatatcccgaagaccgcgttcaccacgcgttatggactgtatgaattcacggtgatgtcgttcggtctgaccaatgctcctgccttcttcatgaacttaatgaacaaagtgttcatggaatacttggataagttcgttgtggtcttcattgacgacatcctggtgtactcacaatcagaggaagaccatcagaagcatctccgtctagcgttgggaaaactgcgggaacatcaattgtatgccaagcttagcaagtgtgagttctggttgtccgaagtcaagttcttagggcacgtgatatctgccaaaggagtcgctgtggaccccgaaacagtgaccgccgtcactgattggaagcaacccaagacagtcactcaaattcgcagtttcttgggtttggcaggatactaccggaggttcatcgagaacttctccaaaatcgcttgacccatgacacagttgttgaagaaagaagagaaatttgtgtggagcccgcaatgcgagaaagcgttccaaactctcaaacaaaagctggtttcctcgccggtgttaatcttaccgaatactcgcaaggatttcatggtgtattgtgacgcttcgcgccaaggattggggtgcgtgctcatgcaggaaggtcatgtggtagcctatgcctcacgccagctacggccccatgaaggcaattaccctacccatgatttggagttagccgctgtggttcatgctctaaaaatctggcggcactatctcattgggaatcgcagtgaaatatatactgatcataagagtttgaaatacatcttcactcagtcggatctgaatcttcggcagagaagatggttagaactcatcaaggattacgatgtgggaattcactatcatcctagtaaggccaacgtggtcgccgatgctctaagtcaaaaaagtcattgcaacactcttggcgtccgtggcattccaccggaacttaatcaacagatggaagccctgaatctaagcatagttggtcgtggattcttggctacgttggaagccaagcctaccttgctcgatcaaatccgcgaggctcagaagaatgatccggatatgcatgggctcctcaagaacatgaaacagggtaaagccgctagtttcacagaggatgaacacggaaccctatggaacggaaatcgggtctgcgttccggatgacagggaactaaaacagttgatacttcaggaagctcacgaaagtccctattccatccaccctggcagcatgaagatgtacttggacttgaaagagaaatattggtgggttagtatgaaacgggaaattgcagagttcgtggccctttgtgatgtgtgccagcgcgtcaaagccgagcaccaacgaccggccggactcctccaacctatacaagtgccagaatggaaatgggatgaaattgggatggattttatcaccagacttccaaaaacccaaggtggatatgattctatatgggtagtcgtggatcgactaaccaaggtagcccggttcattccagtaaagaccacctacggggggaacaaactagctgaactctacttcgctaggatcgtaagtctgcatggcgtccccaaaaaaattgtatctgatcggggaagccagttcacctctcatttctggaagaaactccaagaagagttgggaacccgattaaatttcagcaccgcatatcacccgcagacagatgggcagacctagcgtctaaatcagatcctagaagatatgcttcgcgcatgtgtcctagatttcgggaagacctgggataagagtctcccttacgccgagttctcctacaataacagctaccaagccagcatacaaatggcaccctatgaagcgttgtatggacacaaatgccggacaccgctattgtgggaccaagttggggaaagccaagtgttcaggaccgatatcttgagagaagctgaagcgaaggtcagaaccattcaggataatctaaaggtggcacagtcccagcagaagagttatgcagataaccgacgccgtaatctggaattcgcagtggacgattttgtgtaccttcgggtcacgccattgcgaggtgtacacaggtttcagacgaatgggaagctcgcacctcggtttgtgggtcctttccgtatcattgctcgatgcggagaagttgcttaccagttggagctgcccgcctccttgggcaacgtgcatgatgtgtttcatgtgtcgcaactcaagaaatgtcttcgagtgccgtccgagcaggccgacccagagcaaattgaagttcgcgaagacttgacctacatggagaggccagtgaaaatcctggacaccatggagcgcaggaccaggaaccgggtaatccgtttttgcaaggtccaatggagcaaccacgctgaggaagaagctacttgggagcgtgaagacgagctgaaggcagcccatcccgatcttttcgccagttcttccgaatctcggggtcgagattccgtttatggggggtaggtttgtcacgtcccaaaacgactctaaaatacatcctcaaagagatgcctagaataattaaaaaccgtgtgaaagcctccaacaattaaaatgtgcaaagttaaaagtcaattaaggcttagaggatttttgtatatttcctaaaagcctaaaatgcgtaaataaattttagtggaattttcacagcacaaataataattattaagaaataaacaaagttaaaatgattttataaaaagaaaaactctaaaaagtcccctttccctccctctccttcttgggccggctcggcccatctccctccccctccctctcctctccccacggcccatccggcctctccccgcgcgcgcgccgctgacgggcgggcccgcccgccaccctcgctgacgggtggggcccacccgtcatccccttcctcccgccgcctcccgccgtccccgtgcgcaataaagtagggggaattattccccgtgattccctctccctttccccccatttttccctccctctctccctcagattcgtttggaaaccgttcccctaacctcgccggcgccattaatggcggccgggtctcccgcgcccatttccccctcctccggccgccctctctcactcccaaccctatataaaccctccccgagctccccaccaccgtttccgccactagccgcctctctccccgccggaatcgagctcgcgccgtcactatctctctccaccgtcgccgccgagctccggtccgccgccgttgtcgccccggaccacctcccacctcggcgccgcctccttcggcttcgccgcatcctcgccgacctcgtccacctctccgtttcggtcgccgaccgccggagcaccgtcgaccccatccaccctagcttcgccgccgccttcctctgctccggtcgccgttttcgtcatcgccgtcgacccggggtgagccgtggaccgccgcttcgtttccccctttccctcccctttctcgggcgccgctccgccgtgcctatggccaccgccggcgaccataggggcgcgggcgtgccgcctcccgccggccgcaccggcgtggccgccttcgggcgcgcagagtggccgccgcgtgggggccggctgtcagccgcccgcgccctcgggtgcggctgatgcgtgggacccacggcaccggccggtg

SEQ ID NO: 23757 - DNA, 1218 bp, Oryza sativa
aatccttatagtacccgaggtacgactagcaaaacccaaccacgcacctcgagcccagcctaaaaccaatttggggattttgaatagaaggagcggtgtgaagccaattccacaataaccaaaccattccatagtgtccaggtgatatgaaaattcccaaagtctaaagttataaaattacctaatgttgcctaattaaattgcgaagcatctacctaaaattaaactagtggtgccatgagtagagtgtccactagttggggttttgtttactctagggtgaacaaggaaataataacaatagcaataataataaggtcataacaaaggtaaataggcatggctaaataaaacagtgataacgcgggaatttaaataaagcgataatgcattaatttaaattaaaaataattttgtaaactgggattcaatatgctcaaggatgatgtgacttgccttgctcgctttcccaaatgccggcttcaacttccacgaagagcggatcttccgaagctgcagcgtctacacgaccgacggaaaagaaaaggcttttacgctaataaactccacataacagcagaaacaaagcacaaaaatgggttcttgacttcttaaggaaaaattagagacttgaacggtccaattccgagttcaaatggccaagttatggccatttgaagtttatatgctctttaaatgaatatttgcgaatttcttcatttaaattttaatttaaaatggatttattgtgtcagccgaggggggggcgcgcggaccgggtccacgggagtggggcccacgcggcagcctcacggtccacggtggaccgggtgcacccggctcacaccggccggcgccgtgggtcccatgcgtcagccgcacccgagggcgcgggcggctgacggccgggccccacatggcagccgcggggcgcacccgaaggcggccacgccggcacagccgacgggaggtggcgcactcgttccccgatggtcgccgccggcgaccaccggcgcggcggagaggcgcccgagagaggggagggaagggggaaacgaatcggcggtccacggctcaccccgggtcgacggcgacgacgggaacggcgaccggagcggagagaggcggcggcgcggctcgggtcgacggggacggcggcgttccggtggtcggcgaccgaaacggagaggtggacgaggtcggcgaggttgcggcgaa

SEQ ID NO: 23758 - DNA, 673 bp, Oryza sativa
acctatcctcctccaaatggtgaaaacaagggacgatccccgtgactccaacgacccagtggcagcgaagagcagaccgatggagctcatgtcagtggtgcatctggcagcagatcatctccaccgcccgaaaacccaacagtcactcaaatgatgacaatgatgatgcaacagatgcagcaacattaccatcagatgttgcagcaggcgcaacagaaccagcagtttggtcctccaccatcacacgtgtccaaactgttagactttcttcgtatccagccacccactttctcaagcaccaccaacccaatggaggccaacgactggcttcgtgctattgagaagaagctgatccttctgcaatgtaacgaccgagagaaggttgcttttgctacacatcagttgcaaggtcctgcttctgcttggtgggatcactacgtggtgacccgtccagatgcaacggaggttacttgggcagagttttgtcaaagcttcaggaaggcacagattcccgaagggattatggcacaacagaaaagagaagaaggttttcccccggtgcgcccaattttggggcccaaaaaaaccccaaaaaggggggggaaaacccccgacggttacagagtacctgcacgagttcaaccgcctcgcgcgctacgctcccgaggacgtg

SEQ ID NO: 23759 - DNA, 513 bp, Oryza sativa
acgttgcattggcttacaaggattgcatataagttggatttagccgatggtaacaaagatttcaccgtttaatctaatatgtggattttatgacatcggacctccagccgatgtattctttaaccttcagatcaatacttgttctatcatatcattgttagccgattggtttctacttgattatattgctattttattacatcagtatcagccgagcgattgcctctatattgttatttacatcatgtcagaatctacattggatgtatagccgatagctcaaaaccctatcgatatcggctggactacttcatcggcttgtcagtcgatcggctcgatcagctcactggtcttgtcagttgtaggatcaaactgactggcacgcccgcacctcaccaagatttggacctgcactggagctaagcagatctcccaggccagtgtgtatttttcgcatcaacagctcgttaacacgaaatcaatccacggcgatctctgtgtttattgccgtcc

SEQ ID NO: 23760 - DNA, 5277 bp, Oryza sativa
ggtttcagatttaactttacgaaacattaatgcaggcatatagcatagcatcaacaattagtttgaagaaagtgcttggaggtttcacattggcgtactgtcattgccaatagtggagtaaatattttgtgacagttgaaatttgaagtacgctgtgttagtagtataagtaatatttagatattagagcttttagatggaacatatgttgggaacttccggtgggctacttttgatgttaattgatgctctatgttctgtcaagtcattgacacatgatattgtaatgtttcttatggtgttatacacaccggtctattataaagtagtaatcctattatgacttatgcactactatgaatttgtaatctttctagtatatacctgtcgagaagctattatattctattatgaatttgtaatcctactttggcttgttaagaagcttttattgggagataagttcagattgctgaaggaaacagtcttaacgagcttctacgaatcgagctcgagtcgagccgagccttgatcgagctcgaactgagcctaccttcaagctcgaaggtaatgctgggctcggctcgagcctgtaccgagctcgagcttaggtaggtaagctcgctcgagctcggctcgttgacagccctaataaggaccattttacatataaagagcaactatatttgtctactatcaaactctctatgattgttgaagaaaaacaaataatgtcacatatgctccaaatctcattgaattcctttcacaccctagaattttgttccatccttaatgatgactatctctctcgtgacctgatcttctggtaaggggataactctcgttttgatcgagtgcgatgtttgcgatgtggttatcaactagaataagtccagaaccatgtgcaatcgctacaccacaaacgttgtcataccaaccgtgacgcacagctaatgatccctgcaatgcaaatgagagaacactgtaaggacaaaataagatgcaatctaaatattgtgaataggtaattaagcgcaaaggagtagtaacgattgaagtggtagatctaatcgacccgacaaatcaacacaccaattattgggagctctaaatttgtagtcgttggctaatcgagcgaggcctagagaaaaggtgaatggcgcttggcaaaattcaactaaataaaaatcaattgttctagagggtgtacatagacacttatagaggaaaatagatctagggttaagtgttggttcgtagagatggagggagacacttccgaaataggcctaatctattacaaggctcaaggcccaaatacagtttcagtaacaatactatcttgtttggacgttttccattgactcgggatgaaatttgatatgagaccagatgcatttgaaaggtgacgacataagctcccaacaagtccaaaatttctcaaatcggagttggaatgaaggcgctaggtgtgtttgaagtcagtgttgcctcaaaggccgaactgaattcctaaactcattggacttgaatatattgtagatcctccattcgtccgatgtattctttggcaatgttttatatttctcatgtttggttgtatgcctatacttaatggtcacaacacttaatgagatgcatcaccatctttttcatctaatttcaccctcaactatcctcccacctctaaccgcccctcattttaatgaagtactctctctgttttgtattatgacagtttgacttttttatgttaaatttctttaattttgattaaattcatagaaaaatttagcaacacttacaacgccaaattagtttattaaatctaacattgaatatatttttatagcatacatgttttgtgttaaaaatgttaatatacctttttttttatataaacttggtcaaacttatttaagtttgaaatacatcttataatgttttcataagtttttttgtggggaatgttttcataagtttgactagagaaaagtgaaaatgtcatatactatgaaatgaagaaagtactttgtttccttcaccttactcttaaaaaaatacttagaaatactcaaatacagatggagagagttggtatgtagtattactcataagtcgtaagtagctatatgcgtggtatttttctccattttttcctctctctttttttcgtgtttaccacacctaacacggcaatagaacattaattggctcaaacacgtgaccaaagcactgcattccgcctatatataggtatccatgttcattttaacttatgccttcccaatatccatgtgtgtgcgtggctatgaaaactttattttaatatcactagatttgttgtgagaaatgctagctaccccaaatcataattacgttattatatagtaatgtaaagtaatgaaatatgcactggtggagaaaccgtttgtagtcccggttggtaaccccctttagtcccggttgtccaaccgggactacgaatccgggattaaagaaagctatctttagtcccgggtgaaataaccgggactaaagatcgagctgaccttttttttttgcatggccctgtttgctgcatggttgattatatatatatatatatatatatatatatatatatatatatatatatatatatatatatgtgtgtgtgtgtgtgtgtgtgtgtgtgtgtgtgtgtgtatgtgtatgtataaatcatatatattaacacaaaagcaaatgtgtacatatataaatatatatatacatgcatatatagtacaattcatttgctcggtagctatagctacgacttcgacttcgacgccggcgttatgtcagaagaggaaggaccgacgttatgaattgttgatgatccgtcgtagtagaattcaccgtcgggattaaggacttcttcgttgatgaatctcatcagttgttcttgaacagccatgataaaatccttgtgtgggagattatccctcatgtgaatacgctatcattcgaaaaataatgacgtatcaatatatgaaattaataaacaacttaacaaatcgatacgcaatgaacttttgaatggtttatgtatacgtacatcgagctctcgtgttgtgcatatttggtttgataggcagtgggcatactcgcatacgtagtagacgcataagttagttccctgttcctgctttgcacactacatgagaaacgaagagagatttaatatactctttatattaactgtaattagagattcaattcaatataattttggatcatgcatgtactcactggaaaatgaaacctccgtccaagtttttctttccaagtcccgcggaccaattgacggaaccgatcccaagccctacatatgcagttgcaagctatgattaattaattattatctgagatcaacataatagcaatagattccccgcgactttggaatagatagcattatattacctgtctatcagtttgaagaccttgtcaaaaatcttctcctatttattcattgagtcgtacacagtgactctgcatgcatccaagtcgaagaattacaggacccagtggaatctggaatatgcgtgagatgagatatatctgatcgaaaatgtacatgctatatgtatgggaatgaaatttgttcgaacgacaataaaaactcactctgtgttgtacggcagtagtatgtacgtcttgaaatgctgctgcgttaggagatggacgagattgtcctctgtgtctttctcgtacttgtcgatcatttcggtgttgattttccgagggtcgatgaacccagtatcgtagaccctccgccgtcgggccctttgaatctccattctacaacgatgaaaggaaagtattattgcttacatatatgtcaggagctaattattgaacgaaacaaatcgaactcaaagatactcacaaaatccatgcgctcaggagagagacgtcgagggcgtccaactggtacagatcgaagagatctttgaaatggatccagagaacatcgtctccttgcaagaagtcggggtttctgatcctcgccccaaacatctctctaccgttggcgctcatttccatgtaccgttcatggaatttgtacatctgtgtcggtagggactccagctgttcaggtttgacaagcggtttaccgagttcaaacttgtatgccacttccgccttcgggattggtgcggctccaaccaactaatccacagatagaccggtgtctgcaatgaaatccgttatgccaaaatcttcaccggtcaccaacgactcgacctcttggtttggttgttctccaagctgagggactggtttggacttcttgtgataggctctctgaagtgttcggtcatagtccgatatctgtaacgcctccttgtttgttttggacattcccttgaagaagttcttcacgctcgggtcaataggtatcctcttttcaggactctgaggcttgagttgcctcttcacctctcctgccacataagcatcaagctcctcttgactgcaatcgtatggtggctccttgtttttggtggcgtcaacttttgccttcttcgttgcccttgtgcgggcaggcggtggagcttggcgagaccttgtcttgggaggtgcaggcggacacggtggaggcggaggaggcggaggagccggaggagatggtgcagcaggaggtggcggaggagccggaggagatggcggagccggaggagatggtgcacgaaatgccacttgtcgcccaggaaggatgatgtaccgcttgcgccatagtatgatggcgtggcttgtgtctcgtagatgcgtctcaccgtcccctcctgggtagtccaactcgaggtcctcgtacgcggcttccactagctcaacttcgaccctcgagtatcctgctggaatcggcctgcagtggtaagtcccggaagggtccgttgggatggccattcccgatgccaccttcacgtgatgagaggttatctattagtaatcaacctaagcagcaacttgcggaatgtacaagtcaaaaatcatcaaactacgagcataccttgattgataagttcttgaagggaatatgcagctcacatggtgtccgctgcgtgatctcatcaacggggcaggaggtttcgtcctgggtttgcatggcgtctatgctctatgatccgacctgcccggttgaggcgcagctgctacgattgcctgatgggctgaccattacaggatgaatgtacggctggggatcttgggaccgatgtgcggccatacgttcatccaccttcc

SEQ ID NO: 23761 - DNA, 1386 bp, Oryza sativa
ttgtttctggccatcatcgcttgcccttgttgccctgtcttgtaagcaacgaactcgtcccaatgatcccttagctttgggaatacgtcgaagttcggtgttagtcccttcaggatgtatttcttgtagagatctcccttgaagctctggaactgttctgccattttcttcagagtccactatttcactaagttatccgtacccgcgggtagcgtgaacgtctcgagcattgtggtccacaacatctctttctctgagttcgggacaaagctgtcatcatccccgcgtgcccttgttctgcgccagtacaccgtgctgacaggcacgttgtccctcacaacccaaccgctgtggcgtacaaaattcttggctgcttctgccggtgcactaggtcagtcgtcttcgtccacctcagttatgatgtgccgaccctctatcttcttcgcggcacctcgttgtccgcgtgccctcttctgtccagcagagggctgacttccactagcctcctttgcatcgttcccctcctcgttcccctccgcatccctctccacgttcccctcctcgttcaagtactggtttggatcctcgttcccctcttcttcgttccagtactggctgcttccctctgcgattgtatcgtatagtatctgttcctcatcgcgatcggccatctgtgcatacaaaaaatatttgttaggtatataggatgtatttgctaaccgtaatattgaaactctgctaatcttatattaaatctcttataatcttatattaaatggctactaatgtcatattaaaattgtaataatcatttatatatgctaagtctaacaatcttatattaaatctctaacaatcttatatttaatctctaataatcttatattagaattgtaatagtcatatatatatatatgctaagtctaataatcttatattaaatggctactaatctcatattaaaattgtaataatcatttatatatgctaagtctaacaatcgtatattaaatctctaacaatcttatatttaatctctaataatcttatattagaattgtaatagtcatatatatatatgctaagtctaataatcttatattaaatggctactaatgtcatattaaaattgtaataatcatttatatatgctaagtctaacaatcttatattaaatctctaacaatcttatatttaatccctaataatcttatattagaattgtaatagtcatatatatatatatatatatatatatatatatatatatatatatatatatatatatatatatatatatatatatatgctaagtctaataatcttatattaaatggctactaatctcatattaaaattgtaataatcatttgggctgcaggaatt

SEQ ID NO: 23762 - DNA, 7643 bp, Oryza sativa
cggcagtggcgtgcagtggcggcggcgtcggggcgccgtgggccggcccggcggcgtgcgggcgcgccggcggcggcagcgtgggggcccggcggcgtgggggcgcggcggtggcgtcgggaccagcggcatgcgggcgcggcggcggcgtcgtggggcccagcggcgtgcgggctcggtggcggcgcgcggcggccgcggcatggcgtagcggcagcgtggcgagctcgaggcggtggcggccgagtggcgtagcggcggcgtggcgacctcgaggcggtggcggccgagtggcgcagtggcgacggtcggcgtggcgtcgcggaggcgtggcgtagcggcccggcagcgtggcgtggcggcgtggcgagctcgagggggggcggcgttcgtggcaatggcgacatcgtcggcggcggcggcggccgcgtcgatcgtcggccgtggagagagagagagatcgagatcgagatcgatagagatcgagagagagaggcagcggcggctctcacccaagaagtgcggcggcggcgtctgctgcggaggcggcgaggaccaccgagcgacagcgagaaacgacggcggtgtcggcgcgggattgccctaggcatggtggcggcgaaggacaaaccgagatcgaaaaatggttaagtgttggtggagaagatgagggcgtaaccggaatatatatacccccggatgtttagtctttagtcccggttgttgtcaacaaccgggagtaaagatatctttactccggttgttctcaccaaccgggactaaagatcttttcccgctatttccaaattctttttaaacccggttagggttaggaaccgggagtaaagataatagcagttctacatatgtgtttctataatagtaaataatgtattaaaattatttaaattcgaacaattaatgataaaaccttcgaaaaattattgttgtatgtagtagaatacgtggataatatataataagcacatgaatgatttaaaattgttaaaaattctaattaacatatgtaaatagcacatgcatgatttaaaattaatacaaaatctaatatcatatataactagcatatcatgatattaaattgttaaaaattctaattaacatatgtaaataccacatgcatgatttaaaacctttagaaattctaataatcatatatatgtagcatatggatgatttcaatttgactaaaattctaataatcatacataattaacaaaaaatctaataaccatatataactagcatatggatgatttcaatttgataaaaattctaataatcatacatattttacatatgccatacaacaattgattagtatagatattcggtacatccaacgtagtttacatcgtgtacagaacaattacggcaatacatcggcggtgacggttgaccggacgtactttctcctcactattgttccttccttgtgatcgctacgtgagtaaggggtgtcttcatttgataggaggatgctagggtcaattgtcatcgtgaaagggggttgcccatcaaactaatcgtaatcctagtcagtcttgtcctctactccgacgatttttctttttcccgggagaaccacgtggcgcttcgactcgtcagtcactttgcccttttttcctttgctagacatgttcttgatgtaaaaaacttgggttacatcattggcaaggacaaaaggttcgtccgagtatccaaccttgttaaggtcaaccgttgtcatcccactgtcatcaatcgttacgcctccaccagtcaacctaacccattggcaccggaacagagggaccttgagaggtccatagtcaagttcccatatgtcctcgatggcaccgtaatacgtgtcagtcgtaccatcgtgtcccatggcatcgatacgaacagcactgttctggttcgtgctcttcatgtcttgggccctcgtgtagaatgtgtacccattgatttcatatccctggaatgtcgcgatcgagctagatggtcccctcgccaggaaggccagttgttggttaatcgtctcgttacccatgagatgttgtcgcagccacgtggagaaagtatcaatgtgatgccttgtaatccatgcatcggacttaccgatgtttttggcgcgaattagagccaagtgctcttcgatgtagggagccaccaatgaagattgttgcagaaccgtgaaatgggctttacggaataaattgttgtctaccgtcattattgctttccttccaaaagtcccctttccccgtagtctcccttcatggcgtgattcaggtaccccgattgggcgaagggcttcgataaattctacgcagaattcaatgacctcctatgttccataccccttggcaatgcttgcctctggacgagcacggttacgaacatacttcttcagaacgcccatgtacctctcgaaaggaaacatgttgtgtaggtacacaggaccgataataccgatcactttgacaaggtgacaaagcagatgcatcattatattgaaaaagaaggtggaaatatcaactcaaagctgacaagacattgcaccacatcattctgcagggcttctaatctatcaggatcgatgaccttctgcgaaattgtgttcatgaaagcacatagctttgttattgttgcccggacattatctgggaggataccccttattacaactggtagcagctgtgtcatcaacacgtgatagtcatgagactttagatttgtgaacttcttctccttcgtgcttattattcgctttatattcgtggagtatccagacggtaccttgatgctctccaagcattcaaacatacttcccttctctgccttgctaagagtgtagctggctggactcaagtaatggcttcctttctcctttggttccgggtgaaggtcaccgcgttgttccatatgcttcagatcattacgtgcttctagtgtatctttcgacttttcatatacacctaggaagccaagaaggtttacacaaagattcttagtgaggtgcatcacgtcgattgcgtggcggacgtccaagaattcccaatagggtaactcccaaaatatagagttcttttttcacatcgccgcgtgaccatcttcgctctctataggctggctgccaggcccctttccaaacactactttaagatctttaactatagcaaacactgttttcccgctgcgatgtttaggcttcgtacggtggtccgccttatgttcaaagtgcttgcctttcttccgtaccaggtggtttgctgcaaggaatcgaagatgacccatgtacacaaccttcctacagtgtttaagatacgtactttctgtttcatccatacagtgagtgcaagccttgtaccccttgttggactgcccggataggttgctaagtgcaggccaatcgttgatggttacgaacagcagcgctcgtaggttaaactcctcctatttgtcctcatcccacacggagacaccttccttcttccacaacagtttaaaatcttcgaccagtggtcttaggtacacatcgatgtcgttaccaggttgcttggggccttgaattataatcggcatcattatgtacttcctcttcatgcatagccatggggggaggttgtagatacacatcgtaacgggccaagtgctatggccgctgctcatctctccaaaaggattcatgccatccgtacttaaaccaaaccgtatgtttcgtgcgtcctttccaaagtctttaaattttctgtcgatgtttcgccactgcgaaccatcggcggggtgtctcagcatcccgtcctgttgacgctcttcagcgtgccaccgcatcattctagcgttccccttgttcttgaacaaacaccttagccgtggtattatagggaaataccacatcaccttagcaggaattctcttcttcgttagctgcctgtcaacttctcctgtatcatctcgtctaatcttgtatcgtagcgctttgcaaacagggcatgcttctaggttctcgcactcctcaccgcgatataggatacaatcattcggacatgcgtgaatcttctgaacttccagtcctagagggcacactatcttcttagcctcgtatgttgtctcgggcaacttgtttccctccggaagaatgttcttgacgagtttcaataaatcgccaaatgccttgtcactaacaccatttttttccttccattgcaagaactccagagtggtatccaactttttgtgcccctgctcgcaacctgggtacaacaacgttctgtggtcctctaacatcttgtccaatttatgggcccccttttcactttcgtaatcctccttggcgtcctgcaacatctgaccaagatcatccgcaacgttgttaccatcagcatccctttcctcctcgcccgtttgatttccttcaaatccagcgtactgagcaaagtccggaatattgtcgtcttccacttcatcttcttccatttcaacaccttactctccgtgggatgtccaacaattatagcttggcatgaaccccgactcaaacaagtgaaaatgaatagtcctggatgcagaatactccttctgattcttacacttattgcatggacaacaaataaaacccttttgcctgttagcttcggccactctcaaaaaataatgcacgccgtcaataaactctttggaccaccggtcagcgtacatccattgccgatccatctacatgacatgaaaaaaaatcgtacacacataattattcgtacaataatgacagtcatacaataattataaaataattacaaactctttcaacagtcacacaataatgacatatcattattcatacaaatattatgaaacattacaccgaataattatatatttactatttataaagttttaaactaatattaatgtgttgtacttattttaatttttcattttactttgttttctattattcaagattaactttcactatattttccttctcaacttttttataaaacattctttaccaaataaactaaatttctatatattctttcttctccacacaaattttctctctcatcaactaacaacaaaattttggagacaaaaaagtgtgcaaaacatagctccaaatgtaatatgaaaaaaaaatattggaggatgaagttgctaaccttttaggcacctccgatttgtatataatcaacacaataaattcactagaaattttggcatgacctcccctcttttttgaagaaattttgaagcttgctcgggctggaggaggaagaagacatatatataggggtgggactttagtcccggttggtgttaggaaccggggctaaagatcgccgggatctttattcccggttggtaacaccaaccgggactaaagttatgatctttagtcccggttggtgttattaaccgggactaaagatcccgggggggctgacaggccctgacagcatttgaaccgggacgtgttaccaaccgggactaaagatcaaatatgtctgttaccctttttaaccgggactaaagatcatctttagtcccggtttttgttgcaaccgggactattgtggaattagcccgaccgacgaaagatggtttctccaccagtgatgatagacatagttgtatctctaatattgaaaacagcctaaaacgagtagaggcggtacatcataattaccttttggtgttattttctcttacagctctatatgtttgcagaaaaacttacagaaaataacatttctgggtaaacagcatgaaccgacacttagttgagaatgggtggcgataggaatacataccaaaaaaagatgtggctcgaggttagttacagaagagaacttagggcgtcatttgctgccctccatagctaaaaactactcgagaggaccggaaggatgcatcatgcatggttgaagaactctcttgtgttgctttcaagttgcaacggtggggatgggtggggatggatcatcctgttcagtcacacatacattcatttcgttgtaatgggcgtgttttcatggggcagccctcactttttgcttgcatgaagtaccgacgctgtagcaagctgcaccgaacatatgcccaataggattatttaccgtcttttctcattaatattttcttcgactttatgcttctttgccgagtttgatcaatctatgtgcacaatgagctatacccaaatactgtcaaacagagcggcgggttgcaaaaaaaataaaacctttatttagtaccacaccaaattatatatttgcgacttacatatttaactttttccccacacgttaattataaattatatatgtacacaaaatgaatagccagctgctatatgtaaggtatactatcagtatttctttatgtgctgtctttggctactcctaaagggaacacagaagaaagaaagctaaagctgggccaaagcttagccaatattactgcatactcgtgagtcgtgaccgcacacaagttaattaatggacatatttgtgctgttctccttttttagattttttattttttatgagtgaatttaggagaattaatttcttagctttttgcttggcagagaatgggtggcaccaggaataatcttatcatgttggcatctcaaaaaatggcaacagtacagaacgtaccaacaaaatagtcctgtgtacgtcctacatcaaaattatagcaacaagagagtacggtgtagcaaaaacacagttgtgatattaccccttatggctatagggatcttatatatcccttcatactacataaagttatcacccactaactgtaattatgatcctaaagctcaaatatcaatgctccacatcatcgtcaattctcagccgttggataagtagattagatcggctctaaaccgttggatggaaaaccgcagcatatgatcagattaaacacaacccaacccatctcacacacagccaccatgtgagacccatgtatagcttcgaccacgggaagcccatctcattccatcgcagcccaatttaatagtgagggatatagggttcagtggggtctctgttggaaatttggtcataattcggcatatttttatccaaaatattaagaaaataaacatggcatttgcaatttgagtatatctagtgacagtggtggatgtaaataacttgagcatgcttaatataaaataagcatcaacatagatatgagaacgcaataacattgcgcctgacagtaacaggaaacgaagaatgaacagtaacagtaaaggattgtggcagtattgtctccgttggtattgacgggaacctccttctccttatctctagtgttgttgttgtctccggtgttcaacatgttgatgcagaggaagaacaagagcaggcgaagacgaacaagaacgaacagtaggagcagtcgcgcgcgtagcgctccccaaaaacttgatcgcccgcctacccgtgcaggttctcaagcggacggagttttggaagcatgtacacctgtgcatgcaggtgaacggaaccggagaagcagtagcagcacaagaacaaaggagtaggaggaacctgaagtgcaagagtctgcgggaagaactgatgaactgccatccctctgcggagtttgta

SEQ ID NO: 23763 - DNA, 3237 bp, Oryza sativa
aaatttagtaagcccctaagagaattatcacgtcgccaatagccggattcctgctatattcggttaaggaaattaatatgttaaaaggaatcttatctacaagtgatcgagttcaaggaggatgcggcatggcagtttatctattaattaggcagtatttgttagtttcgttttatctttaggaaagtgtgtttagtgtcctataaggactttatgttctcatttttatcttttaggaaagtttatttcttatcctacgaggactagtatctccacatgggtataaatatgtatatccgtggtcattgtaaaatatatccacgatcaatacaattcggcgcatcgccaccttttaccttttctacctttttatttatcatccggcgggacttagcacctgacgcggggctgcatcggcgttcgatctccggcgaaggggtaagtccaatgttccgttggtccaagcaattgtctcatctacgtcggcatcgttcagggctacatcagtacattcgacctcttggattgctccgatttggatgatatatgtgtctgcctatttatcatatgtcttagttaatttagtcttagtatctcaatttagctctatcggttgtctctcgctttagggtttctaccggtatcggctaaattgttttactagattagattagccaaggcatctaccaccctaaaaatcagtcaacggcttgattctctagatattgtgtttctttttatacttagtgccgcatcaattaagtttgatctactaagttgtgtttagaccataatccctagcctgctttctgacagccaataagggtttcatcggggtttcagctaatgaggtatctagacgttgcattggcttacaaggattgcatataagttggatttagccgatggtaacaaagatttcaccgtttaatctaatatgtggattttatgacatcggacctccagccgatgtattctttaaccttcagatcaatacttgttctatcatatcattgttagccgattggtttctacttgattatattgctattttattacatcagtatcagccgagcgattgcctctatattgttatttacatcatgtcagaatctacattggatgtatagccgatagctcaaaaccctatcgatatcggctggactacttcatcggcttgtcagtcgatcggctcgatcagctcactggtcttgtcagttgtaggatcaaactgactggcacgcccgcacctcaccaagatttggacctgcactggagctaagcagatctcccaggccagtgtgtatttttcgcatcaacagctcgttaacacgaaatcaatccacggcgatctctgtgtttattgccgtccgttataaaacgagcgagagatagatagatagatagatagatagatagatagatagagagagagagagcagccgccgcctgccttgcctcgccctcatcggctcggctcgcgcgcgcatgtggctatccgctcaccatctcaaccggttaatagagattctccactatctccatatttaagttgaaacctcttcacttagaattccaagatagtattattacccatagcactaatgtgggccaatgaaatttattaggatttgattgggcctagcccattaatgtaacaatccccatcaaatttcatggctcacaggaaatgctcttgattctgatcctgtttgttataccagtgtttcggtggagacagttaagttgaacttccacctaggagaaattctgatcatgtttgttataccagtgaagaagcagtagcagcgcaggaatagaggagtaggaggaacccgaagtgaaagagtctacgggaagaactgatgaactgccatccctctgcagagtttgtatgcgagcaagtgcaagagtctacggcggagtttgtatgcgtgcaagtgcaagagtctacgggaataactgatgaactgccatccctctgcggagttacaaaacaagagagagccgccgccttgccacgccaagtcggcccggctcggcgcgctcgcgcgcgcttatggctgatcgcccaccatctcaaccggtcaacagagactctccactagctccatatttaagttgagacatcttcccttagaattccaaaatggtattagtacccatagcatttaatatgtgctaatggaatttattaggattattgggcctagcccattaatctaacagtctcctcctcccgagtcagagtggcagcggcggttggttctctcggtctctccatcggcggtaggcggggccgtagcgcgcaccacgcgtggtgcagcgctggctaagggtagcgcacaactcgtggctagctctggagcgccgctcatccgttcaggagacagctcggttgcgggagggtttgagcgcgcgcgctatggcgagccctggagcgacgcgccaatggagagacacgtggatgtttgtttctttctcggcgcagatccgtggaatgcctaatgttgagccacctatcaagccatcatgcagttcatgatggattgcaagttatggtctagactcatgaccaggccggtgaggtactttgtataaagtttaatcaggaatctaaagaactgatttccaacaactagatcaaaagacgtttacacgacgctatattcatatttctaaaaaaccttgagagtcatgatatattatggtctcctttgaaatgcatgaaaatttattgcattttcatagggaatagtttaaatcccttgcgatgttcctccgctgcaaaggtgatcaggattaagcgttcaattatgctatttcaaggcataagacttgactccgacatagttatgttgtgcctccattctattatggatgactttattcaatttggaacctaataatgattgagtagtgttttgctgttagccatggttctgtccaagcacttctggttgagatatcaaagagagaaacgatatgcaaataatgtgaaaagttttcgatctacggatgtttgcttagggatgttgcaccatgcgtgtgaagcacataaagccaaaggtattgttatattgagatatatataaggttctctctctttttctggttgacagtcatttaataaatatattggttacaacttcaatattgtgtgcattatattccatatctctttatttccttctctataggttttaaccattacatcttgcatggttggctacaatc

SEQ ID NO: 23764 - DNA, 25118 bp, Oryza sativa
  unsure (1)..(25118): unsure at all n locations
tcacaaatagaacttttatcatgattgcttcttagttcttacaatttccgcaacaacgcacgaggtatcatttagtcatcttgatattaaggatccataattttattgggcagatagacgaaaacttttactggcatgtgatacttaataaataattagcatgtgattaattgagtattaattatgataaatttagaaataaattatttgtaaagaaactttatatattttatcagaaaatacattgtttaatggtacagaaaatatgatctaccactctaaaagactccaatggtggtggtggaccaccactcactatcacatgggtccttgttgcagtgtaccaatcgtatgttcaaaattcaaacaactttagagtgatcaatacccaatatacttatgcataacttctaaattttacatgattctccaagatagcaagtgaccgtcccctccgtaaggaatgaggtctcttaaaaaggtaaatgggttattttttagataaaataaagttttccaactataatatctatattgattaggcacatagtcgaattaaaactgatgtatgtatcaactaacaactctaacatgtcctagtcaaaactcctacgatttagtctataagaagacacatatattttttcttatagctttgctgggtaaaattttgcacttagtcagcatagattttcaaaatatttccaaatatctgaaatttccaaatctcattgtcctcacaaaagaaaagaaagaaacaaagaaaaccaaccaagccaaggatcagccacagaagtgcaaattaacaggcgcgttggcgagagaccagacagaggctagaggggataacggtcgccgaactatcctccatccacgtggcactcacctattggtccacgaatcggcaccgctcatccattctctctctctcacctcttcgctcgccgccggccaccgtcatggccgccgccgccgcagcagcagcagcagccggaggcctcctgcacctgggggcttctcgcgtgccgtcgcggcggccctccgctggcgctgcgcctcgccttcgtggggcctcgtgcgcgcggggccgccagcctcggcggcgggcgccgccgccgctcgcggtggcggccgcggaggaggcgtacacgggcgccgaaacggagctcctcgatgctctcgccggggtccagggccgcgggcgaggcgtcgcgccgcgccagctcgaggcaagcatggagcgcactaggtgcttgttgaaatgcttgtgcggtgttgctgacatttcgagttgttacgtgtgcgcaggaggtggagagcgctgttcaggctctggaagcactgggaggtttgcccgatccggtgggtgcacggtgccttttcttttcatttgtattgtctgaattatactagtatttaactaggtaattgttgggtggctagagaatatagcagtagttaatattgaattaacgattttataaggcgaagattttaggtgaggtgcatgcatctcaatagttaacgatctgaatttaattgagaaacaagctgttttgcatcttgatcagtgcaaggtaagcttgagtttcttgctgaaataagttgaagctaaacagagaacttctggagtttgaatcgtaagattatatgataaatatgttacaagtgaagcttgccagttgccattgaagtgattcatagagcatagtagaaagtactttctgctgaacgagctagatggcatcttggacttacggtcagaaactccataaatgtgatgatgttagggtgttacttttacttactatgggaaagtatgttcttatcaaagtttgatatgattggcttatctacaaaattgaacatagctagtgctcccattatcatacatgtatttgacgtagctggaaagtttctatgcaacaaaggctgtcgtcttatctttcatggttcatatgcagaccaactcaagtctaattgaaggtagttggcagctcatatttactacaagaccagggtcggcatcccccattcaggtaaaataccagcagtatgccccactgaaaataatgttcagtctcccatttatctctattattttttggattttcaggccgaccgcatatagataaatgactgattttattcttcattcacattgcctgcagagaacatttgttggagttgactctttcaagatctttcaggaagtataccttagaacagatgatcccagggtgattaatgtagtgaagttttcagaatcaattggtgaactgaaagtagaggtattgattagcctacagtaaacttgcaagagatacactactaggaatgattgaatcaatagtatgacaaaaagagacacatgattagcaaacagaaattctgttgaccactcctgtttgttaatgttgtgcccatggattaacctagccagcacacagcgccagcaactcatcagattgtgccatgactggtctggaacaaagctattggcatgaaccgtgcatgaacagagtccaattcaataataaagtcctcttagtctacatttagcatgactcgtgcagtgcctctggttgtctcgttggttgttcaagtgtggatatgtttgcaggtagagtcttagttgcattacttggggcttgtttgtttgctaccttcaatctgcctgaggattgttttggttggtaccctgagatcctccctgaccaggcaacttcatctaacttccatgaagatcctccgttgcatcacctccatggacaagaaaaacctcacccaatttcagattctcgcaagagcactgctatctcactggtcttcttcgccagcactgaccacacattgctaccctgtcccgaagcacctccacctcagccatctttactgggaagttcgacaggtcacactgatccctgttcaccctttccttgatacctgccaatgagttgtctctgtcaccagtgttctgtctcagccgctgcgtgtaaccagtgaagtgtcaccatgcacctctgggagaagaccatcacactacaggatgcccaacatactgttgcatcctataggaatctgcctacatttgcgaaagggcatgtagcctaatggttgcagtgacctaagtagcaccccaagatcctgggttcaaatatccataggagtgaatttcagattgagttgtttgcggggctaagttcccaatttaaatggctgcatatatccggatggatgtagaggctaggtaaaatattacccttctctaaaaaaaataaaaaaaaaacatactgttgcattcctcttgttagggatacacttagataaatagagtgggtcatcatcagtaacaagttcttccaactagatatctatagcacactctctatttctctagtgatcctctaattgcctattgcttccccattttatagtgtgccctcctccagctccatttcttctcaagccatttaatttatcatctaataaatagtagttatcttgtcgggaacaaaaatcctgacgaccttaagactgatagttctggagggctgggcattatattgaagaacaatatattgtacattgctccgactacttggtaaagccgaaatcagaaacatcattggcatttttatcttttgggagacttcattgtttaattaatccattccatagtaaacatggaataagttggtaagagcagtctcttacactcctaaagagagttgacagaacagtgtgcttattctgtatgaagggggataaatacttctactagtcaactaacttcgattactgctagttgctaaatttatagtgcttttacaatgttctacatgactttatgatgagatttatttaaaatataccaggcagaagcaactattgaagacggaaagcgcattctttttcgttttgaccgagcagcattcaacttcaagtttttgccatttaaggttccatacccagtgccattcaagcttcttggagatgaggcaaagggttggcttgacactacgtacttgtctcaaactgggaatatacgtatttcaaggggaaacaaggtacatgctacatagtcttgatgttattttactgcctaacttgcagtaaggttttcacaactgaaaccatgcagcaacgcatttaaaattttgaattgtataattgattttctctttttttatgaatctacagtacagaaaattgtaatatctttatagtttgtagaaatctttgctttttcccaaacctgtttgtacttcattagcttttcaaaacaatctgtagtgcagggaaccacatttgttctccagaaaagtgcagaccaacggcaattgctgttgtcagctatatctgcaggaacaggagtaaaagaggtatgttattatagcttgaattgtccattgtggcagtactttgagtatttgacaaagtggtatttacaacatatttgcttgctaaaaaggctatagatgatctcacttcaagcagacaaggaattgaagctgatctgaacactctagcgggagaatggcagctattatggtcctcaaaggttagcatttacattttcataaacaactccaagcaatatttcatatttctaatgtctatgcatcatttggcaatattgtttttgagcaatggttggttatattgtgaaatatttgacgtgcgaatcaaccacatggcagtactagatcagacctgcgcaactaaccatgttttatgtatatttgttcttctttccctgtaatttatcttgcacaagttctgatgccaaccacctgggctttaatcgttcaggcaggcatctcacagttctatattttgcttagtattatttatattaggtttactatcaactgttttatataaaatctgactgggagaagtatttctctatggaaaggaaattaggactcttggcagcatcaaacaaaacagatccttttctggtttgtgaaaggacttgacagctgctgcaaatgtaatgagaaatggttattcctgcatacaccttcaagcgttactaaaatagaataccacagcgtgccacgaagatgaaatttttcatccaattcctatagcagaaacgaacgggacctataaccaaatttgtatgcgcagactgaagatgaaagctggtcatttgttgcatctgctggtctgaagggtgtccaggttagtttcagaaccacctctgaaggatttgtctgaagactgagcaaaaagatgaaatgtcactctggttttttacttgcacacgatatggcttacaaatgatatgggcttttcaatcagatcataaaagaagatgggcaattgaagaatttggtaagaccctttccaggtgtcagcctcaatgcaagtggcaacatatggtaagctcgaagagctgtatgaatgctgtacttcctgtttgggagagtttacagctttgaagaccttttttttttttttttgaggaaacaagaccatatatattagaacacagtttgttaccacctacttatctacatataaaaatccacattacactcttgaaattgtaaattttgatcatataccctctccttggattgaacttgaggattcaccctcctgacccacatgtgaccttaaatgaccccacatgtcattggctcaagagggtaaatcctcaatttccaatctaaatttaacttccttgaaatttcctattggatcttgattgttatctttattacaatactactacaactaccaaattgactgttcatgtggtgttttgttcaataccgagcttgcgagctaagtattttctttattaaacttgcagtaaaaatgaggatggcaataactttaacttgtccataaataaaggagctattcaagctggtgggttacagtttcccttggatgctcgaggagaatttgccatggaaatattgtaagtttgggttcacattccaacaactgaaacagaattgatgcttgtctgatatttgtgaaatttcatgcaggtatattgacaataagataaggatatctaatattaaccaacacaagcttgtccatgtacgcattgcaaatagaacataaaactaaaatgtagggatctatgaagaaatcgcttgacttcatcactgagaatctttggagacttcatcactgagaatctttggattcaatgatcagatgatgtacacgttgtagttgaccgctaccagtacaatagtaagattcctgtaattatagattcgcatgaggtttgcagatgctcaatccttttctccaatgatacaacattacacatgttttggtgatagaccatgataatacatattataagaataaggttctgcatttctgattttggaaacctttgcttgcaattggcttggacgttcactcagttctttatataaatatcaactgatttaattaagaatttgataagggtagcagctgcctgtgctcattaatcagtcaacaaaaaccatgaggaaactgttgagaatgcttatatcgtaacaagagattgttcagaacctacaagcaaattaagttcatgtgtacacaggagtgcattcaggcataagaaaacgtccacagtatacaaatatacaggtggatgcgtgacaagaaaatcgcagattccagattgaccaaaaaagcttgattacttctgcatcagcaacaatgattgtagtgtactcaactaatattaatattccaaataaactaactgaattgggtggtacaaatagtttcttcctagctctaaaaatacaacaatgaccctgtgtaaaaaatgttacatggtacagtttcctccattattgatcaacttttggttctatcgttttgttcaagaacaaagcagttcttggtagcaagttgagtttggaggcagatgttgatcggcgggtgacaaaacgtccagggaatttgccagtataaagttaatctgtggatgaacgagaccacagtagcaaggattttatcacaattgtttatgcagaggccaaactatcacataatgtttggtatgctgcactgcagtgcttgaatttctcctctgcagtagcctgtccatttaaggaaaatcatgagttacataaacaaataggtgtaacagtataagtgattctggtagttttaagatataagctcaaaacatcaaaaaagacaatattccattgccaagaactgcatctgttcgttcaaacaataatttcataccatgccttctattgaatcagatacaggtacgttcagagaaagaaaaaaaaaaagaaaggaagatggtggaaactggtaaacttgtctctgtgtgagctaataaccaatccttcatatgaaggttggagatgcaaatgaaatactgaagatataggggattttggtccgcaatttccattccagcaatttatataatcatatccaattatcttgtgtgaactcgagatacttgtggcaagactatctaaacaagtgtattattcaccgaacagcctggcatacaaaaaacatgcaaagagaaaaatagaataaagtcagatgtgacaagttcaccttcgttgagccattgtgacgatctgggtgccatctaagtgcacatgtccggtatctagtatgaaaacaaacaaaaataaataaaggataaaataatcttgaaaaggaaaataagtgaaatctactaaggttcatggcttcatggtctaatatcacaaaaaaacacataaatcttggaaaatgttgaaagcttgaaagatcttacgcgcttttaacatcttcgagtttcagtggaccagaagtactcaatccaagtgcctgccgtgccaaagatacctccgtctgtgcgggtgtttcatcctcatcatctgtctcataactccaacgtctggaactttctgaatgagaacgtctgtgatttctctgacaaaaatcatcagaatcaaaagaccaataaaatgtctgttgcccacggaaagcattgcgaaacaccgtttccggttcatcttcatcacttgtgcaaaactcaaatccacctgttctcgaaacaagaaacaacaaaattctataaggttcaccttatgcattatgcatgtgtcatatccagctaaaatatttcttgtaactgaaatatttataacataagcagactacattaaaaatatgtgaattctgaaaatagaagtgctaaacaggacaataatttgctaataagatagagaaaatgaatgaagtaatgtacccctgcttctgaagtttccaaaataaaaatcatgtgggcggaaaccattattctttggattcctgacccaacggtgtcccctgaaccaagaaggtccacttgattcatcatttttgtcatcttcatcccgccaactctgaaaattaatataaataaatttgtggtcaagagcattctacatcagcatttaattatgggaatcaattggattaaaaaactgtaaccaacattacagtaagaacaaagtgaaaaggaaaattgcattaaaggctgaagaaaaaggtctattttacagcaaaacaaaagaccaaaggtagtggagacttgtactaaatgggctgccatgacagctgaaaatatgtgttgtctgttaatgtggcaaaaacaactagcagctatggatgagaaatgatggttttataacagtttaatgtaataaaatgcttttgtagttcagactttgcaatagttaaatgttgtaaggtagacttttccaaagctgaaatggtgcgacttatggtgacagaaccacagaaaaatacaagtaaccaattcagttcttataatccttaattccttccaaaatgccaagggaagaaaaacagaagttctataccattatctgattttttttttcaatcctgcgtgccacgactgtgtttttaatggcaccaatcctagagttgcgacagtcttgcaagtgatagaaaattagggtaatctttggtgtattgcaggagctttttcccttcaaaagctccttagtgggacggcaaacctgggcagctaagctctccgggtggtcttgggtgtgtgggtctcggtaggagggctcgggtcctcctactttgtaaatatctttgtttttgttttttcttccccttaatgaaatgaaatgcagctctcctgcattttcgagaaaaaaaaatcctgcgtgccacataaagcttagtctaaactgtagagtgttaacataaaaaccttatccactgtaatcttcttcataacatccaaacaatattgcagggtttcacatggcacttatattgttcttatgctttccagaaccatttctttagactttagctttgtttctgtattacgtaagatggaattaaaaaatcagataatggtaataatggtataggacttctgataacaaaggatagtaataatgtgttgatccaaatttagtaaccacaagaccagtagatttagaggatttgtgatggctaaaagtcctcatctatttacttcagttacaccgaaaagaaaattcaaagctaaaagatgtgtcaaaattttaattatattgacctggaagaggtactcagcatattcagacatattccgtagcatggtcctttttgattctctatttctcctgcgcttctcataataactgaacctctgtgggggagcaaaagaaaaaaatgttagctctattcatcacatgaactactttgcaacaaaaaacaataatcccttgtcaattgttgctactttaaacatcgaacataacaaagggatagaggatagtaaaacttaaagcatgattacgtgatgaccagacaaactgaaacaagcaaactaaaaatagaatcaaggaaaaccaatcattttaataagcacaacagaaaattaaccacgctcgagcctctgcaatcaagtacaattagctaacaaagtcagcaaattactacctccgtttcatattataagactttctagcattgtccgcattcatatatatgttaatgaatctagacatatatgtgtgcctagattcattagcatctatatgaatatgggcaatgctagaaagtcttataacctgaaacggagggagtatcatattacaaaatgtacaaagtgcagatcgcaatatcaatgttctaaaaggtagtgcgatgttttgtttcaggcattccactttatagcgctcatgcggtaccttaggggtggtactaggtcaggacaaccgttccttcaatctatgcaaccttgtagaccatttttctaagaacactgagcaatacacaaaacagcctaacaatttacccatgggaacacacacgagcactgacaataaattcctcaattttcgcatgcattatcccctgcatgtcagttataacgagaatcaaattcaaacgccaatcagttccacatccaaaacccatcccagcagatgaaacgcaggagctacacagcgcgagctcacagatctcctcgcgcaaaaattcatcacgagcgcacgagaaataaaacgactgaattcgcaaggcttcccccacccccccaatacacacaggcgtttcatcgaacaccttaccgaccaacccaacccacaccttccggcagatcaaaacaaaaaagggagcaatctttttttcctcaacggagacgaggatccgctaacaaacacaacagagagaggggagggaggaaagaaggcggattacgtggtgccactgcgtcttgcgcttccgctggaggggaggggtggagtggaacgaggcggcggcggcggcggaggcggcgaggtggtgcgggccgcggtggccggagaggagagccgatttgacgtgggtgatcatcgcggcgggccggcggacggcgtcggcggcggcggcggcggcggcggtggcggcgagcggcgtttacctcctcatggggcaaaaggccgccggcgatggcgggggacctcgcgaggtgttgtggtggtggcgctccgtgagaggaggaacgtgcatgcttggaatggtcgctggtaactgggcccccagcccaaacgagccctacggcagggtaaggcccagtttgatttgcatcactgagcaaattattaccaaggattatctactctattataataaattaaaaggtaaatattagtttggagtaccctttaatgaatgttttttttacttttgaaccgggtaaatttaactttgtggtactttataccacatttaactattttatccatatgcatcaactcgttatatgttaagtcaattgtttaagtatagctgtgggagttcatcgatgagtaggagccgatctacttgaaattgtttatatgcttgataaaagagtcaggtagtccaaagtggaacaaaggtgagattattcgattctaaataaaaacaatggttaaagggttgatccaaagtaaaacactagtaataaaaggtgatccaaagtgaaatttactttaaatatttatctaagagataatttgttttattccacaaagtatatacacgcacacaccattacacgcgtaacatcacattcacgcacccacagatatgcccctaacacacgctcgaagagatggaaaccaacggtatattcttggtcttattaaaattctgttgaaagttccatatacatatgtgtgattaatttgaacggagagagtatataaacttaattttgtaaaaggatagacctttgtagcaccatatctttaaaaagggacgatatattatgtcatgttcgtttcatctagctgcggccagcggccgcggccgctagttagcagacacaatactcacaaggctcaaatgactcagagagaagtaacgcaagggcacacaagtttgcaataggaataatagccctctcaaggggagaggtgaggctatttatagccacagcacaaattctgtccgttagagcacaataaaagtgattttcagaactttcgaaaatcattttcggaactttcaaaaatttcagatctgagaaaaacagagtcaatgcaatttttcggaacttccgaaaagtactttcagatatttctgaaaatatccaaaacccaaaataccttatatagatttttggaacttccgaaaaatattttcagaagcttccgaaaatttccaggagcatatttggctcgcagacattttcgggaacttccgaaaatttcctgaaggttgaaatttattctgtgtatttttggaatttccaaaaatgcttttcgggacatccgaaaatttacagaacacaccaaacaaagaaatgcttccaagaaaaatagattttgagcacacgcatcactccttatatgtctatgcatcatccccctaatagtatggctttcctataacacaatgcaaggtaaaatatgcaatataccatttgatcattgtcgtattacgtcctgatatcgcattcaatggggtatgcatcacattacaacacgtcgaggacatatctaccttcacatttacttgaatagaaaagttagtcctccctaatcgaattgtaattaatcatcaaaatcatttggtgcctatatgcactttcaatctcacccttttttgtgctttatagcaatacaattagattacaagagagaatgaatataatagatgattttggtgcaaaggtttagtgaaagctctccctagaagtgtgcattaaagaaagtggagagctccccctaaatctttgcatccacatttaagctcaagagatacaaatcatttcatagcacatacatctcatttcatgactcattcatcacatgcacaatataagaaggaaataagaacatttgcaccatatgaatataacacataattgtcattacatctcacacatccataattaaacaataaagtcttataatatggcaataacttaaaatccacacatagtctcataaaaaaagccaaccatgttcgactaagatagctaaagctaaataagatagataggtattctctccctttggcatcgaagcaccaaaaaggaaggatgacgagacaaagactcaagcgaagggcgcctgaggaggatcctctagaggaggatagccatagccatggccaaaaccaaagaaatcatagtctgaaggtatcccagcaaaaggatcctcgatctcttcctctcaggctcatcgggctcggcctcaaagcccggtggggagggagggacatccacgtgaaaatgctcattgagttgtgcctgtatgttcttgatgcgccgagctgtcttcttgatcccattccgcattctgcggttctttttggcctctgcggcgcaaaggtcaaagagacttcgcagaatgcggaataagggagacggctcacgacgagccataggagagggacgctcacgagtgggaggaggctgagtggaaccccgaggaacacgtgccacctgagggccggtctcctcttccccttccccggaccaagcatggtccgagtcctccgcggaggatggagaaggagtgggagaccgatcccgagcgcgttcggacttgtgagtgagggacttgcgtgcaggcatcctaagtcaagaaaaagaatgacaataagaataaggagactaatgagatgaaatacaagcaatttgagacaagaatcatgcgaaaccaaggttggagggttcagacatgaattttcggaacttccgaaaataattccgaaaattttcggaagtttccgaaaatgcctagccgaacactacaactcagatcccgcacaaatcctccaacaaaaagttgtgaaattgaatctacaagtcttatggcactagaggaacaactccaccgaaggaaatcacaagatttaactcgaggggatttgattttgagatagatacctcaagaacacgaagaacacgtgaagagctcggtgaagaacgacaatctagcctccaagaagtgccccaaacttgctcccacgaggatggagtgaagaggagcgccagggagccaccagagaggagttggtcgctggagaggagcggagtcgcagaggaatctgtaggaaaaggagtgaaaagagagagaaaaagaacccacggattggaagaagattttatacccccgagatttttcggaagtatccgaaaattttcggatgtaccgttttcaacctctaaaaaaagaaaaacgttttggcattctctgtactttggctgtcacgcacgcacgcgtgggcgcgtagcaaagcaaagcagcgaatccggcttcactagtcttcttcccccccgccgccgcatcgatcccccttcccctcgtcttccttccctttcccccaatcagattgcttccagaagcctccttccccgcgaagcaaccaaccccttccggatcccgactccatccaaacccccatcccctcccctctcccctacgctcgaaaccctagggagatccatccacatgccgccccgatgaggtcgctccgccgcgtcctcctccagctcgtgctcctcgccggcgtcgccttccgcggggtccgcttcgacgacgccgccgacgccgccgccgccgcccaggggtcgtcagacctcttcgagctcccttcgccgtccccgactctcgcgctccccggcggcggggatgagggggcctcgacggagatcatcgccgcgccgtggccggggcgccacggcctgttcacgccgccgcggagcacgtcccagccggcgagagcggtggtccagccggccgccgacttcgggtgagcttcttggtccccctccctccgtcttcttccagttgcgatgctgttcaggaggaggctatggagtctataggaggtggatcgattggcttgtgcagcgggacagggtggggggggggggggctttgcctcctgttcttatccttggcttttggaggagcgaaatggattcccatcccgccaagtgttaaagagggtttcttgtagttagggaggcttgctatgttcctttgtcactttcttgctttcgtgctgcaatggagtggggaaatgcggggaaaagagagctctctagctgcttaggtcatgcatgatccatggttggaacagcatcttcttgctgctttggtagttctcactagcattagtaatgacatgactttgcttgattgcattgcacttcaattttagtattagttacgaattaatttatggaaatgagcagcttttgcacttactattcctagtataagaggtgctacttatgattcaaattgagctgtttggttcatttcttatgtgtgtactttccattttgtcccgccatttgaaattgcaacttatttgcttgtttttattgtgaacagctcccaactccagttttacgacaatggtacaattcaactagtggaccttctatcaaaattgcctcggtggcagttctccaccggaccccctctttcgaagcatatcactacttcgaaacctgatttgaactatgtcatataccttgatgggtcagaaacatcggaccttatagaagttcataatggcagtggtgtggtatgctttgcacaattgcgttagttctcaacatcctgtctagttttgctttgtttctcacctatcactggcttattcctgtagagacttccctggaaactggaggagtttattgctgagactccatatatacgggattcttttgttacgattggatcaaaggtttcaactacttttgtggtcaatgctgatagcggtgagatcatttacaagcatagcttgccagtggccttgaacgaggtaggtggccccctggttgaggaaattccatccaagttagatgctgctagaagtggtacaagtgctaatatcatagtggttgtgagaactgattattctatcagtgcatcggatcttggggaacatttgttcaactggacaagaacttccttcactgcaaattactatgcgaggtatggccaccaagacatgcttgcccaatcgtcctgtctgcgaggaaatattccatgcattaggactgagggtccaccaattaaactttatttacctgattcaagttcagataatgcaattgtcttgagacctgtgaacgaagtttctgctgtggatgctctggaaccacttctacctccaaagaagttaccacaacctgctggcgagtctaatgtggccttggatagtgctcaaaaccagactgctgacattgccctaggtcattttgtgcctgctgacactgaattgaccaacagtgtcactaaattttcttacagatggctattccccacgtttctcatgttgttgatcatggcttgtctagtgaaattggccgatgcaagcaaatattgcaggcaatttgtgattcgatttttgaagccatttatgcgtgatgagaaattgatggacccaagaggcaaatcagagggaacatcaaaaagaaggaaggcgcggaagaaagatggacttatcaatagcactcagatcttttcagcatctgataaagaggggaatggaactggtggatcaactgaggcacaaagtaataaagcacatgattcaacaaatgtggaactccctaatggcctcaatgggcgtcagattggtaagctttgtgtttacagtaaagaaattggtaaagggagcaatggtacagttgtctttgaaggctcctatggtggtcgggaagttgctgtgaaacgtctgctgcgctctcacaatgatatagcctcgaaagagattgagaatctgattgcatctgatcaggatcctaatattgttcgaatgtatggttttgagcaggacaatgattttgtttatatctcccttgagaggtgtcgctgcagcttggctgatctaatccaactgcactcggtaccaccattttcaaatactaagggaacagacattgaactttggaggcaggatggacttccttcggcacaacttctaaagctgatgaggtatgtgacaactggtcactggtgccctttcatgttgcacaccatgtttatcagtatatgcatgtgttgtttactttgagattaattgactaaggtcacgcttatgcatagcttaacttgatgcccttttgctaagaacactttgccaacaaccaacatccaccatttgctattacaaagttccttaatggctgatattatttgcctgcctattcttggtattgttgctagcgtgtccaccagaccaccactgatgttgcccttgtgaattttcatgtgcagagatgttgttgctggtattgtgcatttgcatagtttgggaattatacatcgtgatttgaagcctcagaatgttttgataagcaaggaaggacctctcagagcaaaactttcagatatgggtatcagtaagcgtttgcaggaggatatgacttctgttagtcatcatggcactggtaaggttcaaagttgcttgcgaatatgcaatatgagaaattactttctgtatcttttttatggtcaaggtcaactttcttaagtgcattttttagtcattgcgatgctctctctctctctctctaactagccatttcatccctgtcaacttactgcaggatttggaagctctggttggcaagcacctgaacagcttcgtcatggtcgtcagactcgagccatagatttatttagtttgggctgccttatattctattgcattactaaaggcaagcatccgtttggtgagtactatgaacgggacatgaaaatcataaacaatcaatttgatctcttcatagtggatcacataccagaagcagtgcatcttatttctcaactgttagatccagatccagagaagaggtaagaataatttggtattttgacatcgttaatgccctgaacatttaaaaaggcttcctgattttctgaatgcatttttttattaatgttaacagaccaacggccgtgtatgtgatgcatcatcctttcttttggagccctgagttgtgcctttcatttctacgagataccagtgacagaattgagaaaaccagtgaaactgatctcatagatgctttggaaggcataaatgttgaagcatttggtaaaaattggggagagaaattagatgctgccctgcttgcagacatgggacgttatagaaaatatagttttgagtccactcgtgaccttctaagattgatcagaaacaaatcaggacattacagagaattttcagatgatctcaaggtctgttgctgcatttcttgttttgtttgctttgttttagttttcctgcatacagctaaactatgggtcaaacaagaggtggtgctgtagtatgcatgaatgctgttgtgtgttcaatggatgttcatattagttgctgtgcatgaatgtagtatataggaaaagtagttagttgcagtcatgaatgttatattagttgcttctgtattatcttagatagtttcttagtttacttcttttatgtaaggttcaactaaactatgtagtgtgctagtttgtgatgattttgattctacagtcttatcttcctcacaagggtgggcactactgctgacctcctcctaggagttaggatatatctctgccttttcggttttctggagaatattaaaagtttgagatactattttatacattttcagttttctgaagaatattatcaagtttgagatactacttacagattgtgaccatgcaatcatcatcccagacgctaacatattcatgttaataaaattccaggagctacttgggtcgctgccggagggatttgttcagtatttctcaagccgattcccaaagctgctaattaaagtctacgaggtcatgtccgagcattgcaaggacgaagaagctttcagcaaatatttccttggaagctcggcgtagctgtaacctgcaggaggggtgaaggccctgccctgcctagtgtgtacactaacactcttctagcaaaaatgtatgtacatgtgatttgtaccatatatcatagggtaaagaaagttcagcctgtacattgtattccacagaattgtgtattacttatagtaaatcaaatcttttacctgactatatggactgcattatcaaggtttttttttttttcaattttgtttcgtcttgtgattgtgtgctgttagtccccttgagttgttccagaagatgaattcatcctattcatgtacggagtacatttgcaagatttgattccgttgttagattcgtttagacaggtgagttcggcttgttaaaaatcatgagttggtctatgtcagattgtcagcatgcaacatctctagaactggtgtaattagaacaactggtgtcatatctttttgttttctcgttctccttccgtatgttccatcatgtgcgggtaaccatagtatctgtcacgtcctgataaattcatcctgaaataaaaatcattccctaaaaggaataatagaattaattaaaattcgaaaagaaattggcaaacattaaaatgcgtacaagaaaattttgaatgtggtccagagaatttttgttaaattctctttggtctaaaaggagccctcaaattttacttgaattttcagagcaccggaaataattattaagcaacaacaaccttgatcaatgtttattaaaaagaaaaagctaaaaataaatcctccttcctcctttgggccaagcccagcccaaagtctccctctcctccctctctttccttcctcctcccggcccacctcttccctccccctcccagcccagctccctcccctcccctctctctcccgggcctgcctctccctcctctcctcctaggccgcctccgggcccaagccgagcggtgccctcccgcccgtgccgcgcatgtgcgtgcgctgaccgcgcgcctggccgcgtgggtcccacacgccgggtcgtcgtcctcctcccgcccagcctccttcctctctctctctctcccgtgcaaaccctagcgccaaacctccccaaaatccaagcgattcaaaccggggtttccaaaattgattaggggttttaatccccattgattcctctctctttcccccatattttccccttgattcatggccccaatcgtcgggaacgcccgcgccaaccccgggcaccttccatggccgccggccacgaattccgccgccgttccccgtctctcccgtggccggctccctcccctctcctataaaacggaatctcctcgctccgttctatcgttttagccccttctcgagctcccccacggccacaccacctctccccgccttcccttctctctctccggcgccggccgatctccagccgcccctgccgccgcgtcggcacgccggccggccgtgccgtcacctctcccggcgtcgcagctgcctcctcttccccggcttcgcccccgtttcgcggggaaatcatcggagacacgtcctcgccggcaaaacagtggcgttgccgccactgtacctccttcagtcgcctcggtcgccgcgccagagcgtcggccgacgtcgccgtctccttcgtcgacgtcgcagcatcgtcctctcctccggctgctcctctgtttcgctagaacaccgccgtgccacgccggcctctccatccgcctcgccggaatttccccggtcggcccttcctccacccgtgcgccgtcggccgcgccaccaccacctccggcatcgcagcagcaaggtcgccctcggcctcgcctccccttcgaccgaaccccgccggtgttcgtcgtcgtcgtcatcgttcctcctcgccggctcgtcgtctcgcggcgccgcctccgtcgtcggattcgcagcggcgtgttccacaccgtcctcgtctccgtgcagccgctgccggctgccctcgttgcctcctcgccggtcccggtcgtcgtcctcatcgtcgtggcgttcgtccctccgtcaagccgttctcgtccgtcgtccgcgtccgtcaagtgtgccgctgcagccccgtcgtcgtcttcgtcctcgcctccgcgtcgccaagcgttgcgtcggccgcgtctcgccttcgtccaaggatcgccgctgaagtcgtcccctcgcctttcgtctccatcgttcctggccgtctccgccgcgcccgttcgtcgttgtcgttccctcgcctcgtcgcgtggtggtaaggatctctccttcgctgccccgtcctcgtcctttcggtgtcgcccgtgcccgttgtgcggttgtcgaccccggtactcgtgtaccagtgtcggtagtcgttcgcttgtgcgtgtggtgaccgtgttagtgtgcccgctcggtagccgcgtggtttccacgtgtgcaggccgtgtggtgtctagtggagtccgtttgtcggccactcgcctcggttgagacacggggtccgcttccgtcgacctgtggaccgtctctgtgtacccggtctgccgtggtcccttaggttgacatgtggggtccgcatgtcaacagcgcagccttcctgtcttttccaggctagcgcttacacatgttttataattgcaaaacctaatcacaataattcataaatctccatgtaacagcattaaacttcagatgatcatatcttggtcatacgaactctgaatcgacccgttcaagtctcctaatgtttgttataacctaaagaaccatgtgctttcatttttatgtattgttattgcttctttataggcttgtagctttgcttgtgtgcttcgcgtagcttctgtcgttccggaggttcccgaagcgtggttcgtggtcgtcgccgaaggttcggaaggccgttctctctgagcaaggcaagtcacatcatccttgagcatattgaatcccagtttgtaaaattattttgatttaaattaatgcattatcgctttatttaaattcccgcgttatcactgttttatttagccatgcctatttatctttgttatgaacttatcattgttgttattgttattattaccttgttcaccctaggataaacaaaaccccaactagtgagtactctatttatggttccactagtacgaacttaggtagatgcttcgctggttaattaggcaacattaggtggttttataactttagactttgggaattctcatatcatttggacactatggaatggttggcttatgttggaattggacacacacctccccctctattcaaaacccccaaaatggttttaggctgggctcgaggtgcgtggttgggttttgttagtcgtacctcgggttctataaggattaagctcgggcctctgttgcaaagcactactgtacttgcacatgtctagtgggtaaggcttagtttgtggctcagtctagttataaacaaaggtacacggatggagatggacgaagtcgggggtcgatggacatctctaggacaaatgaaggctacacgagctgtggcccggtagtcgagatgtcatggcacagggctggtgtcctgctgctagggactcaatcctgcctgcctgtcccggaggttccggccgtaggcggggctgggtcgatactcttgtttatggctaggatgggttggaactatgtcacgtcttccgtccgtatgccgtggtggtatgtggcacgtggttacacgtgaggaagatgtgtcttgtgggtaaagatgtacacctctgatcagagtaaatctattcgaatagccgcgccctcggttatgggcaagcctagcaatgtacccaatttagtgttttaattcttaaaacctgcttaacaactaaaatgtggaatggttggcctgggttggcttgggacgagctgggacccagggtcgggttgccagttcggtctgaatcatcgtaggccttgggttaaggcaggttcgtcagggttcacggctttgattaataacactatgtagctctaggatcgtctttacaaagtagctttgggcaactaagtgacttttaaatgctgtttactgcaaaacttaacccctatattattaccccttgtacctccttgcattaatcatgtatctgccagtgtggcttgctgagtactgtggttgtactcattcttgcttaatctttccccccttcaataagagaagctttggagaagaagtattaggtggagtcctggcttataccccagttgagcgctgtcacaccccgaagttctcctcccaagcctaaaatttaatttataagagaccctaagaaaataccggtgcaaagcaagagtaaacccttttaaatcaatgcaaataataatcggagtgggcatgtggaatttttcttgagttctacatgtcgaaattcactaacaggatttttagtggaattttcagagcgctcgaaataattttacccaattaaaattgagcaagcaatattttaattccagggaaaattcttttctcctttttctttttctttttcccttccttttccgaatgggccgctggcccattctctcctttcctccccctcctccctgctgggccggccacaggccgaggcccagctaggccgccccgccgccctcctctcccagggtctccgacaagtggggcccacctgtcgggtccttccccaacctcccgtcgctcccgccgcgccgccgcgcccgcaaccgcagccgcgcccacgtctccgcctcctccgggccacgtcgaccacgcccgcgcgtgcgccgcgttccccgcgcccactcccctctctctctcgctcgcgcccgcgcccgagatggccgggattcgattttcgaatcccgtctctctctcctcccccacttcccccacgttggccggcgaaatcctgcctctcccggccacgtccggccccctctctccctatttaagctctgccatcgccccttctcgctttttccccatttcgccgaactctcccgagctccccatcgctcccgcgccgtgcaaccacccgccgccgccgtttccgctactccggccgccgctagccgccgctaggctcgccgccgcaccgcgccgtcgccgccgtcgggtttgcgtggccgagatccaccccgtccaaccctccttcgccgaggtccgccgccggagcgccattcccatcgtgcgacggtgagggttgccatgtccgccgcctttggccggcattcccgtctcatatggcccctctcttcctctctaatctatttcttttcgttctntaggtcgtcccggtcgccgtccgccgcgtgtcgacctccctccgtcgctcctcgtcgccggtcgccgccgtccccttcggtgaggactccctcccctttcttttccttccccgattccccgtgcgtcgccgccgcccgcgctcgccgtcgccttcggtcgttgccgccgtccgctgccgccgctttcgcgtcgcttttgcgccgtcgcctccgccgccggatgccattgccggcaacgcgttcgcgcgcgcgtgccgtcgccgctagccctggccggccggtcggctttgatgccgagccgagcctggcggccgcctctatcgcggcccgtccgatcggcccgaggacgatctgggccgtcggtcccgtggaccggcggtggaccacctgcgtggtcccggtccacggtgaaccgccccccctgagccgctgaccagtgggcctcgcttgccggcgccgcaccctctccgtgctgacgtcagccctgggaattattgcgcaataaatgatttaaggtttttttatagtaataaacacaatgaatcttctaaaattcataactaattcatccgagctccgtttaagcccattcaagtctcagtaaatcaagaaaaatgtgtagaatccattaaaaacggttttgttccctgtttcagtagtcttatagcctgtttgcaatgtttgccttgtatgtcgctagattccggttcctccgacgctccggtgtactttgaaatagtcgccgaggttcctccagcagcagagcaaggcaagtcatgcttgtcacttgaacatgttgatcctatattgcaaatgctctattgttttccttcaaatactgcatcgttttataatgttactaaggggtgtttacctattgtcatagccatgctattgttgtaccatgtccctttgtcagcttggggttataacatgactagagattggactagggattgcttagccatgcttag

SEQ ID NO: 23765 - DNA, 13331 bp, Oryza sativa
  unsure (1)..(13331): unsure at all n locations
aactccccgtccgcgccctccccctcctcatgcctgggccgctccgtcctcatcgccgacttcccccacgccggcgggtaaaaacccctccctctccctctccacccaaaccctaatctgcctgtgttcaccgccttttgcgcttcctcgcgccgtttggtttcccacctcaggaggggcttggcggcggcgcgggacctccggcgcggcgagctggtgctgcgggcgccgcgcgccgccctgctcaccagcggccgcgtcatggacgatgaccccaggatcgcctcctccgtcgccagccacctcccccgcctctcctccgtccaggtaatttcatatgcctatgtcaggctgtcttcgaattgacttgagttgttggatggtttcgatttggagtgcattgctctcgttgtttccgcaacagtggagtgcgttgctcatggtggtggtaggttaataccatattaaatctttggatgcaccggagaattcgcaaaatgtgccggcacgataaaggcatcatgaatactggagttggaataaccatatgcttctcacaataaatcttgtgaaataaatttgtgcgaagaggcacggccttggctttgagaagaccagaaacaagtctggccttaagcgcaccgcagttgcaggaaccaaatgctgcagacagttggtgtgctaagagcaggtacaatagcaggctataagccagctgcaaacatattttaaggagataaatcaggagagagaagagcagcgggctacagatttgtagccagctgtagcacggactccaagacgcagtgtgtctatgacagttggggctaggtattaatagtgtagcatgtaactattgtataaatgagctattagattggctatagatgagttggagttagtagttggctaaactattgaacttgctctaatccattagattggctctacatatgttgaattggtttcactattatgtttcagtttggacaaaaagattggatggatttggcaattttggggagggtaaaaagatcacactaacacatactagtaatttactagataaaatgaaaatgaaaatcttcgacacaaataactctatcgtgatgtcttgatgattctattttttatttgacttcgaaagtgtcaactcaatcttggcctttctatgccccttttgatcttgtaagggcaatgaaagaaactttcatgcttggtctccttatcacatcttttcaattgcttcaatgctttcactgatattccctttgtatctgagcagaccctgatcatatgtttgttgtctgaagtgggaaaagggaagagttcaaattggtatctatatttgtctcagctgccctcctactacactatcttggctaccttcaatgattttgaaactgaagctctccaagtacaactcggtagttctgtctacaaaattttagttttccatttcgattgcttcatgttacattcagcttacttcttttcaggttgatgaggctatttgggttgctcaaaaggctcttcgtggaataagatcagactgggaagaagcaacaccactgatgaaagggttgggatttaaacctaagcttttgatgtttaaatcatggatctgggcttttgcaacggtatagttttttgaattttagctcagtttataccagttctctttgttgtttgacataccagctttgctgtctagttttttgtaagggagtttgtcgtctagtttagttactgcatagaatgaaagtaatggaactcaccttaccttttgttttttaacatggctctgagttttgtaacgttacatttatatattccttgcacggggatagcctttctctttcatatttgacatgctagctttgtagccactacaatgaatctctgctgactcaagaattttataagtttgttagtcttaatttctgttctatattttcatggtggaaaggtatgaggtttctgaagtttcttttgacaacttgaaggtatcttcaagaacattgcatatagcatgggatgatgctggttgtctatgtcctattggtgatttgttcaattatgctgctcctaatgatgacaattcatcaccggatgaagatagagatgatatgatgcatcaggagacaaataagatgttggaccagacagattttgattcatctgagaagttgacagatgggggatatgaagatgttaatgaataccgtctgtatgctcggaaaagatatagaaaaggagagcaggtttcttctgatatttgcctaaaatatatgcccttttttgtctataggatgctcatgttctcccgtatcacattatctgccttcttgttgttctgtacttttgaattaaactttgtcctttcgtacaggtacttctggcttatggaacgtatacaaacttggaacttcttgagcattatggttttcttttgggtgagaaccctaatgagaaaatctacattccattagatttggatttatgcatgatcggttcttggccaagagattccttgtatattctgccaaatggacatccctcatttgcattgctgtgtgcattaaggctttggacaactcccagaaatcgtcggaaagccttaagtcatcagatctactctggatcattgttatctgttgaaaatgagctggagattctgaaatggttggtcaagaagtgcaaggaaactttgcagcaattacctacgactatagaatttgatgataatttgctcgtccttttatgcaagctacagaacagcactagctgcataacagaaatgaaccggtcaatctttgagcaagaatttgctccattcttcagatttcatggcttcaagctggattgttctatacacagtaaactcccagttcgtcttctacgatccctggaaagatggggattagctgtccagtggagatgcaactacaaaagaaccctaaccaagtgtattgtgcactgtaaaagtttagttcacgagctttcgttgcaacaaaatcaacaatagctcaaagattcaagctaactatgttctttagaatgcagaagttcttgatacaacaaaaatcaacaatagctcaaagattcaagctaattatgtttttttaatgcagaagttcttgatacatttttgcttaacagcatgtcaaattgtcaacactcgatagcagggcgaggtgctttcatagttccatgcatcacactttttggggttgcatagtttaagcataacaagcgttctgtggaatgccttctgtggaatgccgctgagatactgataattgattatcaggcatgcatatgatcttgtcaattacctcattcaaagtgtttttatggcgtgcttattttgttttctttcactgcttaaacagttatttttatgatgttgcaagctttttaaaacacaatactgtatgtaattgggagtttattttttgaagtgaactttggatattgcacatacaaacaaaaacttatgtattttagaaattatttaattttcatctaaaaagagagaagttatttaatagcatgctttacgattaataacaaataaaaatctaagaggctctacattttgctatcgacaagtgtccggttttacgaaatgttatcgatgaaatcaagttatacacaatggtatggtacaaacgtctttatcttgtttttgccaccatcaggtttctgtcactttgacattagtttgtttttgtgattgtggacacgcctgacctgaggcccgatgtcctagcgctagcaggcacagttggatttattttctgcatacgagtacccgagggattttagcccattcttacatcttgccctatttgatccatgatagtagccatatgtccatatatatgctattgtgattggaaccctagctggagcccctcctaatccccctccctccctacttggtcccatttgtagtctccctcccacagcgacggccattgcagcggcgcagatgggccatggacgtcgccacgtcgggccatggatgcatagatgaatatcttaagatcatttgagtttgataaatgtattatgtcaaatatgtggccggtacccatcggtttctaggagcttgacgggcacaagcgtagttctatgttgtgccatcagaggtgtcaggtttgggccgggcacaagtacagatatattcgtgtttgacctgagcctaacccaactctttgccatctctaatcctggcactattgaacaaacctaaacgttttggatgacctcaccataaagaccaacatttaaaaaggtaagtggggaccacttcaggacccttgattcttcccctcccagctataaataccaccctagtctaggactccatggtgcaaaactctaagccacagagctagcgacagatagaacgcctgcaaggccaggagcggaggtgctctttgaccagttcgaccgcacgctctcccttaggcttcaggccaaggtgacaatacgctcacctcaaaccccatgtttccatcgttccctttctttttcctacctaattttttgattcttcatgttctttttatgtggatccatgttgttgttcttggatgatgcatttttgcatcagaagtggattcctctcgtttagtttgatatgattttctcgattatactttagaagggttggactgattagggttttttttgttttgtatgatggaaacaagttcttttttttcctcttgtttttcatagtcctcgttggttcctatggtggtttttcaatcgtctaatatatatttgggaatcttgaatttggtacatagtttgtttgtgtcgattggtttttttatagatctatttatctctttttttttggaagtaaaactcgagaggaaggacatggtttgtattgagatgaatagatctatgtattgttacggttgtttgtatgttggttatgtcgtagaaatgatagcttggcttgactcttaggtgaacgagattatgggatatgtgagatagttatattttcacggtattagattgaacaaggatgcaccaaacggttttaaccaaagatgttggaaatttggagggcaacgacagccatgcatggtagatgaggccatcataatatgtggtgatggtggtagcaaaggtgaatgtaatttaggaggagaaaacttgcggtaatagaatatggatatatgggatgaggaaattaattgttgaaaaatatggtgacggccacggtggtggcggcggcggcagtggaggtggaggcgatgatgaagagattaggaaggggtggggattttaaggttatggaggggtcttgttgggccgggcctaatatccatgcctaaaacggtaggttcacattggtcttgggttatgaagggttacaaatctcaaaggatgatcaaatggatcaaaatacactcgaacaaaaattgaaggcccttcatttatagaaaattataaacaaaggactcctgatatatgacagtagcctaaaatatactccttcatttatcaaatgagctagatggattagattgtgggatatgtgaggttgtaataaattcaccatatgttgtagttaaggtgtagggcagatggagcaacaccaaacatgtactccattgatcgaaggagttacgcaaattaaattatcattatattagaaaataatattttactgtctagttataataagttaaaaggtgacacaaccaatagttttggtacaaggatggtgcaaaattagagacaaacaccatgaataacagatagaggagactaggaatgtagggagatggtcttttgtgggttgagcctaactttttactcctcgtaatagtgatctttactagagttgtcgtgttagggggtcatgatgtatgcaaacatcgtttcattccgctatagtctcgtacaccctatgtcacatagtttaatcactaataaacacatgcataaaactatttattaggaatatataactgaccacataaatcccaagtccccaactaagcgctgccatataccaaacatgccatacatccaggaaggcgaagaggtttgacttcacatattgacttccttcccttcatttttcttttcctagttaattaattaattagttcctcaaccaagatgagaaagaacaagaagaaagacaccaacataaatttgatgttgacgtagtcgtgccaaccgtgcacacatgacgtctttagatttggaaattactggaaggccttttcttcctcttctttttttttttgaaagaaacttatttggaacttggaaggtcttttcgctctttaggaaagcgcgcccgcttccatcccagaaaaatttccacgaaggccacgacccgcgtcgcgcgcgcccgtttccatcccagaaaattttcctgtataaataaataagacccacacgaagtccacgaaccgcgtcgcgtgggacccttccagaagcagagcccttcctgtagtcgtcgtcgtcgtcgtcgtctcctcttcgcgttgggtttgattcctcttcttctcgtctcccgcagcggcggccgtcgatcggaatggcgagccgaggagaggccagcaccagcgccaccagcagcagcagcagcagcccggcgggtacggacgcggcggcggcggcggccgcgggcgcggccgggacggggcgccgtactcgggtggtcgtgggcgcggtcaggacggatcgtaccctggcggccgcggtgggggctatggcggtggtggtggtggaggtgggccgccgtactatggcggaggaggtggtggtggtggaggaggaggaggccaagggcgtgggtactatgatgatggcggcgatggccgcgggtaccagcggggcatggagggaggcggaggccgtggaggttatcgcggggacggcgatggtggctacggacgaggcggtggcggttatcacggggacggtgagcgtggctacggccgaggcggtggcggtggcggtggaggcggcggcggctatcgtggggatgacgagggtcgtagcagctacggccgagcccgtggcggtggcggtggcggtggcggctatcatggggacggcgaggctggatacggccgtggacgcggcggcagggactacgatggcggccgcggcggcggaggaagaagaggaggacgcggcggcggtggttcgagctaccaccagcagccgccccccgatctgccccaagctccggagccgcgcctcgccgcgcaatacgcccgcgagatcgacattgccgcgctccgggcgcagttcaaggggctgaccaccaccacccccggcgccgcgtcgtcgcagttcccggcgcggcctgggttcggcgccgccggagaggagtgcctcgtgaaggtcaaccacttcttcgtcggcctcaagaacgacaacttccaccactacgacgtaagcatccacactactacagtccacagcatctccattcccatctcctcgtcgatcacctcatcaccgtttgttttgcaggtggcgatcgcgccggatccggtgctgaagggcttgttccgcacgatcatctcgaagctggtgacggagcggcggcacaccgacttcggcggccgcctccccgtctacgacggccgcgccaacctctacaccgccggcgagctcccgttcaggagcagggagctcgaggtggagctgtccggcagcaggaagttcaaggtggccatccggcacgtcgcgccggtcagcctgcaggacctgcggatggtcatggccggctgccccgccggcatcccgtcgcaggcgctgcagctgctcgacatcgtgctgcgcgacatggtgctcgccgagcgcaacgacatggggtagaaagaactcgatcagctgcctcgattgagatctcttgaggatttcgtaaactgggaattgatgaattcgtgtaatcgttttcgttttgaatgtgcaggtacgttgcgtttggtcggtcttacttctcaccggggctcggatcgagggaactcgacaagggcatctttgcgtggaaggggttctaccagagttgccgggtcacgcagcagggcctttctctgaacataggtcagatttgtgtttcagtttgtttctgaacttgtacttgatcgagtttacctgcaattcatgagaatgattaggtgatggcatttttttttgcagacatgtcttcgactgctttcattgaacctggtcgggtgctgaattttgtagaaaaagctattggacgtcgaatcactaatgctattactgtgggatattttttgaacaattatgggaatgaagtgtgtaatccaaatgctttcccccatgatttgtttgcgtggagttgatcttgacttgtttttccgtgcttcgtgaatttgcagttgatgaggacccttaagggtgttaaggttgaagtcactcaccgaggaaatctacgcaagaagtaccgcattgctggcttcaccgagcagtctgcagatgttcagacgtaaggagcctagcttaccttctccctgatcttaacagtttctgtgtaatgttgctatttgaattctcttgcatagcttaaatcttaccaattattttgttggatcccaaaactattaaggttcacatcatctgatggtatcaagactgtcaaggagtatttcaacaaaaaatacaatctgaagttagcttttggttatcttccatgcctgcaagttggcagcaaggagagaccgaattacctgcccatggaggttcgtgcatatacttcacatttaactgaaatgttcgattcttttctacatcctctgcctttacacatgctaattctttgtgttgaaatttgatttggatttcagctttgcaatatagttcctggacaacgatacaagaaccggctcagtccgacacaggtttccaatctgattaacataaccaacgatcgtccttgtgaccgtgagagctccattcgtcaggttcctgcttatgcttattttctgtgatattttgtcaggtttttactgtgtgggtaaatacgttttttatttctctctaacccatctttcctttttcttagactgttagcagcaaccagtataacagtacggaacgcgcagatgagtttggcatagaagttgactcttatcctactactttaaaggctagagttttgaaagctccaatggtaatcctacttatttttttctcatcagtatctccttttgtttttcagtttttccgtacttctgtccttacatttgtgagtaatgttgtagctgaagtaccatgattctggaagggtgagagtatgcacgccagaggatggggcgtggaacatgaaagacaaggtacatcatgttgaactgaaacatttcttaaactttttctataatgttttgtaaatttattactatatcacagaaaatggttagttttagtgatggggttattgttcttcatctctctagttttcaaataaaagtattgatgactattactgttccattttgacacctaacaactcttaaattattaaactgatgaactaccgaagtttcatgcctatatgtctaagatacaatacacttcgataatactactatagcataagttttcttttttctaaaagagatgagtggtctcgatgacaactatttacaaatggatggagtacctgtttattgtctatagttgagtgttgatatgttgccagacaagctacagttggttcagagtcttggttccctcaaacttcttatttgcttaaacaaaatctgtagagctcttgtggattgttcccaaaaagagaaactggttggaagatcctggtctaccaaccctgtgcaatattttgaagtttgcgcaaatagttttaggaactgatttctttttaggttgtatactctgtctattccatttacccccttctatattcttgtcttctctccacactgtttgaacaattcttttgatgcgcagaaagtagttaacggtgctacaattaaaagctgggcatgtgtcaacttgtgcgagggtttggataatcgtgttgttgaagcattctgccttcaattggtcagaacgtccaaaataactggactggtaatttagcttttcatcatcctctttttgctgttttgatcattttatttgatgtactcttagctaattttttactttgatttcaggactttgcgaatgtgagccttccaatattgaaagctgatcctcataatgttaaaactgatcttcctatgcgctatcaggaagcatgcagctggtcgagggataacaagattgacctcctacttgttgtaatgacagatgataaaaataatgccagcttatatggtaactagcatccaaattcgctctaatgtgtggaataatattattcattaatgtctctttataggttagagttatattggctattcaatatagtatcttcttctaccatgcatctactctgttataattttagccccaacaaagttcttaaaatctctctgattaaattgatgttttttttttgctttttttaaaggaatatgcaagcccagtttaacaaaattagaattcgaatagcaaatatatatttcttgtcttgaagaaaattctcacttgtgccatgcctgatgacacttataaccacaggtgacgttaaaagaatctgtgaaacagaaatcggtgtattgtcacagtgttgtcgagcgaagcaagtctacaaggagaggaatgttcagtactgcgcaaatgttgctcttaagatcaatgccaaggtaaacttgatcacctcccagaatctttgtttcgcaaagcttattgaaccacaagattcaagatgtaatatatattcaccatgtctgcaggctggaggaaggaactcggtatttcttaatgtagaagcaagtttaccggttgtttcaaagagcccaactattatatttggtgctgatgttacccatcctgggtcctttgatgaaagtaccccttccattgcttcggtaagatatatatatttctttctatcagaaaatataattgcatctattactgtaacagctttcatctgacggggttccatttaggttgttgcttccgcagactggcctgaggtgaccaagtataattctgttgttcgtatgcaagcttctcgtaaggagattatacaagatcttgatagcattgttaggtgagatcttcatgctgctcagctaaattctagaattgcatgccagtgtgccaccatttggcagttctttaatttctaaaatataaaattgcagggaacttctcaatgcattcaaaagggactccaagatggagccgaagcagctcattttctacaggttcatattctccatgtttgtttttttttcttaattgtacgtgctcctttgttgatcataccgagacactgataattgtcctgtttcatcatcagggacggcgtaagcgagggtcagttccagcaagttgtagagagcgaaataccggagatagaaaaggtataagcaatttttttcttttcctggttacgactctccatggttgtaatcttgtatttttttcctgctctatcaatagaacttcgcaccgtctcgtgcgagtcgttcaaaaaatttgatgactgaacagtgcaaaacgttttaaccatctggttaaaaaatatttgttatcgtaattcactgtttcttcaggcttggaagtctctgtatgctggcaagccacgaattaccttcatagtggtgcagaagaggcatcatacaaggctgttccccaacaattacaatgatccacgcggcatggatgggactggaaatgttcgtccaggttgaaaatcgatggcctctcccgtaaacgttgtttaattaccctgtttggtcaattgcctaactcgtttttcttcttctgtaaataaattccaggcacagtagttgatacagtgatctgtcaccctcgagagtttgatttcttcctgtgcagccaagccgggatcaaagtaagatgcctattgcctatagcacgctgcagagtacaaatgagtgaactgtcctctagtctaattacttaatacaagagggtgccctaacgatgtttaaattgtaaaattgcaggggacaagccgtcctagccattaccatgtgctgcgcgacgacaacaacttcaccgcagatcagcttcagtctgtcacaaacaacctgtgctacttgtaattgtgctctgctcttctttgccgtgattgctgatgtctgcattttgcactcgcgcggttgaatgatgacttctttttttttgctgtttactcgacagatatacaagctgcactcgctcggtgtctattcgtaagtcacttctctcttagctatgagctctgttttatcacagaagagtattcaaataagcttttctcctaaaaaaccatgaatgtctgcatttttgattcttttctcctaaatgtccattgtgctgcaaagaacttgaagtttttgtacagtcataagtcgagtgaaattctatcaaactcaagggtagttaaataaatgatagaactattgggctttccaaagaacatgaagagggatttaggaatgcatgaatggaactagagttttttttttaagatagtcgataaagtccggcctttactactgctacaactatctcaatttgtcatgctgttctgtcttaacattgtcttgtttgctgttgcagcacctcctgtttactacgctcataagctcgcattccgcgctcgtttctacctcacccaagttcccgtcgccggtggagatccaggtgctgctaagttccagtgggtacttccagagattaaggaagaggtgaaaaagtccatgttcttttgctagtcgtccttgtgcccccctgaaactgaagcctggagccagccggcaagctctggaaatgctctgaataatcaaacttggaagaataagcacctgcncaggttgccattcgtttccatgtggcatggaggatggcatcctgaaaaggatattgtcatgtttgtgtggtttttaaacgacattgaagtttatctccggtgttactatctcagcactttggatgttttattttgttatgtctgaagatatagacacaaaacttcatttttgtttctgtttctggtgattctgcttgccgtttatttttctggatatgcaagctaatttatgcgtaccacaaaattgttttttaaaaaatataaaacctcaatttgtatttaaccatctaaccttggcacctcgattgtgtttagtataaataatttctaaaatttaaattcttta

SEQ ID NO: 23766 - DNA, 27128 bp, Oryza sativa
caaaattttaaattatttttaaaatttatttgaatataaggaggttaccgtggtttttcttttaccgtaccctttcagtaagcgcggtaaccatgcggttaccaatggtttgggaaacaggatgaattttctagctggttaatttgatattgatttgtcttcgaaagtgatatgtgtttaacttgaaatccattttagaaatttgattctgtttgagatgaaaggagttttgagcaccactgtaccatggcacaatttctgtaactgaaactctgccggcagaggtcattacattcaaggtctaattatctatcggtaaaggcttcccccgaccattgtccgacagaacttgtggggtcatggtgtcatgtagtactcctcatggttagggcatgcagcttgaaataagtgctaagtacggtcgatcgatcgattaatgcagttgcataaatcaggacatacacatccacgaaggctctacatattgagtgttatgtttggtgtacacaaaaatgtcattgtaccgtggaaactgtattacgataaaaccttttcttttaaaaaaattcataacatacagacagggcacatgggtactgttcttttgttttaccgtaaggttatagttttcagataaagtgatacttatctaaagttatagcaaattagtatcctatggtttgaaggctatctcatgtttacttaattatatggacgaggcgtggttgttacaataaaatgaccaaatctctcttcgtaatcgatatactataccttgaacgtaaatctaatttgtttactttggacatacaatataatattgcaaatcatgaaagggtctgtagcctagtagttacaggaggttccgtagcacctgaggtcctgggttcgactccctataggagcgaatttttcaggatttaacggcgttgcgctttcaatgatttttcaggattttaatggcgttgcgctttcaatggtagggcgaggcgcgagtcttcgaagatgttcataggggtgagtgcgcgtgcgttgtgagtttctgtattgtactgtgtaattctaaaaaaaggtataatattgcaaatcgaagtgttttctttcatactagtatgtaaaaaaccaaatcctagctatgtgtgtccagatttctagctaggattttttttttacggagagtacttctttaactagacaaatcattttgtattgggagttgtacctgtcactagtgctggtaaaattctatccattgaatccttaaaattcacaaatcccagttatgtgtgtccagatttttagttaggatttgatttttttttacggagagtacttctttaggcagacaaatcattttgtattgggagttgtacctgtcactagtgctggtaaaattctatccattgaatccttaaaattcgtatattagagatacttgccgcgtccttgaatagatatcatttcagagtgcatatatatgtagtgaaatttaaaatctttgccccgctccccctaacacgtttcgaattagtacactaaattcaaatgtgcatactaatgaaagatgacaaagagacactttcctggaccacatcacactactacatgattgattttcttgaacgccccccataagtgaaattacacggaaaaatagagggaccgacaccagtttatcacccgcacaggaaaatcaattttcgtgtacgggccacttaacagacccacacgcaaaaataatatgtgcaggtctgctaagtgacatgcacacgaaaatagcccaccccacaaaaataaagtggctccctccacccggctcctcccacagacccacacttatcctcatccctcccacacttctccctctcctcctcccctcctcccatcgcgctctccctctcgtcctcggcgacggcggtgccctcggctagggtggcggaggcggcggcatcgactacggctcctcccccctcccatcgccctctccctctccctattgtcctcggcgacggcggcgccctcggctagagcggcggaagcggcggcactacggcaacggcatcggctacggctcccccctcctcccatcgccctctccctctccctctcatcctcggcgacagctatggctaaggcggcggcggctgcatcggctaaggcggtggcagagcgtatccgtggcagaccaccgcggggaggccggatccgtggcctgccaccgcggggacgacggcgacgggcttcgggaaggcggcgacgatgacggcaggcttcgggaaggcggcgatgacgttgacgatgttgattttttattagggttcgtgggtggattttgattcttttcccttttttattattccgtgcggttggtataacatgaccgcacgggataatcgattatcccgtgcggtcagcccgcccgcacgcaaaaatggcgatttttccagacgaccggctgcaaacgggccggacccccgcacgggataatccaaacacccgcatggaaaaatgggtattgtagtagtgtcaaccaaaaaggagatacattcttcatccaaaattgacgaagattttcatgaccgttctaaacttcaagcatgcaaaaatgtatgaatttcttgtcgttatcacaccttaatttgttatatgagtatattatttagataatggataatccgacgtttacttcaaatgaagatatagccactcttattacaaagttcttagataaaccaaaagcaaaagttcaacccaatcaagttgacgagaagatatacttaattaaccacaatcaaccacacaaggagacaatttgttcaggaaaacaatcctattattatatttatgaatatatatactgagattggagagtgagataaagtgatatatgtgagtgcatcaccactacagattctatttttcaatgcagccaaaatcgattttttaggcgagtgggtggcccggtgtctgtgaaaaatcatagttttgcatgtgggtagagacgattttcgcatgaggtcacttatagcgaccacacgaaaaaataattttggtgaaacaaaaataagattccaaaacaaaaaaaaatcagtcgaaaccctagcctaccgccagcagaaaccctagcttccaaggcgtcgtcatcatcctcgacgcaacaacagtcaacgagggctggtgccaccagattcgccgcccctcgccgttgtcgttgtcatcgtacttatcctcgtcgctcgaagtaatcgacggatcctcgcgtgaggcagggtggagtagtggcggcgagatccatgcgggagggggagggggcgccggatccgccctggcgtcgctgccactggcagatccacacgcgtaggggccagagaggtggcagaatgctggaatccacgcgggagttggaggggccctagattcgtccctcccattgccgttgccagcggatccgcttgaggggggggggggggtagagcggcagccgaatccaggtgggaactaaagggggtgggatccctctcatagtcgaccgccaccgttgctgccgccgccattgccctagcccgcctcgctcgagcctacgaggagagggggaggtgcatgggggagaggtggagtggaggagaggagagggatggttgtgagtagtggggagagtgaagtagtgaggtggatgagagaacttactgggagagagaggagaggagaggagaaaaaaagaatgggaagagagaggagtattttcgtatgcaggccacttaagaggcccgcatgtgaagataaacttattttcgcatgcaagcctcttaaaaggctcacttgcaaaatttgattttcatgcgatctttaatctctacacgggagattgagttttgcaggtgggaacaattatgatccacatgcaacctaaaggggttcgttcagaaaaattgattctgtaatactgcattgtcagatggggaaggtcaatgtggaatcttcaatttataccttccatatattggtgttatcaatcaggcaaggtatggcagaggggttgttgcgttgttgtcacaagttcttccacatttatagttagagaaaaaagatgagtagttttcctaaaagaaaaatactcaactaccgtatctgaatggagcaattatatatctgatgtgtcagtttttttcttgggttgttacacaaagcacagtttttcttattaattagcaatcaaaaaggaacatatatatatatatacatataatgtacacctcacccacactagaagcttgaacctattattgatgttcatgaatcttacggaaggcatatactcttctctccacagctttccttcaaattgttaatggtcatgcaaaaagaggaactctaatccaatttgttcttttaaaaattcctactttttaaagacatggtaagttgatgattaatatcgatgaaacgtactaatgggctatgtaaacaacaagtaaaacttgctctttgggttcatttttgtatgcacctggtaccaaagattaaaaaaaaacttgagtctttttgtgcgcatccttactaccaattattgttttttacaatttaaaaagttaaagttcactcttccgtatggtaaggggtcttgtccttgtcataaaatgagggcatttggattatagaggggtaccctttagaacaagagaaaatccataaaatgccattgacaaacactctaatcccaaaaatgccattgacaagtgcaacttccttaaaataccatcgtacaaacgtttttctcccagagatgccatcacagccatactgctgttaactcctccccgttaagtggtatgaaaagacaatcttacctctgggtaatccttttgctcaaacaacatcattttgtattgtttgctcacacaatattattttgaattgatgcctatttaaattcacagacgtgtattatttagatatcaatcaaaatatttcaaaattaaatatcttgaattcacatacgtgaatattttgaattgatgcatattcaaaattcacagacgcgccgccgctgggagcgccacatcgccgtcgagggctgccacaccgccgcctgggaaccccgtgccgctgcctgagggccacgcgccgctgccgccgggggacctccgcgccgccgcccgggagcatcgcctcgccgcctgcgagtgctgccgcgccgccacccgggagcatcgcctcgccgcctgcgagcaccaccgcgccgccgcccgagagcgccgcctcgctgccgcctgcgagcgccgccgcctgggggcaccgcatcgccgccgccgtcgcccgatgttaggtttagggttcttttttcccccaatttcttttcttttaccacctctggatagtaaaaattggagcgagggtaatctagtcattttggtaaaaaaaatttctaacggtgtggactaaacggtaagttggctgtgatggcatttcggggagaaaagcgcttgtacaatggcattttgaggaagttgcgcttgtcaatggcatttctgggattagagtgcttgtcaatggcatttcatggattttctcttagaacaaacgaaaaatatggaatgctagctagtgcctagtagatgatttaaatagtatgaaaatatattccttttgagatagccctttaaaacaaagaatttattcctaaaaattcctttgaaatcttatagaatgagctatattataaggatctcagccaaacaattttgaggatttatgagtttctaaataatgggacatgtcattctattcctacgtgtttcatatgttactatgttccgatgatcttcccgttccaaaggagccacttttagagccacagcatcatggagttggagttgagaagatgagttataattgacaagtttttcatctctatataaaatattagaacccgagcgccaaacatgcatcggcccaggcccaccccaccccacatcccatcatcccactcctaccgttgtcggagtaaacgatttactcctatcgcgcggctctaccacccacctttatttgagtaaacaatttactttgataataaaaacaatttccctgcttccgatcccaccccacgtcccgcatcatgctccgactgttatcggagtaaatgatttacttcgataaaaacaacttctttgtttccggtatatattctatttttcctgttcccaaccaaccactcttgcccccacttcatttttttcttttctagtttgattacatgtgagtaattttatcgcttgtgtgtgattgagcctgtaattttttcattcatatgactattttgtgatacagatcaacaatactcttagtatcagtttttactcttatactgtatattgaactcatcagtaaacatattactacatggtggctatgagatgatggctatatcgagaggaatgtggtaattgttttactcgcagaccaggaaatctcaattttttctcaaatactgtgtattgaacacatcagtaaacatattactacacgatggctacgagattatgggatatatcgagaggaaggcagtaattgttttactcacagaccatgaaatctaaataatatttataatattggtaaaacaattactagcgttgtaagctggtagtaattattttacgaccatctaggtatggcgtcatacgatgtgaaggcattcatgcgagtaaatttgttacttttgaatgagcagatgtgggaggctgggagtaatgaaaaactccacagagtaaattcattacttttaaatgtggcgagataccagaaaaatgaaaaactcggaaagaaaaactagacggtaaatattttactaaaacacaaaaatagaataactacagagaaagaatgaaaaacagaaaaatctggatggttaatattttaccgggcctattgatgaagcacggatgagatgtaaaagagaaaaaagaaacatggaagaaaaacagaaaaatctggattgttaatattttacccggcctattgatgaagcgcagatgagatgtaaaagataaaaaagaaacacgaaagatggggagataaaataaaaaaaaacgaaccaagaaaaggtgggatgcaaaggaaaggtaggtggtaaaaaacgggaaaaccggacagagagggggttgtgcggcgctcgaactaatattccgtgctgtagcgcgtggattagcgctaccgataaaatattactaatatatgtaatattagtgcgtacgtacaggtgaatatatgtagcaaattaacttttccatatgcaattaacgaggcacacttgacattctctgatgtgtaggaacttgcatgcgtcgattaaatatatgtgcacatccacatcatttagacatttacttttctaaattttctcatattaatcctttttttattacttgcatcaaatggctctttgtgtggtctttgggaatcaggctatattctcaaagttaaaatttcaatttaaacaagtcaaaatttgaggacaacaatgtgttttttatgccaaacttttaacttcatacatatgaaatgaaatattttccggtgttataattttaatatatagaactaaacaaataaccacaataatagcttcaaacaaacatagttgctatttttctcttcataaagttagtgcatgacttgacgtgaaagaatgattcaacgttggaatagaatgttattcttcgcaagaagtgattggtgcaataactttgtttccttacgaacaaggagctaacaataaacagagggtattaattccatctcttgatatatatatgacgatggccagcacataagaattcctacaaagtttaatagaaaaatattagctatatatgacaagtggtaaaaggctcaaaggtatgcacatgtcttagttaaacgatatgcatgctatagaaggcttcttttctcatatcacaagatttgctagtttgtggttagctagccataacctagcttttccattatcaagaaaagtcataacctagctaattaattaactgtggcctgaagaacaccctaccattggattgcctccagaacccatcatagccatctgatctttagtttttcctaaataatatttagttttatatatgattgttatgtttttattaagtagccattgacggtcctaaaacttgtgcataggtgtcatgcatctacatctatagacttgaaaaatgcatcttaagcccctaaagatgcgaaatatattcatgcttccaaagttcgacttggaatgacacaaatgttaacatgaagccttcatcaacccaacgctgctgacaagtagggccagccattttttctttctttttctcttctccctcctcaatctcttcttccatggctaaaggcagctggcggacctgggctagtggcttgtgggaacaaaaagagtatctcaagttggtgaacccgtgggcacgtgagtggcctctccgccgctcggattccgcggcggtgcccctctcccgccctccgcccccggatgcggcggcaccgcccctcttccaccctcccctgcgcgacggcggcaacaacaacgacgacgagatggccaggatccggcggcacgcgcctctccgcctctccccacggcgcagcgcctctccgccactcggatccggtggcggcgcccatctcccgccctctgctgtccggatccagcggcggctcccctctcccgctctcccctgcacgatgacgacgacgatgaggtggccgggatctggcggcgaggcacctcttcgcttctccccgtgtcgcgatggtgacaacgacgagatatggcgacggtgacaacgagacgagctgtggtggcggcgacggctacgatgacgacgaacggcggtagcagctagggtttcgattatttttatttttattttttttggatttttattttcgcgtgcgggcgacataaccaccccacacgcgaaaatgcgattttcgcgtgcgggtgcgctatccgtacgcaaaaatcatgatttttttgcagaccttgggtgcgtgcgggccgccatcggcacgtgaaaacctgttttcaccgcgcaggtaaatccttttcctagtagtgacaggagcacatgcatgaggttagagactagtcaagatggctgttaatatttcttaaggatattactaaaaatataattcccagcaatgatactaaaatattcttggcatattatgatttacagatataatccgcaagcgtatgaatatactattgtagtatttcacccgaaagtattccaaggtatcgtatttatttaatcccaagggaagattgataagagagaactatgctaataatttatatgttacttgtataaatcagagtctatgcaatggttaattaattcaaaggggtaggatgacacgaagaaagaagaactaagatactctcaataaataaagtctaggctaggtgaagaaagaataagaaaagaatttattcctatacttctaatatacatgtatctttagtttacactcattagtatataatcatgtagccaataccccctaactatgctctcctggtattcctgattgccgagttccttgcgacaatccatcatggccatccaaccggaaatatatggaggactactcataccaaaaaagtgccttaggactatatatatactaacgtggaggaatacccgtactgagctgtcaccatcagcagtccacctctactgtcccgcaacatataaccccaaataatgatatctaataatctaagcaccatgctcacattattaaatactactctatacctcccggcaagacatagggcaatcattcacatgaacattaaacctacaccaatgcgtatctctgttaagctagctacataattatatgggcataagtatgaagtaaagtcgtaaaatatggaagctgaataaagaagaatattctattaattctataagtcttacaaaaagagagagaaactactagagtcatacctgtattctcctgaagactcgaggactatgaaaactattctaattctattccactagcattagcactagaacactaactaaacttgagagagagctcttgttcttattccttgagtgtgtgagggaaagagtgaggtaaaccctttatatagcctcccaatgacggttaaaacggttggaattgtcggaaatgcccaacaaccgctattgggagtgcatctagagcattgacctaacaccatggcatgtctggtacatgctcatgccgggctcctaatggccatattcatgaagatagcaataacaagataacaataaaagatgaggaggaaaaagaaaaataggacaaggaaataataaaaaagaaattttgtaagtgaatcccacttgtcagctgatttagggttagtgtgatatcacgtaagcgtccttgtcgtatgtcacattggattttggacgggtgttgacacattcagtaagtctaggatttaaagatgcattatttaagcttatggatcttgatgacaagtacacattatttaaggactgttggcatattttactcgtttttagtttctatccgacctttggtttttcacaactgagggcccctttgaaacataggattgtcaaaactcggaataggaaaaacgtaggaatagaatgtcatgtttattggattcctacgtgatttgaaaacacatgaaagtttccaaactaccgcttgatagtcacacaggaaaaccgtaggaatttaagacacgggaagaagaaaacataaggtaagacttcgtgctaatgttccttcaaaattcctctacaatagttcattccataggaatttcaaagaaattgatatgaaccaatcaatcctttctttcaaaggatttcataggattatttcccataggatataaatcttttggaatttctatgttttttctttgtttcaaaagggccctgaacttttcatttatctagatctttttactagcgatggttaccttttcttttcttttctttttagttattgttttcaaggttttgctgccacctgtaggcatgggacttgggaaggtgggggggtgggggggttagacagctacagagacaacgacctaaccctaattatggctagggaccttagtttcatcccaacaaggttaggaacttgcaaagtacgttttcatgttgtttgcagtacagttttccgattattatctttccagttagtggtatgtgctaagtgcactctcagttcatcaatcttatcaacaaagtgactcagataatccaaatatataagtaactagctagctaaattaaatgcatagcttctccttagtggtggttgactttgttaattacttagctagcatgcatgcttgcgcatgatattgcagataagtcacattgacaagtcaactaattaatgacagtctctagctgtcgatcatgtagtgctatacagaggcggttaagttttgacacatcgaattgacccctcaattagtgagacttgaaggaggagactaattaatataaaagcttttagcttttaattaatcaaccacagtggtgtaccgtacatagttgcaaggtaggaatgcgatgccatgcacgctgcattatcatctaggaaaagtacaccatatgaatgggctgacatggcacaatattatactgccgttctttcttttatataccaccaaagtaggattatgttgggtatgagtgcctgttgtaatattaatttaggacagaattaaattagggaggaagaaaggttgtggctaaaaagttcatcaacatttgtttaacaaaaaaaaaaagcaaatggtagagtgagattgatatccttctcacaaacattccttttggttacggaatgtctttcgtatacctaattaaaggtgtttgtataattaatttctcactctcttgtaccagaggattttgaggtctattacggtgttttttttttcttgctggaggggtatattactgttactagatatagagacttttaactaggaaaattaatttaaatctgaagtatgtcaattaatattataaccttgtatgacttaccattgaaaatctcagttgcacatagagtgtttgttttccactctaccaagaaaatttgggcacttctttcacacgatgaatattgaaatgtctgatgaagaagcaaaattaaacatgataccaaagctagagagcatatgtaacaattaaagtgcaagctcatagcgacaggtgagtattgttgtagataactaggacctccggattaataattgaggggaaagaattaattggcgtgagacggtggttaacgatgagcggaaagagatcaaattttaggggtgtttagatccatggcgtaaagttttggagtgtcacatcagacacacatttaaagtattaaccatagactaataacaaaacaaattatagattccgcatgtaaactgcgggatgaatttattaggtctaattaatccgccattagtaaatgtttactgtaacaccacatagtcaaatcataaagcaattaggcttaaaagattcgcctcgcaatttacacacaatctgtgtaattagttttttcgtttatatttaatactctatgcatatgtccaaacattcgatgtgacagggtgaaagattttgccaggggatctaaacaggcccttaggggaagagaggccagagaggagaggaaactaaaagttagacttgcaaagtgatcatctgctcaccaaaagaaaagctcaagctatagatagtggagaaagatgtcacacggctaaggttgaggctggggtaatgtggtgtggggagccaccactccccatatcacaaccaccaaccacatatctatatagctctggtctcaagtaaaatgccaagctttcagcaagagtgtgaggaagcttatgtgatggtccaattaaaggaatgcactggttaattaattaaactaattgaagtgaactcctagaaagcatatggaagtctatcactttttggagaggggctcattgcaagtaatccatattcaattctagtgtgttgacaaaattgtcatgattatcagtgttgctagatgtgtatagttatatgagtggtgttttgagcttgcctatcacttctgtgcaaactaaccactatgattggagcaaaaggaatgttctctatggctaggagaagaacaatttgtcaatgtgggatggaaacaaaaagtcatgtcatcaacctccccatgatctgagtccagatcccatagagaactcattactaaaggtaataacaacacaaagtagatttactggtcaattcacaatcaagtgcaagcatgcaaagaaccatatataggttaattagatagttagggaactagtctaaacatgccccacatctttatttcagcttaattggaggcagtttcaatacgaaacctaactacgagctttatcgcctgttctccaaaattgtccatgcatgcagaagttaattaatggcagacggcttgcctacatggcagttgatggagtcaagatcagggcatatatcatcgatgggggcctactggtgccatttgcacatggcagatagccgcttggatgcaatccatcttttaagttgggatccagcaatgatgctgcactaaaggagttgttttggacaatcggttatatatgacagtatctccagtagcaggacccaaaacaggttgtgttgggactagctatacacatctgtcgaaaaatttgtcaggtttaaatataattcaatcatagtatagttgcattgtaatctgtatgtaactataatacaatttatatatagctttaaaaaattccacggtaacagcgaaggttacgagactgaatctcctaacatgtgtccatactatgatttttcttctttccaactcgcacgaattttgaagtaaatataacggtttgaaattatgtgataggtatatataagttacgctgtagttacatataagttataatgtaattatactacaattatattatatttatatttaacaaattttatcaacaaatatatagcaatatcaataccaaatagtttttaggttgagggcccaaaactatagccccaatccgcagttatggtggcggtggtgggaggacatttccactagcccccgcccatcctccctaatgtgcaggcactagcgcaccgttaatcctactccagcggtttcaaaccgactgttgccttccttgtcctccctgcataaccaacgtgcctcttgagctcgactgatgacgttccaccatcctaatgccacgctaggagctcaggtggatgtgcttctaggaatcatccccaagcacctccacctcccaagctccaagccaatcagccatgcatgtcaccgcccttaccacactactacaaaattgatttttttttccgattgagactccctctagattacagttggaccataacagcccccatatgcaaaaatcactccccaaggatggttcaaggacatatgacaaaatcaattttcgtatacgggcgtctgaacatgtagcgcccgttccgtcgtggcgcctagcgggaaaattatctcttaaaaaccctagttgcgaaatttgtttccttgcttgttgtctagtgtccgtgccatctcagatctcaatccccgatctatcgtcgagtccaattccgaatccaaatccttccaaatcaatccctccgcaaaagtctattttgcctcccccggggtcgatgggccgaatctctctcggcccacctccccctccctcccggcgctctctctctctctcttcctccccctccgctccgccagcgcgccgcgcgcgcgtgcgcgagcgtcgcgccgagcgccctccgctccgccgcgccctgcccgcgcgcgtgcgcgtgagctggccgcgccgagccgagtcctcctttccgcttcctcgctgccgctccccgcgcgtcgttcgcgcgcacgcccgcgtggtcgtcgcccgcgtcgcgtctgcgccgtccgcgcagccgcccgatcccgctagccagcgcgcgtgcccgagccgcgccgctcaaaccaccgtgccgcccgttgtttccgcgcgcgcgtgccgtggtggccaaccgcctggtcgctgccgccgtcagccccctgccgcgcctgtcgctcgtgtcgccgctccgctccacaccgccccgccgtcatcgccgtcgtcatcgcctcggccccgcctctccgcgcgcaagccgctaagggacggaggcagagctccccctccctctgccgcgtcgcccccgctcccctcctccttttcccaaagaggcaagggacaagccccctttccctcccctttttttttctctttttccctctcgccggcgtcaccttctgtcgccgttttggccgctaaccggagcaccagctcgccggcttgaccgtccaatgtcggttcccctctcccaaaccgacattgccgcccatttaaacccaagcccctccccctccaatctccctcgttttcgtctctcgccgccactatcgcccctgttcgccgtcgccgtttgtcgtcgcgtgcgtgccggaggagccggtgcgcactaggatgcggaaggggactccgggcgcgccctcttcttcctcttcctcggcccgaggccggagagtttactcccgcgccgtcggcctctcgtcactgcgccccgtccgcatggtagtgcctccctccgttcttcctcctcgctccatctctcccctttagttttcggtagtagcacgagtagcctccccgtagctagccagcgccgccccggccgttgccaccgctcgccgtgtgcttgccgccgtcgccgcccgagctcggaagcgccgctcgtcgccggcctcgctcggcgtagcttcgcccaatccgacgctagcaacggattcccatagccgcgtagatgctctcgccgccgggaattggcccctcgtgacctcgtcgccgttttccccttttctctccgccggttgccgccgccgcaatccgccgccgacggactccctcctgcgaatccgagccgttggctcgtctcccctcatcctgagcaaccacccggtgtactcgctttcaccggtatcaccgtggttcgctccgccgctcgccgctatcgtccgccgtccgttccggccggcgacggcccgcgtggcggccacgtaggcgccacgtcggcgccagctcgccgagatcggatcgggccgatcccggtcagtccctcccgtgcgcgcgttccaccgcgagccgtgaggctgcgcgtgggcccgccgtatccgcgtccaccgcgaaccgcgcgcgtgcaccgcgtccctcccccaccctagcgccgcgccgcgtgctccctccgcacggtgagccgagccgctgacaagcgggtcccacccgggaccacgcgtggtgagcccggtccaccggccctctctctcctcccctcccgcgcgcgcgcgcttgggccgccttgggccggccggcccatttagctcggccggaccgccccatctctctcgggccgcgccctagccgcccgaggaaaagtctattttccctccctcttttcctttcttttcttttctttttcaaaaaggatttaattaaatccttttcctttagaccaaaaatccaataatcttagaaattcaatatcttcccaaccgtaaatccgtttgactccgttcaacttccaaaatttctcaaatctcgagatctatctaatggcacgcttagaggtcattaatagggctttattttcgccgtttgttgagttgtcccgtttcgcgtgtagtttcggagcccgaagacccgcagcgcgaggatttcgaggatcaagctccagatctcgagcaaggcaagccacctttgaacatcttgagcctatatttgaaatttaattatgttgtttgaaaatattatgcattgataggatcgcacttaacctgttgtcccgtctgcaaggcagattggcggacctacctaatttgttgcatttaatccttcctttgttaattgtgataccatgtccccttgtaaccatctagttgcgcctcgatattcgtgcactctatgcaagtatcgacggtcgccttcaaacttaaaatctgagtaacaacttgggtaaaacttgggttttacaaaagacttggaaaacccgacacctgggtcggtgcttgcgaactaaatgaatttccgaaaccgcggaccggagaacgtaccgggtgtatggttttccgctcttgcacttaaggattgtttccttggaatttcatccaaacataagacaagtacgaccacatgggtggaatgggacacccctggctgagtaactagcttatcaggggagccttgatgccgagagacatgtggattcgccggggtggtgtcggggaggacccctgagcttcctggcacagtatggtctgggacctaacctattgttggtctgggacccctctcgtcggcatatggtaaacctgtgtcggctttggaaatgccttgtcatgaaagcttggaggtctcccgatgtggctgatccccacgggctgggtgatccgggttagtaatgtcgtgtgggtaaagtgtaccccctctgcagaggttaacaaactgttcgaacagccgtgcccacggtcatgggcggatgtgaggtgattcctagcgtagttttgtttgactactgcttgtgaaattgctgttgtggaaaggggttcgatgtttgtaaaatctgcagctgatgggatcagctaggcccgggtggccgtttgaaagttgttggcccgggtggccgtttgaaaagctgttggccgggtgccaaccttgttttcaaattttaaagactgatacattgcacatactccgactggacgagacgcactgtctcaaccgtgtcgtttgagaagcactcacttagttgtttttagaaaagagttcaaataaaatcaactgcaaaaacaacagcctttccttgaagcctgcattaaacacttatttcccttggcttgctgagtatacccgtactcacccttgctctatataaataatccccccagttgctgaaaaagatgaagcggatcctgctgatgatgagttcttccaggagcaagccggctacgatgagttttagggtttcggcctagttcccaagtcgcgcctgtgttggttggtcctagtcctggtttccgtttcccttttgtaatgcagttgtgagctcgggatctgtccgtagcccaacatgactgtatctctactctataataaagagaccactgttgctgtgatattctgtctccctgtgataccagcactgtttcctgggacttgtatcgatcaacaggttaatttggagcgtcacgggctagttccggtcgggattagttcggggcgtgacagaacagggctattttcacatgcgggcttcttaagacacatcaatgcgaaattacccctctctctctcccactcccacttcaagtccactcctctcttctccccactcctgccactccctctccctacctctctccctctcccaacaacggtgggcagcggtctcaagcgatggcaggcggcagcgttgccattaaaggatagacttctctctagtctctaccctcctctctgtctactcctcggcttctcctctcctgatggtcaatgggcatgggatccacaaccaccaactgaggagtggtgggcagcagggtggagggtgaccatgacgacgtaccagatacgtcggctacaggctctgccggcgcggatccagcagcgatgggaggtgatagatcctgtcgggacgaatccaacggtggcagatccaacgaccgcagctcctgctagggtgggtccaacagcaccggtactgggaggcggcggatccgtcagccgcagtcctggccaaggtggatcccttctgcccctaccactcttcatctcctcgacggggacgacatctatgaccacgacctccttctcacgacgacaacgggcggcggcgtgggcctatcctgagtggatccagcgggctttgggcagcgatcgagtggcggagaatctggctagggcttcgattttagaattatttttatttttgcagggatttttttctttttgcatacgggcggcttaactgaccatccacgaaaatacaatttctgcatgcggctaatctaaacgtatgctaaaatactgattttcgcagacacttgggtgtaggtgggccacccacctatctacgaaaattgattttgacagcaaggaaaaatcgattcagtagcagtgtcatagtaatccccacctccaccatcgcactgccgaccacctcctggtgcctctccttaagctatagccatgccgctactctccctaccctagtatttgccatctaaatttatgaaaaaaattgttgtggttttgaaatttcgaatttgaatatgcatggttgaatcctaagcgttagatattcatatttgaattggtgtggttgaattgccacatactgattaccttggccaacgcaaccgcatacaaagcgaagaaattaaaaaggacaacgatcgatatatgtatatatacaccctaattaattttaatcaacttaactattgttccattagtttgatctggctaactaaagacgaagacgatagtcaagcaactgtagtatcgtaaaatgtctctcacccaaaaactaactaacgagatgatgggcttccctgcttattatatattaggtatcttgcccttcactagtaaaaaacgattttcctggacgaagagctatttagattacagatggaccgttttcacatctgcacgtaaaaatcggcctcccattttcgcttgcggacccttaagaggcccgcacgcaaaatagcgatttttacagacacttcgttgcagatggttagaagatccgcacgcgaaaatcacttccaaccacacggagaaatcgttgctgtactagtgcttccacaatcaatcaatatgagactattcaacagcaactagggccgatatatgtagcgctaagctatagctagcacaagacataaatttatatatggtgtggtcgtctcgtgtggccggccgggggcggtaggcgcgtagaaaaagacgggcgtgaaaagacggcgggtggtcgcgcgtgctccgggccgccacccaccagacatgtcctctcaacccaacccctctctccatcttctcttcttctattcgatcgttatttgttagttttcccggtcgccaccacctactagctgctgctgctgctgctgctttcaaacgccgatcgaatgcatccaaggaaataatcctgggctatagctagagcgaattcgtcgtcagtattccgtggaccatgcagcagcggcagcatgcatccacatccgtttcatgcactagcgtttgtttcccgccctccccacgctagcgcggtcaattctcgcctggccatcatcatgccacaccaaatgtttatcttatagtatatatgctatatacatacaaattaagttgtatatactcacgtatatctctactattataaaaattgatgttatttttaccggtattttaatacgtcatctgtttatgagtcagtttttaattttgttcatttttggaaacgcatatttgtatgtgagttggtttctaagttcgttcatttttagaaatacagaaaggagttctaattgcagctcataattttctatatatatatatatatatccaacggaatttttacagttaatttcatcttactaaaccatatataataataagactaaaatagccttcacccgttgtaatgcacgggcattttttatagtatataaacatatataccttgtgtatattgtttgaattggaacgaaaccgaattcatttatatgggtacacaagtacttcaatttacattagtatctccctttatgataaaaaaccattaaggcaaattttgctacaggacatcacgactttgtggttttagctgtaggacaccgcgtgaaatgacttttaggggaaaacaatatgtaagtgtagttatttgccacgagacaccgtatccattaaattagtatttttgtgctgacaaggctagaaaggggccacttttttacacatcatgatcgaattgcccctcttcctcttcctctctctccctcctttctctcttctctcttctccggcgaggtgagtggcagtgcgaccaccagagccgcagcagcacagggaaccactcctcacggtgccacccaaacgtgaactgtaggtacgccgcgagcagcagccatgccactgcgtgcaccgcctcgacaacggcctccagtagtatgttcccggcggcgaggaacaccgcgatgtcgctgagctcgacgcggaggtacaagaacgagtcaccggtggaggggatctcgtggtgagcagaggtcgacgcggagcatcgggggcaccagatctagcgcctcggctaagctcgaaccaaggagagaggggggcaggtgacgacggcgaagacacaactgccgctgaagaggccacagagctccctgccgccgctgaggaagatgaagatgacaatgacaacaccgcatcgatgagcaacaaccgaaggcggcgagcagcatgctggcctccgccgcctccgacgagcggctcccgaggcggtcaaccagccgtggcacggtggccgtgagcgcgccgtcataggaccaccagctcacgaacgacggctccaggaagggctcgcgagcggcgatagtaaaggagatagagagagaagagagataggagagctaacatgtgggcccaagggtatttttgatatttcatgtgatttctctctcctcttcaaccggaaattattattttaatgagcgcggtgtccaccagcaaatatccaacttttgagagtgtcttcccctaaaagtcactttgcacggtgtcctacagctaaaaacacgaagtcgtgatgtcttgtagcaaaattaaccaaacaattaatactgtctatgtgaatataagcttgtacagtatcatgcattctagtttttatgatcgttgagaggtaccaaaaggtcccaaacattttagagtaaaatctctcttgagtgatataagtcattttagaggtggagttggagctggagctggagctgtgccaaacaggccctaagtcatgataactcttggcaccttttgataaaatccctcttgggtgatataatggattgatataattaatgtgtagtgttcccttttaaataataataaaaaacttaaggtttatgaaattttgagcttctacgaagactaaggttatgtatgttatactatggattatatatggcatactttctaaatttctgaagggcacgatctattgcaaaaacattcttcagcaacattacttcgaaaactctttttaaatccacttttcatatttttctaatatataacttattcgtttctatactctcgaataactgtcataattaaccattcagcactttacactctatagaaaactctctagacgtcgagaatcaattggggcctgccgacgatcgaactgcatgcaagcgaagttgaagaaccctagctagctgagctccaaaccagcactacctaacactaacagccacacgtgcgcgcggctcgcattcagccagggttggtccaaattaaagccaaacagtgccgagagggaaaatgactgtgcctagattccattacgatccatacgatttgctgctgctgctgtggtaggcgattttgacactggccaccagcagagcatgcagctgcttggccggccacgggcgcaggtgcatgggtggtccttcttccatcccaatattcctcaagcgatctgcagatggtgatgctactgatggcgatcgatgtactccatcacaccgaagaaaacaaaattttacagcgcacattcagctagctcagggtcagagtcaggggcatatgcttatatgcatattgcagctgcaaacaaaacaatgctctatcgcactactggtgtgtactgctgcaaggacattcagtagggtgcgtgggggctcaaacgccggtcgtttatatatgggtcccatatgtctgcaggctgcaggtgtttataattcagctggggctttacctccatggtattcatagttggtagtactccctctgtttctaaataacatatttcaggttgtttagcaaatattaaagatattataaaaaaagattccctttcgacatgtcctagtgataaaattttgaattttgaattattgcttatattctccttccaatcatcttgttggttaaatttgcagagggtacactgtgaaaacaatatgatgattgatatatcacactgaacttagtaacaattaataggcatcaattttcatatattcatagggcgagcatgtacatgtagaagacaaaatacccaaagaccactagcgaagctagaaatgttcttctgatccagagatctgcttatcttacaagagtgattttggctcacaaaaatgggcagattaagcaattcctgctaccttctctcataaaaacctaaaaactaggatagattaaaattttcaacagtagggatggattaaattagccctagttgactctgaagagtatgtaagtgggtttgtagaaaagaaaaaacaacaccctttttcctgtcatagtgaggtcaaaattagttgtgtgccgcgtgttcattccatggtctcagatttttcttctctccctggggaatctgattaacctgcctttttggcgcctgcatatccatgaagtggcgatcgacatgagtatgcgtaaagactaatcttggatgttagcgtataaggtcagagatcagttaaaaggaatttcagctttgccgcaagattcaatgcaagcccacacacactactgatgactactgcatgcagagctagctacacactctactagcggctactagcttcttcagtgtgctgagctgcatgtggtcgctttcatgggcacattgtttgctcctttgacattcttctgtggtctttgctgcacaatacctcacctttagtccaaatcacatccatatcactcggcccttttcttttttttttcctttttttttctttgcaaagatgtgatacaccaacaccacatcttgcacacacacaataagtggcatctccctctcagagatgaaattaactaatgcctttgtatagtacaatattgacttttcatatatagctggtaaatatcaatgctaactatatatgtcaaccacaccaacctcctcgatcgttcaagactgagagtcagagagtgtgtgctagcttctaaagaaattgtggatatggaattaacacatgcacaaaatatatacttttggaagtaatattgcttataaatcaaatttgtaataaataaaaattgattcttaaactaagtttaggaaaggaaaaccgtaaagagttgacatataagatgcctcgttgcaaccttttacctagctatagtaaaactagctaggtgcttttataatgtcaatactttttttaaagaacatatatgtatgtagcgagactacagtcgctatttactttagaattttggctggttggagtacggattatatctgagttgacacactaagggcctatttagttcacgaaaagaaaattttttgtgtcacatcggatgtttgaccggatatcggaaggggttttcgggcacgaatgaaaaaaactaatttcataactcgcctggaaaccacgagacgaatcttttgagcctaattaatccgtcattagcacaggtgggttactgtagcacttatggctaatcatggactaattagactcaaaagattcgtctaacgatttcccccttaactgtgcaattagtttttttaatctatatgtaatactctatgcatgtgtttaaagattcgatgtgatgttttggggaaaaaattttggagaactaaaccgatgtaagcgggcgacaaacaaatgcgcgaggggaaggaggatgtggggctttacaaggcttactcgaaaacgcgtctgaaattattggagagcatgatgacaagcaatagatggcaatgttgaaaaaatcttgctaaggttgaagtctccacttgagccactaccacaacaagctagcatgcttcagctcacttacctttcttttttccactgcgcctttcggattccactacatatgagttgagcccaacgacagagaggtaggtcaaaaacttaggtaaagattcaaaaatttcaaataaaagcacttccgaaatcggagtaaatccaaatccaaatgcctatcatgccttgtgatgtggaccaccactaattgttttgttttgacatgctaaagggaaactgaaaaagatagatatgctgactagctgctgaaggagatatttacatgggtggaccaaagttaactctcattctggctatgattggctccatgaccaacttgtgatcaattgcagagaactttgtttttgcctgaaatgcatcacacgactctaaacttggcatgtagcacagctttgtttgtgttctgttacttaggttttagtccctttttctgctgtaacatagggtgcatgcatgcatgtaacaaattagttgtggcatggaatcgttaaaagattgtgtcctggttaatttggttggcatggcttccctcaacagaaattcccatgatcgatcatgagaagcatgtacagctggaaggacaccaccaaggagggcagaatcaatggtgatttctcttgtagttgcaataatgttccttcctttatccttgtatgtgtgcgtgtggtatgtgcgactgcgagaagtaagactaaaggtcgtatgccgacaatttcaagattctgggggtgctttctttgttaaaaaaagttatatgtgtatagtacatgataaggacaatacttggagtatttccttgcttagtccaaaaaaatgttgattttgacttggcttctggacctccaaattgaaattgtattttgcaattaatcttcgccatttcatgcatggtaagcaagatttatagaactgtactatattaacaaagtatttttcagattttggtggcctttatgttgtccttttacttaggattagttcttttctcgccctagggtctgtgggcatgtgcgccatgcctttgtctttttttgttttactagctaaatacatgtactttactacgggtaaaaagggaaaaaatcataatattgtctaaaataaatgaaagcatatttttcaggaaatatgttggccacatttttactatagagaatacttaccttagtttaattatatatataagctatccattcactagtggagaaatcgtttttagtcctgattcgtaaccccctatagtcccggttttcacaccggaactacgaatccaggactaaagatccctatctttagtcccggttggtgttaccaactgggactaaagatgggagtgggcaatagttttttttttcatttacttactatttaatctctaatttattttctcccaaattaggtgagatgcgtaccatcccaaatacacaaatcaatcatatacactacagattatacatcccaaatcaaaccccaaatcaaagaaacatcccaaatatacaaatcatacacaaatcatgtacatctcagatccatacaatgagattccaaaaaaaaattatacatctcaatccatacaatgaaccatagattcttcatctcaatctacacgtggatcacaaattctttgaaaaaaaaaagaaaaagaaacgaagcaaagccgccggccagctgagccggctgccgcctcccctcctccctggccgccgccgcgttgccctccaccggccgggccgcccaccccctcctgctgcgcacactggatcgagttggaaggggagttgggaagggataagaagaaaaagagataaggaggaagggaagagataagattaaacatggaggga

SEQ ID NO: 23767 - DNA, 9977 bp, Oryza sativa
  unsure (1)..(9977): unsure at all n locations
tacgctttgatctttaatcccggttcataacaccaaccgggactaaaaatcacgtgagctttagtccccgctggtgttactaaccggcgattactgatcatcgcgtagggtcattccccttataaaccgcgactaaaaacgatctgtagcccccgcttttactgcatccgagactgttgcagtacttggtagaccgggcaaagatggtttttctactcctgatttaaatttaattgttatattaatttatgtgagactacacattcattgccatcacaattagtcttttttaaaggagtatagattttgttttggttgtgtgtgtacttcgtgcagaggctggtctaggtgtaaaatggcattctcttaattatttaaaattaaagaaagaattactttagactgattttgcatgtttaggtatctatcttgtgtgcaatttcattgattataacacatcaatggtgaaggacttgaaatgttctgacagatgcaaataatcgagaaattcacttttgaactggaatggtatatatagtttacctaaaaaaataaaactacaaaagaaaataaggaaattataatccatgttttccttattctcaaaatggcatttgtttttttcatgtaacatcaagattactggcctacatccgctcctattatcttatcaattaaatttaaaaatataactagcattgccttcgtatcttgacttatactccctcttaatatatggagtagtttatttttttaaatagatttgaccatttattttattcaaaaagttatatgtaattatcatttattttattatgatttgatttatcatccaatgctctttaagtatgacttgttttttatatttgtaaaaaaaataatttgagcaagatgaaagatgaatggttaaacgtttgtcaaaaagttaacgacgtcatatattaaaaatgggtggaggtagcatatctttagtagcgcgcatgctctccccctctctctctctaacctcaattgacatgagagaataagttaatcctaagccctactttgatcttcctcttgacaaggtaaacaacaccctgagctagagcgctagcgcgttgtttatatatgctcatgcatgcgtgtgcgttgcaccgtgcgcttgcaatgatgccacaaatctccaggatctcaggcgcaacaaattgtaacggctgatatatatgtgtatgatgcatgcatgagcggtagggtcagatgtgagagagaatccgatgataaaacagccatctgatcgaaaggtgatccatggcacattgcagctttgcctttaatttgtcttttcttctgtcaatcacacaccacatttatattatcatgcattaatttcaaatatctgtagttaaaagtcgtctcactacttaaaacacataatatatactcaatctgtatttaaatgcataacattgttgacgctattaataacaatatataacaaaattataatattgtaaaactactatatataaagaaaaattgatctaaccatatgaatttttacattttcaaactaaatatttttatagttttaaaggcaccactgaatatatactcagatgcatatatgcactaaaatttttcatgtaatttttgggggatgatattgtattggatcctattatgaaagatagtgtattggatcctgttccaaaatagcaaaatattatataggtaccaagtacatgttagatactacatagatatcagttggttcctacatggttcagtcttgataaccccaatattagggattcggttccagtgcagtggccactgtgactgcaagttaagcggtcataagagcatcattggatttaaaacagatggcccagatagcactgtagcactgtagcgttttttaataaaatgtacggctctaattttactgtagctcacaatttagattattggatcaataaatagagggttgagattgtgtgcagttgctattgtgccgtcgcaatagcaactacactggatctcaattccaatattaggtttaaggttagttcatgtgataccaagcatgctacccttggtagtaggcatgatatcctctttgtatcaggctaatacatatttagtgtgaagctagatccaagaaaaaaaaaacttattggcatagacgatgagacatttgaataaggacaagatctttgacagtacgggtcatggcgcctcgtgccccagcaccgctgtgctatatataggttgttgtagccacgcttctctgtatctagcccatcgctgatagagtcaagcagtaggggttccgacagccagacatcgtagacaagatcctccatcgccaaggccaatgaccccctatatgagcccctccaccgccgacagtggcggaggtagcgtgggggctacaggtctttagacctcctaccccctaatgaaccattagaggccccattaagacccccccctaaaattaaatccatatatctattacaaagaggctaaaatagactttgtccgagattgttataaggtccaaaaggctgaggagcccctactataattttatcatagctccgccactgaccgccaaggtcaacaacctcctggacgagctcctccaccaccaagccgacgagctcctctgccgtggcaaagtccatcatcaaaccaagagaaagaggaggcttctagcggtgatgtgtgctcggtggacggggatatggccatagacggtgacgagcagtgtgccaaagcgcatgtggaggagtggaggagataccgtgtgagggccactagcatttccgatgatctcactgtttttcttatacttatacttataagctaaattttgaattttaaaacttagttttgaatttgagtttttgggttttttttcatcgtagtttatattacatcatttgcctttgatcgagtcactaagggcacatatataaatgttttacttacaaaatatttttttaataagttatttggataagcatatgagtaagcaaaacaatggggttactagtatgattaattttggccaggcatatgtccaggggcagagagataggagtagggcagctagggttgcaagccctactcctgatcctaaatattcattgattagaaaataaaggaaaaaactatataaattcaactaattgagtccggtttaaaaaaattatggctccgccgctgatatgcctagccttctatagctggtcacataacagccttcattttaaccggacttacgataaacagacgactgaactcctaccaaattttcatgcagtaaatagatgtcaataaggcatgcagtaattaagtagcaatagtagtaatccctccgtcctataatataaggtattttacgtttttgcttgcactgtttgaccacttgtcttattcaaaaaaatttaggaattattatttatttcttttacttactttattatctaaaatactttaaacataactttttattttttatatttgcataaattttttgaataaaatgagtggtcaaatattgtaagaaaaacttaaaatcccttatattatgggacggagggagtccagtacactaccactgcattcactctcacacagtacatatatacttcctcactaagcatacacacacagtacatatcgctggttaattacataaccccagccagccccaacctgaagatgaaaactagttaaagcttgagatgtctacagatgaattaatttattcaattaaaagatgatgaggacagacaaggacaaattccacagtaaaccatttggtgacatcaccctcacgtacccatccatcccccctccttttaaaagcccccctcacacccacaaactcctatccctctctccttaatttacttctccctcctccatttctccttctcgatcctcctccttcggccagccaccaccacgcgcatgcagtgcatggcgcaggagggctccgaggcctccgtcgccagctcgccaccggcgccgccgcccccttcctcctcctcctcctccgccgccgccgcggcctcctggtggcgcgacatgcaccacccgtacggcgccgcgtcggcgccaagctggctgccaccgccatcggccacggcgccgcggtggcctccgacgatggcggcggcgcaccaacaccaccaccaccggacgtcgtcgtctggcgccgaggacgacctgtcggcgtccaacgccaccatcacctccttcaccaacacctccaccaccaaccactccggcctcagcatggactcctccggcgaggccgccgccgccgccgccgcagccgccgccgagagccacctcatctggaaccaagtactcatgtgagtagagtacacgtatatagatgtttatttgcatatatatcatataaaacaattaattacatgtaagtatataaatttgcatattcgaagagggcgtgaaaagaaggcatgcgtccactaccctttgtcccaatgcgtccaaagcgccctcactttgcctagattctaattaatttaaagaataaatttgtgcatgcatctctctctagctaagctagctagctactgacatcaatccctaataaccctgcttaattcccagctagctaggctaataaaaaatgaattaaaaatggaacaagaatatgtgcaagtatattagaagtgaatatatagtatagccaaccaagcaagatagctagtttctagtactagagagatagagagagagagagagagagagagctaaagcaaagcaaagcaaagccaagccaaagaaaggagcttttcaaatagtgtgtgatataggggaggcttacatgtgtgtctaggcatctattatgattctttggctataaggttctctaattatctctctctttctctgatagattttttcctagctagatagataggttctttggaattggaattagcatatgtgagatttcttgcatgggataagatttccccattaaagaactaaacaaagtaaattccatggtgtaatatatgcatgcttgcatggttaattaaattcgtgcctagctatctaggctttaatttggtagaacaaacctctaggtactctagcttagcaatgccaaactagtaggctgattagagataaataattaagtgcagaagcaagcaactactaattgcaaggatttgtttggtacggatcccaaaaaaagtggaaccatatcaacagcatccatgtctccatataacttgcaagtactttaatcccaattcccaaagatgatccctctctttacattctccacatgtgtactagctagctaaccagatactttaatcgattgcctaatgatgcaatggattatcattagcaagcataataatatgcaattatatatatgtgcaactcgatggctagctagcttgttcacttcagctcatatatagctcatctgttcgatgatggccaggggcgccgccggcggcgaggtcgggaggagcatgccggcggtgcacgacgcccacgacgacagcgagaacttcctcgagctgctcaactcgaggacgctcgcgccggagctcttcgccgagccgccggcgtgcgactacctcaagaagatggagtacggcggcggcggcggcggaggagggggaggctggcccnancaccactgcagggcggcggccgcgctggagaagcacctgagctccgccgccgccgctggttacggcggcgcgctggcgcaccaccaccacgccgcgggcgcgccggagcggctcacggccaacctctccgacctggtcagcaactggtccatcgcgccgcccaaccacggccaccacgtcggcggcgccgccgcatgcgataacccagcggtggccgcggccatggcagcagcccacggcggcgggaacgtgaagcagtccggcagcagcttccttgacagcggcgggggcggcggcggcgcgatgctgcagcaggagagcagcagcagcacgggcaccggcggcggcgggcaggacttcctgaggccgatggggcttgccgccgggtcgtcgtcgtacagctccatgctagggctgagcagcaggatgtacggcggcggcggcacggccaccatggacgtgccgtgggggagcagcaatgccggcgcggcgaggagcctgtcggacctgatatcgttcggcggaggcgcgatggccacgccgccgccgccgccaccgtcgtcagcgccggcgaggacgtcgtcggcggactacaagaagcagcaagggcagcaggagatctcgtccccagtacgtaatgtatatatacataatatttctatccaaaatgtattacgccgtcaactttccatataacgtttgcattattgatcttattaaaaatttagtacaaatatataaaatttaagttaagttatagttacattaataaaagaaaatcataccaaaataaataatatttacataatatttttaataagacgaatagttaaacggtataaaaaattcggtgacacgaagggagtaatatatatggttcatcgccagtgatcgagcgatgcacgcactgatgatctgatcatatacgtgttgcattcacacgcaggtgaagacgagcagcagcggcggtggcgggaaggaggggaagaagaagaggtcggaggaggcggcagggtcggaggggagcacgaagaagtccaagcatgaggccacctctcccacctcttctctcaaagtatgcccccatcatttagtatgaatgtgtgtaaaatattaatcattcttaaaattcttcaattataaaaacaagtaatatattataaccaaataaataatacttgcgcaaattttttttaagatgaatgatcaacagtaacatatatgaaaacagggtagcacaatttgttcctagctcttacgcatgttgcactggttgtccttcacgtgcatgagcaaattgcaagttgatcattataattgatcagtcatatatgcaatatacgcaggtcagatgatggggtttaattaatttaatttctgccagaacaaattaatgtgcagtgattaacaaagtgaactctacaaattatttgacctaaaataaatataaatatgatgtttccatcgatcaattatccatcatctaatagtactatcctgtaggacttttctttttgaaaaaaaaagacattaaggcatcgtcaagaacataaattttacatgtatcagaatttccatagaaatctggaaaagaaatcccatgttttgaggagggtattatcctgagaaatcggagtgttgcatgttttcgtagtagtgcaagctcatcgacattgttacctagtagctcataccatgccagcatgctgcaggcctttatttgtataacagtattcctagaaaactctttgcaagttttttgtccccaaaactttcatatatatacttgtgaccatcagatcgctttgaggtttgtgcatgaaggaaaaaaaactgctagaaaaaaaatttcagacatgtcacccgcaagatcctaatgctaaccagccaaaccatagttgaatataggttttatataagttatatcataattatggtgcagttatagtgtaattataattacaattacattgtagttacagtgcacttcaattatactattacatctcagaaaacttgcgacagtttttgtatactctctttgtataatgcccaacgaacagatgaacagcttacttagaagaaaataattaacggttgtcaaatctcctcgcaatgacactcatgcattatacattatatacatccttactgaaaaattagcctgtattgtaaatatacatgtgtaagcaattatctctacgtacagcagtgcagcagtacataaggtgctttttatatagcttttatatatctatcttttaggattgctgatgctgcttggtttaacagtcgcaggtaccaaaagtaaagttaggggacaagatcactgcactgcaacagatagtctcaccatttggaaaggtaaagtccgattccaatatgtacaattcgttgtttttgtggtaatttttacgtataaactaaaatgtggtcaaatgatgcaaaattttacaaatttatactaattattcctatactgatgcaataagtttgaagagaggggggggggaattactcactcctgtacaatatttaatgatctgttgacatacgtacaatttaagaaaaattatatcaattcattacaaattcttgtctgttttttatgtgttcagttaaacttacagattatacataagttacctcaaatatggatcccatctgaggaacctaaaatttacttttttaggtgacctataacatttatatttttatgtttgtgaaatcaatttctttatagtgaagtttgctatttatgatctgtttcagactgacacagcatcggtgctatatgaggcgataaattacattaagtggttgcatgaacaagtgcaggtaaattgcagaaatttttttctatttttatttcttctcaaatgcaatatatacatgtggtcactttttaggtcagtcctcaaacataattgtaaatatttagaaataaccgctcatgattgtcaaaagaaaagggtaaagtcaacttttggctctcaaactcctcttggagtccaattatcccttatacataaaagccaattattgctcacggttaactttcaaaaccaggcaaataacacctcaaaacttgtttcatggtggttttgattgatatgacgatagtttttggtaacacgaactcctattataggtaagttatgttgatgtaaacctaactaagtgacatccacgtcaagaaaacatatatagtaggaatttgcactagcaaaaactaccatcatgtcaaaaagaagaagaagaagaagcaatgcatgtcaatagggtctagctagtactataatgcgttatttgtttgggttttaaagtcgatggtgaaaacaataggtatcattttagggccggtgaaaaatcgacttttaagactcaaaggccaaaagccaaaatttaccagaaaatacttttctttttttgtttttagaaattcctagctatggaatatactgtaaagaatgtggattagatcaatagctgtgtttcccctttttatgttacgagaagaaagaaagtatgggcttagctttgtgtcattgcctacattttaatttggtaatggagaactttacacaacctttttatgacttgtgtaatataatgaatgcaattattgctttgtcaaaaaggatgtttttaagaaaggccccatatatatttgatatttccattggaaaagccgcatctaattaagattatataagatgaattgctgcaccaccaattattgggagacacgtgtcgaacctgcaaagcctagctcagctcatacccttcctagagggcccaggatagccttccttttgttcgtattttgcacaacatgagtgttactagtgctgctgcttttgtgtaatggaattctttgtcatggccccgttacacacaccctttttgcagttcggctctatcagttagttattcattatatgcaacatggaaaagtttctaagaatcagtttgtgcgaccaactatatacaatttaatttgactccttatttcatgcttaattgttgcagttgttgagtgacccatacatgaagtcgagtagtagcaaggtaagctacaaaccttcttaattgtgcactcctccaccaacatataattttaatttaaatacatgtatatgtccacgtcgaatatgtccatcaaacttaatttctagctagctatagaattttgatcacactaagggtcaaattctacatacgctcactccgtcttaaaaagaatgcaatttctgcattcaaattgtacatcagaggggctgcaggaat

SEQ ID NO: 23768 - DNA, 6742 bp, Oryza sativa
taggttcttccctaatattcgtgaagacatgtgcgcgttgcgggtattttgtttttcttctcaccactcatcttcttttatttttgaaacgagacagtagtattagcttgcaggtgcatatatgtgacaatagttgctgaaaatgttgacatttttcttttgcataaaataatttatttatctctgttgatttggcggcacagtttaaaaagtttaatgttccaaaaaatattcatgaccatatatactatttgttttcatttttatatccagggtacattagtatctgtatcaaaaaaaaaagaaaatatatttgtatctgtatccacacaaaaaaatgtgagagcaaataattattctttacatctcttctctaagaagatagctccaaatagaacatttcctagtactacatatctgcttgtttgtttgtccagatttatagtactctgaaatatcctatttggtcctaggtttttatattttaggacggatgtagtatcttgaataaaacaaaacaaaatcactaccttctggagagagatacctcatctcatgaattactggcagcatttatgttcctcgttacgccctttgtatgctccaggtccaggatgttgatccttgttcaaattcatgtattccagtttccagatgggaactgaaattttattatgcagctcttcttgtgaaagctataagcaccgcaaaaattatagctatgatttacaattaatcatgtgtaacaacgtttgtaaaccaccaactatatatcttcactgaatcagtaaacttgtcaactattctataatatcaacaccggctgctgattgtaatatcacttctgccagactttctgatctggagtgaagtcttacttgtcagtctcttacgactcgcatccatagcgtagaaaagaagcacgcaagccaacagaacaatcttcattctttcttgtaaaggtataattaactgacaagactatctgacgatccagtattattgcagcttatgccaagttggataaagaagcatcacttggccttagtgagaagcagaccatggaaacatgacttgccaacataagtgaaagatttgatgttcaagataaaaccatactacgtaccaaatgattttatagtagatttcaccagcaagctgacagtatgatggtccattatattccaaccacggctgaccagacaaaggtaatagcatgtctaatggcaccaaaccatcatatcacagtgctgaaggtttcctagctcgggtcaatgacggtacatatattctgtaacgttgtcaaggataaggagtgatagcctgcgagctcagtcgagcaatatctgaaattcaatttcctcattttggataagacgtatctagtctctgttgttcgctgaggggatcaagatacctcaagtagttgagcattgcactccagaatgtctgcgccaccaaagtcgtgctctccaggatgttttgtcgcctttcgataagatgaactagtgctatcatatatgttctgtcagaaaggcacaaataatgaacaaaggagtactccagtgtcaagggcagagatactgtcgctgctgatattttactaagaccttatccaactccagaaaggcagagaccaactgacaacaacttctggcagaaaatcaccttggatcacttgcagtttccatgaggcagctgtcaacactttgcatttcgcatggagccatgggcattctgaattcctttgcagcacagataacaagttatcagaaatgttcatcggatgataggagggcagtggaatactggaacgaatttctgtcagcattgttgacaaggatgaaggataagttaacagtcccattccatcaatatctgcaggaaattgcatgcaagtctcagttgtagaaagatctaaaggaaatggcctcatttaacatacaaagcaatgaagttttctgcatcttccatagctcccacatgtatttgatcgaaaacactatttagaaaagctaaaactagaggcggacagccaaacaacagcaacagataattatggttatatgactattattgaaaactggtaaaagccataaagaaattggttgaaaactggtcaaagccataaagctgttgcaacgatactatttgcaaaagggaaaaaaataatccatagttttatggatcttataaagtaattttgcctatatgctgtcaatcgagatcaatgaggaaataagtgaactgcacttaaagaaaacaaagtattaataacagaagacattaaagactgaaatatctgggttatcaaaatatagagacacttacacagtattttgtatccatcttgcattatatatcttcaattgattgtctccaatcagtatcatccagtttcagagcccaaaacaaagacaacttcaccttgtgagcatatcaggtgattgagtgaactgtatcagcatctcatttcttaactgactgataagcaagaatattgctttcattttccctgcaggaaaccacagttttatgtagggtaatatcattgttttggtgtctgagaaagccatttgcacttctaagacctcccggcattccatattccccatagcaagttgtcaaatggatgtaagtagctgtgtccggtttcagccccaactcatgcatctgcatgaataaactgaaagctttatccacctccccacaggacgcataaactttgaaggcaacattgcatgcacactgatctattgtcaacacaggcttcatatatttctcgcaaatatttaatgctgcagcatgcatgccagctatcaaaaacaagaaagcgattacagcttgactagaagagctcctgttgtcattatatgctgattgtaactgtgaaacttcctcaggtgcaatctggattttcttcattatagaaaatatcattccaaacgttgaggcatctggcaaaatgttgccttcctgcatttgttgcaccaattctgcacattctcttagcttgcccttggccacaaaacatgccataacagcattgtatgaagcacagtcggatagtaagcctgaattctgcaagtcatgagcaaccctaactgactcattaagcaagcccatgttcttgtacagggatatcatgctagtatatgaaacatcatcggcctgattatttctcctcaaacagtcaaatatttccttaaccttagtgaccatcccaagatttgcataaaggtttagcatggaattagaggcaacaatatcagggccaccatccatgctcttcatccttgaatacaaatcttgcgcttccttccagcaattggctttactgtaggccttgataagagaagttaaaacaatttggttaggagcaattccagattcttccatcaagttgttataatgcaatgcctcctctagttgccctgtctcagcaaatgtatcaatcagcacaccataaacaaccacatttggctcaacacctgaggccttcatttcattgtacagatatatggcttcagataccaaatagttgcgggagagagttgtaatagcagcagcatatgtctcgcactttggtttaaaccctgcatatttcattttacctaacagcttcttagccctctgtggatatccacccgtagcaaacatctgaactaaagagttaaaggtgcactcatctggtgaaataccagactcattcatgtgctcaagtagaggagagactctatcataccgttttgctgcaccataagccttgaccatcacattgtattcaactatgcctcttctcctaactcctctatgagagtagaaaacatgttcggcttcctcccataaacccctctctgcaaaagcatccatgatggcagcaaatgtcttggaagagacctcatcacctctgcaatgtctatcgaagaatgcatttgctttatcaagcaacccctgatcaatatacatcttcatgacaacaggcagagactgttcaggaacacaagtcccagacctcataatccccacaatcacatcttctgcttcatgtaccatctttctctcacataacacccggagaacaatcccatagctcacagtatccgcagataaacccattttcccaatatgatagtagtgcttcaaaactccctcaacatcacccttggatgcaaacaatgtcatcatcacattaaacgtcttaacatctggattagttcccctaactatcatgctagcaaacagtgcctctgcctccttcacattaccacacgacccgaatatgttgatcaatgtattgaaggtacatgtatccgccgcaaccccataatctggcatacccataaacatgtccatcgcatccttgagcttcccggccttcccgtaaagatcaatcatcgtgttatatgtgacagcaagcttcggaattctagcaactccctgaatgccagatgcaccagcatcgtcgacattgccatggcacatctcctcaagcaagaactgcatcggtccacctgaatcgagcgcgctgtagtcaagatcaatgaacccaacctcgaacctgccgttgcaccagttatcgaaaagagtggccgcgtcggagtagcggccgacgtccttgaggatgcggacgaaggtgctcatggaaacctcgtcgggagccacacctcgggcgcgcatgtggcggagcagcaggagggagtcccgcgcatggccggccttggcgagcgcgtcggcgagggcggcgtaggcctggttggtgggcgggggcgcgccctcgcgcgccatccgcgcccacacgcggcggagctcgccccaccggcgcgcgccggcgaggtggcggaggacgacgccgtagtggatggcgctgggcgcgtaccccgggagcgcgcgcatgcggtcgagcaggtcgcgggcgcggcgccagtgccgctgccgcgacagcagcgccgtctgctcgcgcggggacatggtggcgaggtgctcatcggacggatcaaggtcagcagcctctcctgcgccgccgccgccggtcggggtggggacagaggggtggctcctggaggaggacagcgcaggcggagcggggagaaggtggggcaggtggacgcgggaggctgaggggaggagtctggactgtgttgcagagatcgatagctcgccggagacggcgacggcggcggcggcggcggtggtaggagtcaacatggtggtgggggaaaagggaaggagaaggagacaagagaagggaggtttaagtgtgtgggacccacttctcagtggaagaatctaaagttctttttctttttttttgagagagagaggggaaagtggaagaactaaagttatttattctttttttttccttttgttttttctgagagactaacaggcctgacgtgtactactcgctcgttcctattttctgtttgtcacgtagtccgattacaacctcactaataataaatctcaaatggtagaattaatagtacgacatccttttagcatttatatttcttctaaaaaaatattaatagtatcatgtgttaatcctttctttctataaacccaaagctgcctcctcaattcgccacgtcatcaatattatatcagccattcaatctctttcttccatgtacacgtcctcagccatccgatcgtttggctcactttcggtcaaaagcgggcgagatccgaggggacgcaagattagccgatcaagtagctgacgagctcacgaggattaacaaaaatcattagatccaatcagcactagggaggtcgacctgacgtcaggagtcattgcctgaaaccggtcgactgccttttccattacaagaatctgtacggacatgaaattaagttgtgccaagctatttactaccacttttattcacatttaatctcctttcctctcatctcacattctcacttccactcctccctgtcaaagcaccaagccctgtagctaacaggttgcaccttcatatcgctttgccatggaacatcatctgctgccgtatcactgttctcgattacctgacgagacgaggggtttactctatgagctctccgtacaaacatgccaatctaatattttatggtgttcttacttctttctgtttgagattgcagctgaattttctatgttagatgggacaattcagtaaaaaagagtagaagactgaggtaagttggctttgacacttcacattctaattaactaggtgaaaccccgcgcattgctgtgagaatttagtatgataacaattaaaaaaaataacgtgtaagatagctagataacatcagattaagtaaattaatgtggtttatgataatttaaatttaaatagtatgtagaatggtgattcaaacgtaaaaagtaaggtgatatgactttatggaagaagaaaagtagggagatagtttatacagtagattaatcatctaaaggctaaaaacaattgatgtaatatgacttaattagaggaaaaagggagaaagataatttggaccatagattaatcatttaagcactaactaagtgaggatgaactatataggatatcctgaaacataataaagatatacattgaaatattatgtgaattatgttggatgctaatttaacatgtttatatttgaaaagctcttaaattataaaaactataaagatatagcatgtttgcatgatgtttaaatgtgatgattgttagtggatgatgtggcatcgttgtatgtt

SEQ ID NO: 23769 - DNA, 23630 bp, Oryza sativa
agttgtacattggattttgtaccgctttaataggaataatatcaaactttggatttggggagaagtctagtgttatgacactatcaccaagcccagtgtagaacttacccccaactacagtgagaagggccatatatccaatgacgctaccacgatgacgatgaaacctcctagactgatactcatgcttaaaccattgggttcctccgggataacaataccaaattaccgtgtcattaaggcttaggacgagcacgacacagtttatatcggtgggcttacacgatagcaagcaccttgtataattcgttctgaggaatctgtcttgatcgaagggcaagctaattctctgagatgtgaatgggttccacaagaatgtctcatgcgagtctcggtgtaccatgagcagccaaccttgtggtgttatccagtaaaagtgatctttcaaataatccagcttgctattagctagcaattgtttgctagatatgctatagaggagcaaagtgtcatttacctccttaccctcatcattagcagtatcatcatcattatcattactacttgcatcggtttcatcatcatcagtttcctccatagactcttcatcgtcacttgcctcagtaaactcatcttcgtcgctcacatcctcgtcatcaccactttcttcattgtcctggtcgtcgtcgctttcctctagagacatatcatagttgtaatgaaacaataacatcggagctaatttatgatccaacgaagttgaattttcactttcgtttatcccgatctgcatcgtgatttagccaatacgtcgtacgtactccagctacataaaaaaataaaagaattactcaaatgatgatgctgcacaaagaggcggctcgataatttctaaactcttagaactatatgtggagatagtaattaaaagggaccctatacatatcatgcgaagcataacttggatagcaaaagcttataaatatatattcgaaaaagaatagttcgtgtatgggggcttatatatctgaaaataaccagcaaaacatacaagtctccttaaaaaagagagagaaaaaaattaaggaaaaaaaatctaaagtagcttgatataccgtcatcacataataatataataataattgctagtatagtaattaaattaattattctgttgcaaaaagaacataataacatttgctagatacgaacctctttgcgtgcgttcctttaaattgccgattaaacgggcgcaggcacttaaccaggcaggcgctgttcgccgcgtttctgtaaattgcacggctcgaccgctcaatccctcgatgttcatcatataaatacccgcgaccgcgaggccgtgaatccgcctcggatttattcccgcgatccatgcatgcgtcgtttatggtatcggtatagtatccagtgaccgagtccgacgcgaacacacgcaggaccaggcgccgcacgatcgcagcacgtacgtaccctgcgtcagcttcaggcctttcttaaacgtgacggcctggccgtgctgtggcggcgccggtacacgaatcaaactgatcaaagaagaaggtcgagatcgatggatcgagagcccaacgcgatggaggaacgggactggtcgtctctcccgtccgacgtgctcgccgtgatcctggagcgcctgcggtggtcgagccacccgagcttcgcgttgacgtgccggcactggcgctccgccgtgtcgcccttctacccggcgtggatcaccccgctcctgctcagcaccgcccacgtcggcgtcacgaatattcggtactatagcccctattaccacaagaacttcgaggtcggcggcaaagacggcgaccacgcgggcgccaagatttgctgtgccgctgggcgacacctcacgcttgattcgccgagcgcggtactcgatgtcgagcttgtgactgggaacattaataaggttccacatatatataggggtaattttgattttgtcatctacgacgacagggcgcatagaatattcggtatcgacgcggttctcccactcaagattggctatgccaactggaacagcgatgatggcgtgtgggaggactggacattgatggagctcggcatcaatgggccacgactactaccgtcacctgtcaccaacccggttatccattgcggcttgatataccttctaaacgatcaaggagggttggtaatgtatgacccatgcaagcatgatgaagggtttgagtttcttgacaaccccacgagcttcggtttcaaacactacaatagctacctggttgagtctgatcagcatgagctgatggccgtcctccttggccgacgcgggacactgaaccatgtcatcaagcttaacgaaaagaagatggagtgggagaaggtggagagtttgcaaggacggacgttgttcaccggcacactcacatcgatggtgaagaagaccaagtttaagtggatggaggatagagtgttcctcccggtgttctacaaatggcctgacaccatccatgctgaccttatttctcgtgatgatgaattagcctttgtataaaaaaatcatcgtcgtttgacacgggtaatcccaatgtggtgaatcacaataatggcgcatgttgcgaaaaatgtgtagacgtgtggtcgtacaaattgggtcaacaagaagaacccagagaaaattggggagccgagagggtggactacggtgtgtggattgaccttcactagtgtcaattgagctacctaccaacttatagagtactcattctactttttaatagatatctccgttgatttttttacgtaacgtttgatcattcgtcttattcagaaaatatatataaatatcttttgttttcttataatttatcactaaataaattttaagtacgactcatagtttagcatatttacactgtttttttaaataagacaattggtcaaacattattttaaaagttattaacggtgtcatctacttaaaaacggaggtagcatcatgcatgtatctacgaccctttttttattataaagtcatgagtagcagcttaagaacctcatcttcaacatcaatacaaaattttagacccaaaaaaattgtaggaggcaatcttttcgttaacactcattcagtagtaattcaggctcacaaaattagcctgaactaactcaaagggaatcgcttgcggctacaaccttgctgatcgcactgaccaccatgaaccagcaaagacgctagaaacaacttgattgctattgtgtaggatccaaaatcatgaaataccatatttacaaagttcatacatatggtaaaaaaaatggtatacacttatagcaaggttaatagtatagcccactactagctccgaatcatctaatgccaatgtaatagccaattcatacaatagttgcttactatactattaatacatggttccacctgtcatacacatattacgttttggagtccgtgctgcagctggctacagatctgtagccccttgcttttctctcgctttctttatttctttaaaatatgtttatagctggcttatagcctgctattgtacctgctcttacagtggcagtagttgcaacgacgacatgccaggaacgccgcctgcctcatcattgtgaaggcaaacaattctgtcaatataatgcaaaatctttcttaccaaggcgaaagtttcgcgatgcatcatgcggatttgtgtttctctttgggggggagggggtggagggaggtgacgcgcacttcctccgttagttcacgctaatgacagtaattagaaaaaattgtgaagatttttttggggagttttttttactaatggattgaaaattttttaagttggatttgaaaactttcgacttaagatttaaattttaaagtcaaattttgaaaacttccaactcagattcgaaaactttcaagtctagatttaaagattttgaaaaattttcaacttgaaattcgaaaattttcaactcgagatttgaaaacttccatgtccagatttgaaaattttgaaaatttcaacttgagattcgaaaatttttaactcgagatttgaaaactttcaactcaagattcaaaaactttcaagtccagatttgaaaactttcaacttgagaactcgagatttgaaaactttcaagtccaaatttaaaaatttttaagttcagatttaaaaattactagtaaactaatcactagtaaaaataggaaactaatcactagtaaaactaattacgaatttttcttctacccatacggcatcaaactgcgaaaaaagcaaaaaaaaagaaaagaaaaaaagaaacggcggtaggttagcgaaaataaaaagtatcgtgcgcgcgtgcgtgggccgtgtgagccgggaatgcgcgccagcagtgcgcgcgcgaattagcattctcgttctctgggagcgtcttccaccaaatcccacaacatgagcagctcagaaatatgtcctagatataaaccatccgtgagcatcactctcaagttttactattttatctctctcacatcctcgaatgttttgccgttgacgagagaattttggggagatgagaaaatacgtaagcatcactctcaagttttactactttatctctctcacgtcatcgaatgttttgccgttgacgagagaattttggggagatgagaaagtggattatagtagagttgtcgccatcccgtgcgttgcacgggttattattattattattattattattattattattattattattattattattattattattattattattattattattattattattattaaaaatttttacgttaaatatgttggttattcatagcggcttataataaaaaaaatttcatgtcatttacaactttctgattattaattttagaattaaattaatatgggaagctaaattgagaatccaagatgggttctccgtatttattaattcaaaatcatttacgaattatggggtttaggataaaaatgtcacttataatttacaattatcaatttggaatttcaaaattaaattgataaagtccaaatagatacaattctgtatctctattgattcttagttttagagaaaaaaaaaacaaatcctgaatagtccttggtatcgcccatgccatgttctatctaacacaaattctcaatataatatactttcgcaataatacttttaaaatatccaatgacatgaatagcaataatatgccatgggctgtatacagtacgcataaggataatatggacaacacatttgaaaattagttattagttgttagttttctttcagaaagatatagatcaatatatattctttgtttacagattaagatcaaataaataatccaaattttatagtgagcatgagatttatgccgttaatcaacctgatttctttgacaatgtacttatgagttatgagaaaacagatattgaattgatataagattagcagcataatttattatttcaatcaaaataaagcaaattcatggatgtcttgaattaggcaaatagaacatgcatgtttggcataatacatccgagaatgtgttgaaattaatagaagatgcaaattcagctgtacatgtgtagattacagatgaggtgatcaaccatagatgaatctctttctgttcatcggactcaactgtcagacataaatattaatattagtgctacttccatttttatttttaatagatgacgtcgttaactttagaaataacatctgactacttgttttattaaaaaatagtgtaaatatgctgaagtgtgagtcagatttaaagtatatttaattaaaaacatacctcaacaaaataagaaacatcatataattttaaatgagatatatattttttataggaaaaatagtcaaatgtcatgtcaaaagttagtggtatcactatctattatatactaaaagtccattaaacttcctacaaacgcttctaaacctctacgtagcactcctataaatgctcctataccgccacgtggcactttaatttaaactggtggacctaatattttaaacaattaaattaataatttccaccattaaatattatcttcaagaaaaaaatcggcacgttcccctctctgttcacaagttcaggtaatatacgttccgaaagaaaagaggaaatacgtgcgcatgtatgtacttactcccctcccacaccctctaccctccccatccgtgtctctcctatttatttcctattttttagccaacaaccaaatacatacatagaaattgtttatatacagatcgatatattaattaatacgacatgaattatctattattattatatagtaaaagtctattaaaagtaatacaaacgctctcaagctgtgacgacgctcttataaattaaagtaaatataagaaattctgagaaaaaaaatcatcttacccaaacctatcgaccttatccgtcagagtgcgtatgaacaacacatgtatatagttgcctcctcaccgatgagacgaacccactggctctcgcctcatttttttccttacaacaattaatttaaccaccgaataaaagaagattctaaaaattacctaaaaaaatatccaccttaattttttaataaaattggtggattaattacttcataccattagacatctaacaactttctaccaacttaattatatttcttaacttgtatacgaggtctgtttacctatacaaatatgtaaagctaaatcaatgtacaaaggtacaaataaatccgtctatgaatgaagctcttttttattactatatatctccgtcctataatggatcctaacattttataagaattaaggaggaacgaaaaatactaagatacccattattaaataaggctcattaaataagggtatgtagagagttagaagatggttagagtaatgttggataaaaattaaatgaagaatggctggagtagtattaaaaatcccttatattttaggttaaaatttgaatccttcgatttatggatggaggtagtagtacgtgactatgtctttaattagataaaaaagtcatattatcatatttttaatagaaaattccttaaattaatatatcctaaaatatacagagacatatttagtatacaagaaaaaaaatataacttaaaagtttaaattaagattctaaatattttaaaaaagaaacacatgtagtagaaaatgatagtttcatatgaaccagctccattgttgtgacatatttttctcataaatttaagatgacatgtgtaaataattttagtttataatttgtagctactttagtttaaaatagtcaacctaaaaataatatggttggaggggcaatgccttattagctacactcttgcttaactagcaagatgaaactactcaagtgcacataatgctgtttatggacaacacatgttacatcctttaaattaaaaaaaaacatagaccacatcctaattacactaggatgtcacatacaccccctcaaaagacccgacatctccgtcggtctaacttacttgcatagtcgctgtaacagcccaccctccagaaccacgtagctaagcccaaccaccaggtgggctcacttacacataccagtccacttacactttcgttatcgcttcgtgaaaaagggttaactcaggagtgacatagttggagggatgaggctataaaagggttaactcaggagtaatatagttggagggatgaggccttataagttggttatactcttgctaaactaggagggtgatactaaatatatgcacacagctttcatgggccatagttactgtaacagcctgctctctagaaccacgtagctatgcccaaccaacgggtgggctcacatacacaccagtccacttacaatagtccagtgatcaaaaccaactttcaaaacaatcctaaaaatgttattaataaacaaagatttagaagagcaaaaaaaaattttttaaaaaaatcctatacataaacattcgtcacaaattttcaaacaccactaaaaaaggtgcccgcgcatctgcgcgggctaccttcctagtttagaaaacagaggtagtagttaatttctttttccgcataaagccctcatcgaccaagaaaaaaatggagggagcattaaaatgaaggttaattgattgtgcattagtcgtcgctgcgtagacacatctccttccttagcctgtattacatacaaccattagatgatgccgtgagaatcatgtgtgactgaccatacaaatttcatcgtatgcactcagaataaatcagtagtgaaaatagatgacacaggacatgcataattgatcgatcggttcatgcaaaattgatgggtacctgcatcttacttagaatacagatgcaagggtggaggattctgacgatagaagattgcatgcacggcaacggatgcgcaagcgttattttttatttgacgaccaacatcttgatttatgacctatcaaatttagaggttcagacgatggcaaatctcaacccaaaaggttttgtattgtttgggatgcatgagaaacctatctggattgaggaaaaacattacctggaagagatctgaaggtcatcacttgtgtgccatagagttttttccatggctttgaaacttcaacaaatttcgcttgcactgatgcctccagttggagtccagatcgaccatcttgtgtcgttcgtcaccgctgccattgctgcaggagacaaccctgtttctctctatccctggtgctggagataactattcgtaatagatagaataaaataacctccttgctcgatcattagatgggctttaacgtggcccatcagaattgctatgcgtagctaaattattttttacatcaatggttactataccatgatttatctaatcaacggttggatttttctggttaacgtgagagctcgtaggaagtgtccaattagtataaatatagatagacggatagatagatagatagatagatagatagatagattggccttaagtaatcaatttcgttaattagtactccccaattgatctgcattcgaatttcagatgaaatgagagaatcatgcatgtatgtatgtacgaccctatagctcttttatcacatcagggccggctccattttattaccttagcgattgctgactctgattgtcttggcgctagaggacctcctatgagaacaattatagcgctaaccacacaacgcgaggcgaatcagctatatcgggtactcacatggtcataggtcacaattgcgtgagtgcctatatatagcgcctaatcacgccgccgttggtcgttcgggtacacgtaccgccgtcacgcctctcatcaatcgcggaaacggtagtatagtactacgcacgttcagcgcagccgcctctagcttcactctccgaagcacacagacacctagcctgcacgtacggttacacgccacggcttacgtgacggccaggagcgcatgcgatagccggccgcgcgcacctagcactagtatacttcccaagcatatttttttcaaatacttttatatagaaatttattttaaaaacatcaaataaacacatttgtaattttgtaatttttaatatttaactagtatatatttcctgtttagcgtgcgaagtaacaaggcctaaacgagctttaaagagagcctaaaaagctccaaactcaaactggatttattaatttgtcgtgcgtaccttctgcgaaaatcctcctactcaccgattcacgccgaaaagatcggaccaccttttgcatgcatactcctatctattgttgtgcactttatgcatgtagctgtcgcctactagcctaccttcctttatctatccttcccatagataatgggttctttaataagtttcaaactattttttcacttaaattattattttgatctatgatccgattacaccattaaatttattataattaaatatttataacaagatcatacttgatcatattatgatgaaaaacaatagctttattaatgttgcacgtgtttttctttaaatgtttcaaccaataatctgtgatgtcacagtggcgctctcccatcgcctttcctcctcccctttgacagcggccgagtgggcctctccgcctccttcacggatccaccactgactggcctcgagaggggtggatccggccatggttggcgggaggcgtggcagcgacgggtccaatgggggggaggtgctcggcggcggtgagaagtgcagcggtggcggatcccactatggggaatggggcagcaatggatccagtggggaggcacatcggtgtcggatcctgctcgccctcccgcgcggcaatggcaatgataacgagccaccggggtgatgggagggacagacccaactcccccttcctctcccgcatggatcctgccgccctcttcctcgcacgacgaccaggaggaggatgatgagaacggtggcggtggctttgagcgatgatgaggacggcggcatcaacttcgagcaacgacataagcacccacatgcaaaatctaatttatggttttgggatttatggatttttattttttccttttcgcgtgcggacaatatatgcacccacaagcaaaatcttattttcgcatgtgggtgcgccacccacatgtaaaaatcactattttcgcaaaccttcttggtcagactggcagcctaaccgcacgaaaaaaatatgttttgaccccatgaaaaatgctttctatattagctagtgttatttattctagtgtcttccattttagtttccgataacagaagtacatgttggggtccttcctcttccggagatccagaaagagttgccaacaaagcacgcgtttgtaacgtacacccaactttcttgccatatgcatcttagttgtaccatgtgcaagctatatatgtatattttgtaatacaactatgcgagaatgcatatgcatgcagaaacggacctgagcaagtcagacgttggcgcattaatcgtccctggcatacactagctcaatacattccattttccaaaaaaaaaaaaagtcatcccttcctcatgaatgcatgaggcgctgcatttgaactggtcatttgcttcttgatcaatataatttgctagatcacaaaaaataaaatagcatattcagtttttaattatctgcaagtgatcacacaaaattacatccatctgtatttatatgtttgtatctatctagctctatctactgattgggcactttttaggtaactctcacattataatcgaaagatatgacgattgattgggtggattgtattgtaataaccatagatcgtattatataactaaactagtagcgtgtccgtgctaacgccacagcaaaattttgtactgccagcaaatccctagctgaatttcaccgaattaattaacatttttctctcacatatatgagagggattggacatctctgaattttattgccaccatttgtttatctgttcacattattttcttgtgatcagtgcatcagaccttgttttagacaaaagtctttcgcccagctttaggccgagttcagttccaaactttttcttcaaacttccaactttttcatcacatcaaaactttcatacacacacaaactaataacttttccgtcacattgttccaatttcaaccaaactttcaattttggcgtcaacacacccttactaaaagcatacgagtatgatacacgttttgctggagtttcaagcttaacttgcagcagcatgggacaaaggcaaagctgctagctcagcagataggcagaacaagccagtctgagctaagcagcaaccaaatgccaagctgctaaaacaacagaaccaaagctatatctctagagaacggttcatctcgagctatctcaaaagggaacggtccatttcggcacaaaaatgacagcaacagacatcaaacagttgcagaactaccgaatacttatagctagctggaaaactgaactccacggtctcccatcttcttgatcattagttgagacttgatcctcatctcgtgaattttgacaagcagcaatccctttaaagcatccaagtaccctgccagcttcgaaggaatcaaaggtctccactgttgcaaaagggaaacaactctacaaggcaaatgcaacatatctgaaagcaattttttttaacacccaatcatttcgggttagcgaaatggcccatgttcctgcagagaacaaatacaagaaggtaatattctgattttgtttccaggctattgcagcatggacatgaccttaactctagaatttgggattctatcccggtgcacatctctaaaatagcaacctcaggaattttgctggagcacatttgaacattaagtgatcaggctatattgcataatatatttcttgtgatctgcgagtttgttggtaaaaatttctttgatgtgatttaaccacaaacgctgatgtgcagagataaagacataggtaataaggatattgacataccagcttcagatattgtgctgcattttcttgaaccaatccatacatcagttttgcacacctaggccgtcccaaattggcatttcctcaagcaggatgccagcgagaaaacatatgcaggtacctgcatacctgggcatgcttgatgtgggtggtagtcttgtcccaggtgctctgtacaacagagtttggaggatggagttgtcgagctgtgaagtccatgaagatagaggttccagatttggtctgtatagaaggattcatctcaacacagtgcaaattaggagagaaaaatacatcatgacagattacctgttcaagtggggaggtagtgtccgttgtgttcaggtagaaggcacgactggcttcgtcaatggcatgccatcaagaactgacacttgatgtgatactccgtagatcttaagtggaaaataaatagctagaaggatgcaaaggtcatctctcacaattccttattgaagcgtacattgaatgggaaatgcaatctgaatcatatttttctatacagtgcactccaagtaagaggtgaaactgtaagtaaagaaatttgctgccaaagcattatactcgtacataataataacaaatggccttgttttctcataactgcaaaacagatttaatctaaagaaaaatacagaaatcaaagatcttccattcctgttttgtaagctgaatttgagactatttgagttttccctcgggagaaaatgcaagcatacctacaaatcaacaatcatgaaaatgaattaagattagcatatgaatttattatattatgcttaaacacaatcatattcagtcgtaaatctttatctgacttttacttacatgcacaaatactccaattgataggatgattaatccaagatgctactgtactattgccacatgcttctctacatgggtcataaactcctaacacaagcgtacgacatggattaataatattctcaaattcttggttagaatccatctgtgccactaaagttacaaaataaaagctctgcattactgaccatcacccattttgacaaaagaagccttcccatgctgaacaactgaatttgggaaataataccaaggaatagtaaacaaacaaaatggacctgcataatctttttacttgcaaacatgggtgggaacatactttgacctgatctgttggagcgctagctagtgacatgtctaattgctcacatccaaacagtaagttacttttatatcatccaaggaaaaaggaatttcctactgcatcataagattttatctactaaacttatgaaccaaaacagcacaagattctacatgcattcatgtaaacagtcaggcaatggatgaatcggggaaaaaaatggagggtgtagacaaatatcgagctgtcaattcattcatataaataattatgatgcaagacatcagatcggtagataaaataaggtacacctatcatcgaaggatttttttttgccaggccatttcaacatccttacagataaaatgggattagaggattttttttctcttctgttttttgggtttgcactgaattttgtgtgggtgtgtgaaagtgcaattttactgcattagtacaggatatttattaaaaaaaaggctttaaattgtgttttatatttcaccgggcactttgtgttttgtatgaaaggtgctcttacctgaaaaattatatgaagagtgattgactgtaatagtattttggaatttcacaacacatatgtcaaccgttaaaaaaaactcacttgatattgttaatgatgttggaagtcagtaactatggaagtccaaagctgaaatattgccaattctttacaaatgcactactaatatagctatgtggagctggagatatgccctacacgttttgaaacacagaaaccatgcagttggttcaaacactgtagcatctaggaacaataatcataaacaaatactgcctgacaataacatagaaacgctgccaatcatgtgcaattaaatatgttctcatcaaggcatttcatcgagcagtacgagtgcattggaacgaagaatacctgtccagagcgagtgttgtgagcaggatgtgccacggcgtcggtcgggcggtgcgaatcggcggccgacggtgaggggagggatgacgtcggcggcggccctcgtcgacggagtctagcggcacgatgagccagcggttagaggaatcggcgggcggcgaaggtcaggggagggatgacgtcggggcagcgagggcggcggcggcggggtgtaggcgtgtcatccgacgatggcgaggggagggatgacgtcggcggtgaagctagtcgacgggtgtcgggcggtgcgagggggcggtggttagggttccggcgatggtgaggggagggacgaagtcggcaccggggaggtgacgaagttggtggaggcgggtgatgaatcccgaggtcgggcggcgagggcggcggaggtggggttggggcagcgagggcggcggatgtggggtggcggcggcgatacgagaaagaggaaaggaggagcgaaaggagagagcaggcgagcgaaaggaggagcgcggcgatacgagatgagaggaggagcgtggatcgttggatgcaatgggaggatccttcgagcaatcttagcctttagtagtagagataatatagatttaaaatttgctccctctcagtcccaaaattactataatacctacgattcagctaataaactatcaggaaagaaaaataatatttagatgttcctcattaaagaaagggtgattagaagtgtgggagggtggttggggtaattaagatgaaaataaatttaaataagatgtggttaaagagaaaaagagttgacaggtgcaacccgcctcaaagaatagaaaaaaccattctagccctagcttctttttttaagtccgatatcaatgaaacaaatcaactttttagttaattcagtgaatcttataaaaatccttctacaaaagtgcacctattaggttgggacgaaatatgaatattaggatagccctttatttaggatgtagggtgtatttaggatgaagcaagctagcttaagacgaggtcaagaaaatgtccatttcaaattaagtactcctataaggacaatgcacctgcaaaagaattttacacacttgtgggtataacaaaaagatgaattaattagctatacacatgcaggaatacaactccgagtgacacagctaggggaaatattgtcttccatgaatcaattgtgttacataactaatgttcttgctgagagtcaggagaaagcaagtatgctggtggatcacttaatcagggcatgcaccagaaaagaaagatgttgctattaaccaagatgtacctgttatatattgaagattcagattcttcaactgttgagcactcaccgaaacattctattgcaaaagataatcccaaaagaaatactagacctcctcgaaaatatattgaagaagcgaacatagttgcttatgctttgagtgtggtagaagaaattaaaggtaatgcagaaccttctatatattctgaggctattgtttctaatgattgcaatagatggataattgtgatgtatgatgagatggaatcatttgaaaagaatcgtacttggaaattggtgaaattgtcaaagtagaagaaacctatccgttgcaagtggatattcaagaaaggaaggtatatctccaagtgatgaggcaggacaaaaagcaaggttagttgctaaaagttataactagatttcaagtattgatttcaataatgtttttcccctatcgtgaagcatagttcaattcacatattactcagtattgttgcaatgcattattttgaactaaagcaaatggatgttaaaactgcattttacatggggagttagaagaggacatttatagggatcaacctgaaggttttgttgttcgtgaaaaagataacctagtatgtaggttgaagaaatctctttatgggttgaagtagtcacctagtcagtggcataagagatttgactctgtcatgctttttcagaagtttaaaatattcaattttgatagttgtgtttatctcaaagttgttcatagttcaactaaatatttgcttatttatgtcgataatatgttgattgctgcaaaagataaattagatatagcaaaattgaaggtacaattgagtagtcaatttgagatgaatgatttgggtgcagcgaagaaaattctagatatgaaaattactagagaaagacagtctgacaagttatatcttagtcataaaggttatattgaaaagttcttcatcgtttcaatatgcatgacgcaaaaccagtcagtacgcctttagctacacatttcatattatctttagatttatatccataatcaggtcgtgatgttgagtacttgtctagagttccatacttaagtgcagttggttcagttatgtatgccatggtatgttctcatcctgacttatcatatgtattgagtgttgttaatagatatatggctaattctggcaaagtgcattggaaagttgttcagtgaatcttcagatacctacttggtacttctagtactttgttcaatgaatcttcagatacctacgtcgtacttctagtgcttgtttgtagtttgggagatctagagatgggcttgttggttatgtggattcagattttgctgcagatttggacagaataagatcgctcataggttatgttttcactattggaggatgtggtgttagttggaaggcaagtttgcaagcaactgttgccttatctactattgaagcaaaatatataactatttctgaagattgtaaagaagctatttgtcttagaggtttgtacactgagcgttgtggagttatgtcttgggttgatatattttgtgatagtcatgagatattactttatttgaggtgtgattgctgaaggtgatgtcaaaatatgcaagataaatattcatgatatcctagctaatatgatgacaaagccagatcccgctacgtactaagtttgagctttgctcaagctaggttgatgttacagtatagtcctagaaactatttggcatgcgttgattttacctacataaggtattttgggtgattgatgattgatttttatgctacaagaggaaatttgttttaaggtggagattgttaaatatgtgatctgaattttaggcatacaatatattcggattcctaataggacttcacgtcttttcctattacgtgtcttttttatctcctatatatactcatgtaaaccgtatgagaaggggtgacatttcaattgtttttctcttatatttgtaatcaactcctcaatagtgatcattgccggtcggcgcccgtggctttttcccgtaagtgtttttcacgtaaaatttgtatctccattatgcatctttttaatttcataataaaataaaacatcttatgaaaactatttcatcccaacttatcctcgttaagtgaaacaataaacacatttgccaattattctatcacgaatatcacacgtgaagactaggtgaagtcaactgtcagcctgcgttaccaatagcacataatatatgatgaaatgcaagttgcaaaagaatctcacagatgcaactagcaaaacgactaactggtttccatgcatgtcggactaggacaacgggatcagctgtactcgcgtgatgctaattattgaaaggcaaagcgctccgaaatctcatatataagttatccgtgtgccatgcgatctggtaccattcgccccagacaccacatttcttggtacatagctagctaggatacactagttgccggaggatcgaggtcggtcgatcgccggctcgatcgttgagctcccttggttctctttcttgtagtggattagtggcgttcgcgaagaacccaaatacccaatggggactgaacctgatccaatccaacaagattcgcctgcacctccacgtccgaccccggcacctcaagctacgcctccacctgctattccagaatccggaccaccgccacctcctgcaccagacatgccacctccacctccgaccccggcacctcaatcttcgcctgcaccgccacctgcaccagacatgacacctccacctggacctggtccggcagcagcaccttcgccacattctcctagtcctagcaacgcaccttgggtcgcacctgcggcggatattccgcccccgcccccgccaccgccaaatccacttccggtcattatagctgtaacagtcccggtgtgcatattatttatggccatccttctctacgtatacgtcaagtgccgcagaaaaaggatggcccttagcacgaagcatcaacatatcaaagccgccgccacacacgagagcgagcctaacgagcttcgtgacgctgaagccggtgcgctcgagccagtggcgtcgtccgccggaccaaaccacggtaaagagtacggcggcgacccagcagccgccgccggaccaaggcagtacgaatatggcgagcgagtggtgtccgacggcccgaggcacggtgcagcgtacaacgagctcgttgccgctggaccgaggctgtacgagtacggcgagctcgcggccgcgacgcgtgatttcgcggaggaggagaagctcggccggggcgggtttggcagcgtctaccagggccgcctcgccggcggcgtcgaggtggccatcaagaagttctcgtcggactcgtcgtcgcagggcaggaagcagttcgaggccgaggtgaagatcatcagttccctgaggcatcgcaacctcgtgcgcttgttaggctggtgcgatagctccatggggctcttgctcgtgtacgaacttgtccagcacggtagcctagacaagcatatctacaacgccgacaagccattaacatggtcagagaggtatgcatgccacacaagatctccttaatttgaccatagagatctaggttgatcgatgatctctttggtatgttatacagatcatgcatgcataatcattggttttgtcgatatatatatataggtataagatcattcttgggttaggatcggcactacgctaccttcacgaagagtgggagcaatgcgtcgtgcacggcgacatcaagccaagcaacatcatgctcgactcgtcatacaacaccaagctaggtgacttcgggttggcaaggctcgtcgaccacgacaagggatggcagacgaccaaggccgtgctcggcactgccgggtacatagacccagagttcatcaccacgcgccggccgagcgttcagtccgacatctacagcttcggcatcgtcctcctcgagatcgtctccggccggccaccggttctcttgcaggaaggcgcgccgccgttcatgctgctgaagtgggtgtggagcctgtacggccgaaacgcgatcctggacgcggcggacgagcgcctctgggccgccggtggcggcaaagaggacgacgcgcggcagatggagcgcgttttgatcgtcgggctgtggtgcacacagcctgacatggcggatcgtccgtccattccacaggctatgcacgtcctgcagtccgatgacgcgaagctgccggatctctggccgcagatgtacatggcctcgccgtcgccggcgaagaacttcgcgatgggcgagtaccgtctctccggcgtctcgtccttcacgagcagcggcgtcccctcgtcggctaccagtggcacgacacggtcgtctggctcgtttgcgtactgattccccggccgattcgtggaatataacctgcttcgtcgacctcctggttatcgatctcgtaaaatgtgatgtactgtacgtcgtaccatgcttgcatgcatgatgtctgaggatctgtgtctcggtctctcggagatggtcgatctctctcttgtcatattgtatcaaccgtatgtgtcgtgtgttgcggtgtgagtgtggtgtgattcgattttatatttcggaaatgctatatttctggcaaagtttttccaattgatttctttcacatctttcaccagcccatcacgccgagattctcgcactaggcaggctgggacccgtgacggacacgcccgacggcttcttgttgttctgctgaaatgggtgtggaacctgtacggccggagcagtatccttgacgcagtcgacccgcggctgaggggcgacgacgatgacgaggagcacagcgatctttggcagatagagcgcgtgctggtcgtcggcctctggtgcgcgcaccctgaccggagcgagcggccgtccatcgcaccgacgacgtgacgctgctgcgcgccggcgctgccgcggcagttgtacagggccgtgccacagctcgcaatcactggacgtgcgtacgggtctcgatcggttgacgccttgacggctccgccggcgccgtcgttcccatcttcggagaccaccgatgggaccgcactgtcttccgactagctagccggcatctcgttgctggaaaaatcgatgtgtatttatagcttaatctccatttttctcatcctttttaaagatccaaatatatctgttttctactagaggagaatggatgttcataaatgtttaatgtactcagtttcggaggacggcagctaatttagctcagagcctgagattactggtgaagcaacttaattttcttgagaaatatctgctttatccataagagtacaagccaaatcccttctcttctttcaataaaaaaaaactttttctggaaaaatgctaatacaagattccacaagctattttaaccggctggaaattttcaagggtgagcaatgtcgaatgtattccctacgtttcaggttataagacgttttgattttggtcaaagtcaaatcgctttaagtttaactaagtttataaataaaaatagtaacattttcaacccaacataaatctattatattattaaaagaatagaaaaacgagcctccacgttcgctctcatggcctagaaattctcacattaatcggtgaaaaagaaaaagcagagtccatatagaaatacaatttagaaatagctgaaattcggaattaaaaaataaggaatattagaaaaggagactagagtccatatagaaatacaatttagaaatagttgaaattcggaattaaaaaataaggaatattagaagaggagggtagagtccatatagaaatacaattaggaaataactgaaattcagaattataaataaggaatattagaagtagagtatagagtccatatagaaatacaattaggaaataactgaaattcagaattaaaataagaaatattagaagtagagtatagagtccatatataaatataattaggaaatgactaaaattcggaattaaaaataagaaatattagaagtagagtatagagacattatagaaataaaattaagaaaaaaatagaaattcggaattaaaaaataaggaatattagaagtagagtatagagtccatatagaaatttaaaactaactaaaatttagaataaacataataaaattaaaagtagagtttagagtctgtataaaaatataatttacaaataactaaaattcgaaattaagaaaaacatgggaagaagagtttaaagtcaatataggaatacaatttagaagtaactgaaattcgaaattaaaaattaaagaatattgaaagatgagtttagagtccacatagaaatacaattagaaataataaaaattcataaataaaaataaataatattgaaagaagagcatagagtctatatagaaatacaatttacagaaaattaactaaaatttgatattaaaaataattaataactaacatgtatataaaatacaatatgaatattacacattagtagttttataaagttattgcaaaatttagaatcatgttgtcattttaatatatttgaataatacaataagaaaacatatatgctattatataagagaaaatataatgatgctagccgcgcaatctgtgcgggccaccatgctagtttattatgaaaacatattcaattattgatttgatgacactaatttagtattataaatattactatatttgtctataaacttagtcaaacttgaaacaatttaactttgaccaaagtcaaaacatcttataacctgaaacagaggaagtacatatcatgacacgtttagatttcactcagtctggactccaccatattataataagggcaaaatttgctacatgatactcaagagatgtggtctttgctacaagacactccaagaacgtgaattaatttgctcaagaaaaataaaagtgttaatttgctggtgcacaccatacatattattttatgatttcctattattttatgacaccatacgtcgacgggattcgcgaagatggctggcggagaggtcggggcagcgagcgacgatgcgaggtagtcatctagcaaaggagacggcgggcgacaaggcgtggccggcattaattagaggaagaagcctcccccgtccctgcagcttggtacggctgcaagcaagcgaccgccgaagaggcccatgatggcaggaacaccccttggtactaccagcagtttcgtgcgcctacagttcttgatagttgttggagaaatgggaacaggggtttccctcccccttgggtgcttagggcactacaggccccaccaagccatacaatatctgcatcttcaaggtcttaagaacagtgtcgagaccacaagaactaccctaggagtgctcggggcgctatgggctcctccgggcctatcccccgagggcgatctacatattcaaggtctcacgaagagtgtcgagacctacaagagatttagatcttcaaggtgtcaaaaagagagtccagacctacaagatctacatcttgttggtgcatcggcgggcaccagctggtacagatggcttatcttaagttatgcccatcttgaactccttacatcgag

SEQ ID NO: 23770 - DNA, 978 bp, Oryza sativa
ggcagtgtctcgcggcggtggggacgcggtccggcggcgtgggggcgcggcggcggcgtaacgtagaggcctggcggcgtacgtcggcgtcggcgtcgtcggcggtggcggccgtgccgaagtcgttcgtcggcgaaagagagagagagagctttatcgagagagagagggcgggggctctcacccaagagacgtggcggcggcgtctgtggcggaggcggcgaggaccgccaggcgacggtgagagacaacggtggcgtcggcgcggggttgccctaggcagtggctgcgaaggagaagccgatgctcgatctcgatggaaaaacgtctgagtgttggtggagaagacgagtgtcacgcccagaaattcccgaatagaattccaagcagaatgtgtattaaaacccccgtccaggaccagccggggtacacaaacgacaatgttgacatacagatcctcgtcttacaaacattataaaggtcttacagaaatgcagcggaaaacaaaagaaactggagcttaagccttgactaaaccgcagcgggaacaccactccacaggcatcctcgacggcacggacgaagcctactcctcggggaaaccttcatctgacacatacccgtcctctggggttgggaaaaatagagcaagactgagtactacccactgtactcagcaagtcataccggaatgggggtatgatgcagggaattaacaaagaagagctagagtggttcatttgcataaatactggcatttataaacaggaatttaatgcgaaaacagttgtaataattaagcagtattaaacatccgctgtccaacgctaacccacgttgcgacaggcccagccatccacctgaactatccaagttcaacagattacactagggtgagactaatcacggtgaatctggttgaccgcccataaccgcgggcacggctattcgaatagttttactctgatcagaggtgta

SEQ ID NO: 23771 - DNA, 2188 bp, Oryza sativa
gaattcctgcagcccccccaattcagttagtacgtggaaatcctccaagtatttcccatttgcgtaagttcggttgtgatggatacataccgatctcaccaccacagcgtaccgctatgggcccacataggaaaatggggatctatgtgggattcaaatctctgtcgatcataaagtatttagaacccttaacaggtgatctatttactgcccggttcgctgactctatctttgatgaggaacatttcccggcattagggggagacttcaagtaccaaaaagaatgccaggaaattgattgggatgcccaaggtattcctgcctcagacccacgtactactgaaactgaacttcaagttcagaaaattatacatttgcaaagacttgcaaataacctgccatatgcatttactaattataaaggtgtgactaaatctttcattcccgctcagaatgtgccagaaagagtggaggtaccaaataaaaccactcaacttccactcactaaaaagagaggaagaagtatggccactcagcgagaaacaattgctaataagcaaagaaagatggtaaatgcaaaccaacctttagttagtacacaccaaattgacactatatatcaagcagatcgtgatagtctgcaaccttgctcggtggtgcacaatgctgagactaggaattcggaagaccatagacacattgtttcgggagatcacaatgagtttataagggttgatgaaattgccatcaactactctaaaactagagaatcttttgatagaagagctacaattgtcgacattaatttttctgaacaaattgctgattgcctccatgttgatccagaacctaggtctataaaagagtgccaaaagcgctctgactggaacaaatggaaggacgtaattgacgcagaattagcctcgctttacaaaagagatgtattctcggctgtaatgcctactcctcgtggtatctttcctgtgagatacaaatgggtttttgtccggaaacggaatgaaaacaacgaggtggtgagatataaagcaaggcttgtagcacaaggttttacgcaaaaacctggcattgatttcaacgaaacttactctccagttatgagtggtataactttccgatatttaatatcattggcagtacaaaatcgtctatttatgcaattcatggacatagtgacagcatacctttatgggtcacttgattcagatatttacatgaaggttcctgacggaatcgacatcccgaatcagaaggtaaatcgtaacatgtattgtgttaagttgcagaagtcactttatggcttaaaacaatcgggcaggatgtggtacaaccgattgagtgaattcctttcgctaaagggatacactaaaaatgatgattgcccgtgcgtctttatcaaaaagtccaccacaggattttgtattatctcggtatatgtcgatgatctcaacatcattggcaatacacaagatattaatgaagcacgccttcatttaaagacggaatttgagatgaaggatttgggtcaaaccaaattttgcttaggtctacaacttgagcatttaccttctggaatccttgtgcaccaaagtgcatatacccagaaaattttggagaaatttaatatggacaagtcatatccttccaaaacccctatggtggttcgatctctagacgtggagaaagatccatttcgaccaaaggaagatggtgaggatgtgcttggacctgattttccatatcttagtgctattggcgcacttatgtaccttgcaaatagtacgaggccagatattgctttctcggtaaatctattagcaagatacaatgctgctcctaccaaacgccattggactggagttaagaatgtctttcgatatcttaatggcacaagagatcttggacttttctttaaaaagaaccaggattcaactttaattgggtatactgatgttggctatctatctgatccccacaatgctagatcacaaacaggattcgtatttttacaaggtggaactgatatttcatggaagtcttctaaacagactctagtagccacttccacaaatcattctgaaataattgcattatatgaggcatcacgtgaatgtgtatggcttcgcagaatggttaaccacatattaacatcttgtggtattggttcatt

SEQ ID NO: 23772 - DNA, 2429 bp, Oryza sativa
aaattattttatcctcatgagtttcagcaacatggagagataaacatcttacaaactaagtcatgtgataatcttgctgatttattcacaaaatctctaccatactccacattctttaaatgtgtcaaaggaattggtatgagacgacttaaaaatttgcaggattcagggggagtatcttcctctggaaaataacctattttcgtcatattatactctttttcctttgtatgagttttaccctttaggttttctcatccaaaatttttttaatgagataatatcaacataagcttatatgtcttatcatttggcttttccccactggggtttttactaaatgataactgtagacattatactattttggatcatactatgagctttactcatagatctaaaatagtcaataatatatatcacggttctctccttatatttcccactgggttttcgaggagttttacgtgatgtatttaatatactgactataattatttctaagattatctttacagatatatggaacactaaatgagtaatgatcaaagttggattcgatcaagggggagtgttatgaaatatttgggtgatctcatccatctatatggatagaacagcaaccaattctgggacacgacggttggtcgtgccccacacctcttctcgcctcacggcgagaaccatcgcgtcttctgttgccgcctctctcccccatatatattgtaaccattgttatcaataaaggatccgctcattcattctctacattcttgtgtgcaactctctctctctctctctcgatccctctcgctcaatcaatcttatacactttcaacacgatctatgatccgattacaccgttgtgttcataacaattaaatctttataacaaaatctcacatgattatattttgatgaaaaattataatttatttttataatatatctaaattacttttaaatttcactaaattactacttagataaataaaaataaatttagtaaagtctaaaagtaatttacatgaactacaaaagtaacttaaaacaaaaagaaagtaacttttctgacgacattagaagtaaattcgttatagggataaaaatataactctatctagaaattaaatttaatcagcacaagtaagtttaacaagttttaaaagtaacatgttaattggaagtaacttttgcatggttcagaagtaactttctataaatttgtaaatttgttttaaacattgattgttttttccctttcacttttgtttttcatgtagtatgagataagaagataaaacctttgatggattgtaaataagttagaattaatcatgtataagatgtaaaagttacttccttataacatggaagttacttcctaacatgtaataaattacttttaaattaataaaatatttaaatatattaaatatggatcttgttttgtcgcatattttgactggagcacaatggtgcaaatagattttaaaaacaatatgtgatttaaaagatataagttattaaagaggttaaaaaaatacacactattgtatttatacttgatggtgtggtagctggataagacaaaccagctaccagtagttgtctagtcatgtccataattaaagtgcatttaataataaacaagtaaaaaataatattatatttttaataaaaaataaagatcaaatgtatatttaaaattcaataatatcatcaatgataagctaaagttcaaaaggaggaaaatctcgtccagactttccgacacatcaaataaggaataagtccactctgactccccgaaatctaatttgtatccctcgactacaaaaccagatataacgacacccccaaatattaaaaccatctaaaacaactaactcgatggtttttgagagcagtttcgttgacatggcgtccatgtggtaacccagtcaacaaataaattaaataacaataaagtaggacccacctatcatccccttctctctactatgcgctctcacctcaaggacacgtcgccactaatctctctcacctcaaggacgcgtcgccgcaaccaccctcaccgtgccggcgtggccatagatgacgatggcagatggtgccctgcttcgcgaagccatactcatgctcggcctcgtcgatcaactcccctaacagcgggtgtttggggtgtccgagcagcacggtgaacctccgctgctcctcaccttccacccccaccctaaccgttacacacggcttcagcaccatccccctgctgctgctgcttcccgtgcccgaagaaaaagaacaagaagcttgtgatctcttggtggaagaagccagaggaggaaaaaggatttggggtttgatggtggttagagtaggagagagaagggccacatgttggagctgagatggcgacggggctgcag

SEQ ID NO: 23773 - DNA, 4710 bp, Oryza sativa
ggccccaacagtgccaacccctatgctgccaccgcctccgccggccctttgctaccggcgcaagccgtccagaaggtgggcgggacaggggaggggggagggggggtggccggctcagcgagcgcgcgtaggcgtcggtagcgcaccggagcacatccttgatggtgggggaagaggaggccaggccagagtggagggatttagagaggaatatgtagtggcgacggagggcgaagggggagagggccgagccttgggagtgagaggagtcgaggagacagagggtagtgcagtggaaggactcgtctacgacgaggacggaaacgacagcgaggaggagcaaggcgcgctgggaatccgggtcgaggtgggcggtgtggcccgcgtgcttgtgcgctgcgcggaggcggatagcaacaaggtgaggagacggcaagctctcacgacgtcgtccgcataacaagtgggccctactttattttttaagtttatttgatgattgggctgtcacgtcaacgaaaccgccctctaaaaccaccgagggagacggtttagatggttttaatagttaggggagtcgtaggatacagattagattcagtcagttaagggaatcaaagtgaacttattcccctcaaataaacgtcaacggtatccagcaggctgcaacaggagacaatgggccggcccatgggatccggccggccagttgttggcgcatcatgcacactgtaaaccgggcctcctgtcccgccggcccactgggcggccaaaactttcaacatttttctaaacgccgtctgatgaagttgaattgaatgaaaaaaaaggaaaggcgccgttgccggggatcgaacccgggtcacccgcgtgacaggcgggaatactcaccactatactacaacgacttcattggtgattacgtgtgcggtacagctcaaagtgatattttgttaaccacgtacaaagacggaattttcttatcgaatattagatgcaggcaagtgtaatcatccctataaattttacgggatctcaagatgcaggtcgtgggttttcagtggtttcatgcttgttttgtgcttctcttttttgaacggatctgccatgacctatgaataatggagatgaatcattatagtttctaacgtaaaatttgatactttccgatattatgtaccttatctttgtatgtactttgtcaccgtaaaatttttaaatgttttcaccgttagtttatgctttcgttcggaaacgattaggctcaagcgaccggtgcctaactaaatatcgggcgtctctcaaccacctatttcttaacacctcgtaaccacctcctctctctccttaattgctctccctcctctctatctctcctttatcgctctcacacttacaagcccatggcgaccaaccagccctgctcgcgctccatggtaacggctgggccatggttgtcgtagccggcgaggactcctcacggctgcggtggcttgctagtgcacatcggcatagcttgggactagaagctgggaggaagacgatgacccccatgcagatgcttccattttgctcaagcgatgacgatgacgtagtgagctcccagtagtagcggcaacagggtggtgagggcctgaggaagcgacagctgctcacctcagggtacaaaaagggtgttgtagtatcacggcgtggatctctagcgaagactggaggagagcaccaagccggcggaccttggtaaccctgtgttcgttggaggggaagaaaatgcagtccataccaggtatattctcgtgttttttttttatgtttcagttagttagtgtactcgtgatgtttctttgtggttggatcgaatgttgcagtggatattttgatagtgtttcatattttcatctttgatgcatacgggtttcaaaacgtaaaaaaaaagatgaaaaatgaaacactattaaaatattttgacactcaattcgcatttttagctatctttataatattattgatagatggattgaccgtagagttgggctataatgtctaactagaaatgtagcgcgccatttggcgctccactgtatataacctatattattatttagggtgtgtttaaaacttcaaattttataggatttattaaaagttagttcaattttcatcgaatattctattcttgcatatcatcttatgagcataatcttttgcaatgtccagcaacaattacatgttaacatgtatctgtgcttatttgggatttcgtattttgcctcataactattttgttgatgagatatattcttcttttcgtctataaatttgttaaatttgatggtagctaaagttgttctcacgaagatggcagtgcagatcctccccaccacaaacaaactccatgatatagaatcagagtaagcatctcaagaacagttcacctagcacctctgcatgtattggttagtgcgattccctctccttacaggattcgaaaagggaagctgtaactaattcatgcaaagtgtaaatgttagtcaaggaaaggcgaatagtagcaaacatgcatgtactaactcttagatttacaggaaaatggtcatcacaaccttctttctgaaagcaaacaattaactttctagaaaagtaagtgtttgtaaatcaatgtggtatttatcaaagtttgataactatctaagcatttaataatcttattacttttgatgatttccatgcttgagaaaaactcatgcagtaagataaccgggcaagcatcctaatgagtaccactaataattttggaacaatgccaattgaaattcactctgtattactttaacaaggtaaaattacactttgttgattcatttgtattctaatcagcaaccataatggatatttacattaatatagaaacaatgaagtcaactcatattgcaatagatgactatatagcaataaactatatgaaataaaactcaaagtatacttgatgtcttgctgatcattgatgtccacattctctcacgacacattcaaaaagataaagagatattctgaaatttatttttatagcagtgggagtgtgtaagccagctgatttgcttaccattgtttaagatgacttgatactaagattaatatttacaaataaaacaaatagaaatagattatgttaaagtacgtagtctcaagtattttgtagcacatctattaaattacggcgtaacatatgaaaaacaaaaagaaaaatagtaccatgggttgcatgtcaagcaaacaatgcatggcttcattgtaacaaaaaaagagaaaattccccgtatacccttgaaagttcccccaatcctttctatacccctgagatctgctcattcccttccatacctctaaatttcagtttggatcccttctatacttctcccgtcaattgaccgttaaattcatatcataaagtccattttactcttttggtatcaagaaaatgtaaatttatgaagcatattgatggagtgtataagcttattgtacgcgaatattatatttatgagtttattttgtgagatattatttaacaaaaataatttttatctcacataaaaagatttatcttataaaaaaaattcgtactactataacaaaatatgctatatatacagtttttaatggtaaaaatatattatttttttgttttatctaaaataatttttgttttatctaaaataatttttttcatagataaattttttttccttcgcgaggtgaaactaaaatattacttttgttaaataatatctcacaaaataaactcatacatataatagtcgcgtacaataaatttatacacttcatcaatatactttataaatttatattttcttgatagcaaagggcaaaatggactttatgatagaaatttaatggtcaactaatggaagaggtatagaagggatccaaactgaaatttaagggtatggaaaaaaatgagcaaatctcaggggcatataagggattgggtgaagtttcaggggtacacatggaattttctccaaaagaaaggatttccattagttcaagcgtattagtgaagatgcatggggagtttcaaggttttctaaaacatattgaatacaattcgtaagttttcttcagcgctttcaagttttttcagcaacaaaaagacccctgatgaagtgctcgaactgaatgttcagacaattcaacccaattttcagttaagataaaaatgatttttaatatttcaatttatccatagttcagtagacttgtgggagtacctccctctgtgttctactggtgtttgatacctgtactaatggtctttgctaaattgaataagaaactgaagagactaagataaatggctatgtatcaataaatcgttgtgacttcttaacatatagggtgagacagcaaatttaatatttgttagaatttgatggaataagcttgttgactgagaactatcaaaatgatgaaatttactccattctgaagtcagaatatctttcagatgtagagaatctataagactgaaaaaaggacataaatatgggctagtgttgttgttgttgttagtcaggcagcataaaaagggtgtgaattatagatacttatgtaccactgacgtagactgatcaacattttgggttacaaggaaattaatgattaaagtgcccttagcatagataatta

SEQ ID NO: 23774 - DNA, 654 bp, Oryza sativa
tgttcaagctaagagttctattgttctgcaccattaatgactaccctgcactcggtgatctttccagacaaactataaaaggaaagaaggcatgctccgattgcaagtaacatacacaaagccagtggctgaagaaatcacgaaagatggtatacatgggtcatcggaggtgggtcccgccacgtcacgcatttagaagaaagaagaaatattttaacggtaagagagaacttcagcctactcccaaagatttgttcggagatgaggtccacaatatggtcaaggacataagcaatgagtgtgggaagaaaagaaaacgtaacaacacaaaggagaagggtatgtggaagaaaaaatccatattttggcggctaccttactggaaagatcctgatgtccatcattgcattgatctcatgcatatagaaaagaatgtgtgtgagagtttggttggcctgatgttgaatattctcgggaagacaaaggatgggttgaacacgcgccttgatctacaggacatgaatattcgcagtgaactccagcccatatgagatgcaaagacaggtagagtgtacctccctccagcctgccacacattgtcgaaagatgagaaaatcgcaatgttatcatgcttgaagggggctgcaggaattc

SEQ ID NO: 23775 - DNA, 992 bp, Oryza sativa
attcctgcagcccgcaaatgggaaatacttggaggatttccacgtactaactgaattggggaagtttcatgatatgcagttggtcgtagttggacaaggtcagcagcgtgcagaactgcatgaccccaacatgacgaaggtaatttgcaattcatcaataatggtcgagcaataagcttaattcttttgatcaatgattcagccaaaccattttgtgtgtggacatatggaacagagtgctgaacctgaattcccaatgccatacaataatcatcgaaagcatgggatgtaaattcggcagcattgtccatacggattgattgaatcctatgttcagggtaatttgcctttagccttataatttgagacattaatttggcaaaggcatggtttcatgtcgatagaagacacacatgagaccatctagtagatgcgtcaatcaaaactataaagtacctgaacggtccagatcttggcacaatagggccacaaatatctccttgaatgcgttcaaggaatttaagtggttcggctctgattttgagataagatggtctcaaaatcagtttcccagtagcacatgcagtgcatacgaaattagaggatttgggaaatttatcagtgatcaaatgatgaccaatagagttgccaataatttttctcatcatcccgataccggggtgcccaagtcgatcatgccaagtgtggaatgcatcaacattttgaaaaattactttatacgcaacatgtgcaatgggcttaatgtatgtatagtacaatcccgatgtgagagatggaattttctcgcaaatgcgtttgccatatccgttttgtttggttaagagaagaaattcttctcgattatccatatgggtttcaatgtgaaacccattttgacggatatctctataacttagtagggtacgggttgaatcaggatacaataaagcatcctcgattgtaatttgtgtacccattgggagtgtaataat

SEQ ID NO: 23776 - DNA, 7463 bp, Oryza sativa
catatagttttacatatttcacaaaagtttttgaataagacgaacagtcaaacatgtgctaaaaagtcaacggtgtcaaataaaacgaaacggagggagtatatacatagtagcatcctatgagctgtaatcatgcaaggcatgttcaatgtgtttgcttaccatatatgcacataaagaaggggccatatgtgtacatatattggctagtcatcatttttttatttggtttgatagagctcggttgtgcttaaccagattgaccagagaaagaaagcgacgaccatatttacgttcgaccatatgagacagacccattaatacacctatagggaaaaggcaagataagagacatactgacacaacaaaaggtctaacactcatctagcgcactactataactatagtggagaagccatcaatgtgcttgtcgtaattaaaatctcagttgtattgtactttgtacatatatacatgattaaattattgtactttttgatagacatgattcgatcaataagatacatcatttatatatatatcgaataaggtcatgatctgttcttttttaattaacgtgaaattttctagatgttttatattaatattggaatttcgagctaattaaattattgacctagaatcaatgtggggactttaaaagggcctccaaagagtatagaaaaattatatcaataagatacactatttaaatatatagatcggatagtcaggcatatggtctttctttctttttattaatgctagaatttctagatattttatattaatattggaatttccatctaatttattgacctagaattaatgtgggaactttaaaagagcctccaaagagtataaacaagattagtgctaaggctccatctagatctactacatatatatatgtttgcaccattgtccactggacgtatgtatatacaatcagcagcatatgtttgcacaagaataaatatgcataaccaaagcatgctatattctataaattgcatgcaaggcagcatttcatatagaaccaaagaaggggaccatgtgtacatatattacagttgtatacgtacgtgtaccaatataagccggtggaatattgaaatatcaatcgtatattgtaaatgcatagttacacataattagccctcggtgaccatgatctgaaagatacttcatatcgtgttgggttttgtgctgatcctatacgtgcgatacatcatttgtagagattaaatggtcacgatagatttttctttttcttgattgatgtatgcgagaataataaatttttagataaatatagcttatatatatttacttggaattaatgtagggacccttaaaacaatctcgaattaataatatagaaaatacaattacagctaaaattcatacttactttagaagaggaagatctgagagagcgtacttggaactatccactagacagtcaataaatgtggctccagaggagtaatattatacatagccatagcatcctatgagcaaaaaacatgtaaggcatgttcaatttgttttcttacaatatgttcacataaataaaggagggaccatgcgtacataggctgtacgtgtttagttgccctgaaaattagaagtttggttgaaattgaaacgatgtgatagaaaagttgaatgtttgtatgtacgaaaattcgatgtgacgaaaaagttagaagtttgaagaaaaaagtttgaatctaaacccggccatatatttgctagacatcaaattgttttggtttgatctagctcgattgtgcttgcccgattgactagaaaaagaaagcatggctcatatttacattcgatcttgcgagataggcccattaatatcttaatagagagtaggcagacaagagctagagatactgacacaacatttaagggtctagcactcgtctagccaataggcccactgggtctagcactcattagaagttttttccttcaaaacgtgtaacaaaatttcaccctaacctactggcacattatttttttttcccaaatctaagtccgagcaggcaacgtacaacaagtcagcaacgtcgtctcggctgaagtgacggctccttcttacgacgcgtgacggaaagtgtcggctgaccaaacggcgccgtgcacgtcgtgcgtccgtccgcatctacagtccgtgatacagtaaatgaacagtagtaactcgttaccaaccccaactgcacgctcccaacgggcgctgtcaaacgcaggttaactagagtagagaagccatcggtatgctaggtggaatcaaaatatgagtactttggattccgatcagctgcagtcactataacttaagcagcagtagtgcatgtcattagatgcaaatcggatggtccagattgcatgctgtactgcacgtagtactgtagcacaatactgtagcataaagtactgtatatatatatacgtatacgtatatatatacacgtatatacgtatgtatgtatgtgtgtgtgtgtatatatatatatatatatatataaaagcctgtatactactcccaggagtagctactcctattgtaaccatcggacacctgtccacctcacatgaaggtttcaggtgtcaacacactaacagagagaaaatatccactaatccaccgatgcagaaaatggattttctttttttttgaaaaatcggatcactgcactgtatgttctgcatgctgaggcatttgaatgttctacatgcacggcttgtcgatccgcacgcatgcaaggccgtgcgaccaggagagtagttagtgtggaggttgctacggagactccatataagtttacggtgggcaagcagatcatttctgcagatatttgatggagcagaaacactccggtggaaagggcagaacatcgtcggtgagttctgttccgtcgccttctgtggaaccagaagacgtcgacgcgtgatgtcgagcggcagaagccggtcgtggccgtaggcgtgtcatcgccggtgagttctagcaagcagcacaatctggcagaggcagaagatggaaccgtttcagctaatggtgttatgcagcagaagcctgccgcagattggtacacatcggagattaatttttgtttatgttctattgaaatttttttctcttgtttgtttgtttggttctgactatttgttgcgttctttggtcaggaatggttttgtgcattgcatggatactgcttcccggagtgaagagatgaatcactctctccagaaatatgacattcatttggatggcatatagccagaaatatatatgacatgtagccagtagtgaaatgatcaaaaaatttgtaatatacctcaaaagaaaatagcagaacatcaattggaagaaattcataggaaaaaactggccggcagaaaatatatgttagccggtcaatttgaaaaactggcagaacgtcagctaaagaaattggcagaacatcatcgccgttaaaaaattgttggcagaacaaccacctaatttttctctatacccagtttttaagagcagtacatattctgcctattgaaagctgacagaagtacatattctgcctattgaaaattaatggaagaaaatcttctgctcagaatttaatcacatccgcatagaagaagtatgcaagttcgtgtaacagaaagctaattaatcttccattccaaaatcaacggataggatagcagaatagagtctgtgagctgtgaaaggagcagaacatcggatggaaatggagtagaagattaatttcaaagaagaaccttctactcctgttcctgtaactaaatcccatcgtgtaatatataaagcagtttctgctcgtcagtgtatgagtaccatatatatgcatcaccgtaggacagaagctctagtctggaatgtgtgcagaaaacaattttctggtctctagatccatagctcaacttctgctcgtataattgaatctcatcattgatatgttctgctcctcaaaacgttttaaaaaatgagcagaaaatagaaaaggtggacagtaggtaaccggaaaaggagcagaatatcggttaggaagggagcagaaaatcggaagtttggaacagaacaaacgaaaatagcggtggcttgtgctcttcgtttccattcgatccggtcatctaaaaaggtgaagaatatcttctacccctataactaaatatcatcacctaatatgaagcctggcaagaatattggcaaaataatttctgttcgtccagcgtgtatgtgtaccatatagtatatacatcatcgtatgacagaaacttgggtttgaatgcatcgagaaaacagaccttcaaatcacagttgctcattttttaaaaaaaaatcatgaacctatatccccgttataggacagaacaaagttgcaataaagctaaggcacaatatatctacataaaaacctcatctgctcatttttactagctgattgaattgacatgcattcaaaacaatttgtatcccgtgaaaagagcagctggcttccttaatggattggattacaaatctgattagtcattaacccgttaacaaggactccaaattagcaccaagctgcacagatcgtgtaacaaaccgcatggtggatgagacgggagtaactactcccggtagtagtatataattttcctatatatatatatatatataggacaattgtgttcctaccgttgctttacaattcaattgtgattttacctctgttttttagggtttgtgattatgctcctgctttttttaagcgaagcagccgtctgccctggttttgacggtagttaggtgggcccggaatttccaaatttaacgaagaaagaaaatgatattataatttgcgaatgaccctcttacccttggttcactgaaagggccaacctactgaaacgatttccccaaatcaaaaatatccagaaccctagcgagaagcggcggcgcaagcaggggcggcgcgcgaaggccagcgcgcggcggccccgcgtgccagcgcgcggcagggtgacgcagcggccttgtgggccaactgccgcgggccagcgcgcggcggagaggggcagcggtgttgcgcgcgggcagggaggcgcggcagcggtgtgcacgggcagggaggcgcggcggacccgcggccagcgcgcaggaggattctccatcatctcatctcatgcatgctattgcaaactgcagcagttcattgttcagaaaaggaatccactactgtatgtatggtttcttggagaatggtgtgtatgttgtcattaagcctttgttagtcatgatctctcccaggtaacacatctctaagcttccctagtattgcaatcctttcgttctctagctgtgtggagccacatggttcatgtacagtttttgttggatggaaaatatgacaggtttcaaaattcatcaggagaattcagattcagaattaagttccctggctggtgggtatggtaaattgcagttatatcaattgatcaaagttcagatccagaactttgacttcttgttccagggcttttgttggatattaatgtgtaatgttgagtattgtgctactttctgataatttgtgatgcttgcacatgttatatgtgatatgttggaaatatctattgaaattgtgtcgaaattattgctgaaattttatccatgatattgtgctgtcaacttgtacaaattgtgttcaaattattgttgaatttctatcaaaattttgtctcaatttattgctaaaattctgtcaaaattgtcctacattttttgttcagtcaacttttacaaaatttgtcaacatttaggtcccatatgaaatacgcacaaatttaacttcaaacatatatatccagtgtttatgctaaaattattgatctcaatagtagaggtatatttgtctattcatcacacatttaacaccgttaccagaccaggggtaggcggctgcttcagttaaaaaagcaagggcaaaatcacaaaccctaaaatataggggtaaaatcacaattggactgtaaagcaagggcaggaacacaattgcccctttatatatatatatatatatatatatatatatatatatatatatatatatatatatatatatatattaattgggcacttcctacgagctcccacgttaataagaaagatctggccattgattaaataaatgatattatcgtcaccgtagatcgtaaaatccatccgtgtttaattttgtgggccatatgtaaatcaatctaacaccacctcatgaaggaatagatcataagagaggatatgcgagatgcaagattgtttatgttgctatcgagcgttaagaacataattagacctatttaattgacagcacaagaagagaagaaaatcagcgaatcatatggcaacaccttgggcatcgatagggaggcatggaaaaggcgaatcagagcctgcgtacgtgacaagacgattaattcttcaagcacgccgtacgttcacgtctatggaaagcagcgatcagcaatggggttcagaacggcgttcacaatgcagcacatcaagtcgctgctcgacgccgatgtcgtcgagtcgccgcggcttccgccgctgccatgtccgcgcctgccgaagttatggcatgtcggtgcgagccttgggggcgccgctgcttcatacgccagcgacgacgtacgccgacaacacggccatgtccatgcaggctgccgctgcaggtagatgcatgtacgctccatcgtctgtaatttctccatatacccgttgattcagcacatagaaaagcaatcacagattgatcatgagaggctcagcgcaaggctgattatccgtgccagagatgcatagataaatacccttaatttgttaacaccatactttcagttaagaccattgattatcgattaaccatcatgttatatatatgtgtgtgtctatttgtttcagttcgtatccatcagccaagctaattgcctggctgaatcatatggatggactaagacacagaaacatggtacatgtataggatcaacatgatgaaggcttaatccaaaaggttaatccgtgcatttcttttataacttcatactctatttaaaaaagattattggccaatgctaacatcgatcacatagatagatcgatccatacaaagccaactcaaaacaaggagatcaagttagctatactgaatgtgtttatttgattttgactaggttataatagtttttatatgggtctgtctatttttcagtcactccaaaatgtacacaaatttcaagcactttgaatggcctagaccacgccaatattcatgaagatgcagtatatacccagcatatcttctactcttcctttcacacctgtaggacgctcgcattttcgcccatcctgctgctgctctcctccaatttagggcgat

SEQ ID NO: 23777 - DNA, 1144 bp, Oryza sativa
ataagtaaccaacatatttagagtgcgattaaaattttattatttattgtatcaataatatgagcccttgcaacgcacgggttagcgactagtatatatatgacgcgtacgtaagctccatcgatcagatgagcagagatacccaaaccattcccagcaaaatgcctgtgctgctaattgcagttacagcagcagcaggaggaggagcatcagaacgtggtgatgagtagccagtagtcttgggcacggcagccgcagccgcagccgcagccgcagccgggagaggcggctcaacgacgtccgatggtttgagcacaagtgctggtgcccgagccggccgcctggctttgtcttggagtgtttgcacgagaccgccgatttcgacagccttcatggaccgaggcttgccatctcccagacccgtacaagagttcactgccagtaaaaattaattattgatgcaaccatatccaggtttaattatagttgttaatttttttttctttccttttagctaatttatttcaacttgaaattaggtctggatatatatacatacatgcatacacacacacacacacacacacacatatatatatatatatatatatatatatattatatgacgaaccatatacataacaaataaattaaatatatatatagtataatggtactgcttacttacttttgtatcttctgactgtcttggggaaatcagttatgatgccatcaatatgaaccagagaagaacgtagttattgatttccaccgttgtttcatctgagaagaaatcccagggtgatgatacaaactcattccggaatacctgggcatacacagctaaccgccccgcagactgcagttctttcacgagattggttttccttacaatgaaaccactgctctcaacaaacacggatttcctatcaacataacagcttcagcgaatttattgatctctgccaccgatgaatcagaagcatcctcaatgtttaacgggagcgtgtaaacaagtttgtactgtgttttctgatgcttcagtttgaccagaacagcactgtgtctagactggatcataacctccttgttcgtgcactggtggagaaaccatctttggtcggtcgcccgaaatccacaatag

SEQ ID NO: 23778 - DNA, 742 bp, Oryza sativa
ttccatctttggtcatttgaatggaacagtcaataacatcggcaccatccctaactgcattctcataggccagatccgtacaacccggataatctccactaccaccattatgtgagataattaatggattccctgttaagaagaaaaaaattaattatatatagcaatccatttaatgtgactgcagcagcaccgggaggtaggttaatttgcaccgaaatgtagcataccgtgatccgttttcctacttgtgttcaaattactgaaacaatctgtgaaaaatgcggattcaaatgattaatacaaagtcaaattcttattttcgtacccaataataataaataacaagtaacacacagtgaatgatgagagcaaaagcaaatcattaagccgcaattttttctcatagtagttcacatgctagctaggataagtgtgttatctgcaaccaattaattagcacgaaataagaagctcataaacttatgactttgtgcatgtacatacagaaaaatataatggaagttccaaaagagataaccaacctcatggttcacaggctagcataattgagggaaaaaaagcaattatcctatctaccaattgggaaataaattaacttatagatgttatcatttttttatgcacaatacaaacgttgatgatatacattatatatataggagcaatgtcagtggtgaatctacgatgtaaattgaggaggggcttatgtacaaaaaat

SEQ ID NO: 23779 - DNA, 10888 bp, Oryza sativa
ttgtgtagcgccacctctcaccactactcgctatgtcatgggtttgatgctcggtcgcaagcatgagttttgaatttggcttaggacacccctagcgaaatgacctcactactacaaaaaccctcatagggaccgggcttgggaccgcgcttataggtgctggttcatttaaaaccgacaactataggcctttcccacattcgcacgccaaaaaaaaataaagaaccggcacctttaaggaagcataagtgccagttcattagctaaaaccggcaccttttctaaaagaactggaacctataatatattatatgtaccagttaattaaaaaccaacacccataatatattagaggtgccggttcttttaaaaaaccagcacatataccataccgagccgagcttacgagccgatcgtgcgccggcttatccatataatagcgcgtcgcctcgatctctcctgtcccttctcgatttctctatctctctctctcgcctctttgtctctctctcgcctctctcacttctctcagtctcagatccggccgggcgacggtggcggtggcggtggccgcgccctccggaggggaggcggcacaccacggtggagcggcggcggccgcgccctcccctccgccagatccggcaggaggggaggcggcgcacctcggtgacggtagcggcggcggccgtcgacagcaggggtggagaaggacgccggtggtgtaggcgaggtggcggcgggcggcttgagttcttgagtgtatgggtttttctatttttgagttcttgagtttttgttgagttcttcctctcttttctcctcctcgatccatgtcccaaatataatgtgaacttgttgttgattgatctattgagttcttttcggctggctgtcggtttgttattgatttggccggccagcaggggtgttctaggggatgatgtgatccgggaggcggtgatgaagggaggagtagggctgggctcgagggagacgacgggtgtatggttggtgagttcggctcgattcgagtcggctctcttttctttttttgctcgagcaaagcaaaaggcgtcggttctatattcatcataggtgccggctgttagtattggtgccgaccgataggtgccagttaggaaaccagcatgtatagccggttccaaatcggcacctatgatgatttctgtactagtgcctagattattccgagcacttcgcacatcagagaaacatataaaaatgtgtggtggagaatgcgctaacgtgcaacggcttttgcgctagttgctcaaaaaaatcgtacaaaatttaagcaatcagggttttttttaggggtgtgtgtggagaaaaaaaaggccaagaaggccatttttcagagctatacggcatgtttgggtaggtttaggtagtttcataactagaccgatttgaaacgtgaaatatcgtgttttttgagcataagtatgtctttgcctctacctgcacgcgcatgtgatgtacacatgcgtatgcgcatgtgttctattggcgcacatatgcgttaaagatacattcaaaaagtcacaagaaaatgtgaaaatcattttagatgtgcaacaccataaaaaaataaactcaaaattcgatgtgaatgcgaagaaaaaaagacaaaatcgtgctcaaaaaagtattcaaacaattaacattactattcacatcagatttgtttttttttctcaacttctacatcgaattttgagggggggtttttcgtgcgaaagtacatatcctattgcgtatcgtggttttttgtcatatttttttatgacttcttaatgtatttttttttagtttggtagcatgtatagcacaacactcttggattgcacctgagattctctccttcacgtagagcagctggccttaatttgtctggcctccgcgcgtaacacatgagcccgaaacgtatatcaatcgggtgtcgactttataaaaaaaatgtttcagcacattaaaaaaatgtctcagcagtaaagatgatgaaacataaccgaagcacacttaatcactctgctgcgatatatgaaacattgattttgaaccattgaaacatcgacaaacccgtgcacattaaagataaaaatatgaaacactatcaaaatatccactataacatttgatccaaacacaaagaaccatcacgagtacagtagctaaaacacacacaaaaaaaaaatattataccctatcttcgttgcttcttccttctctccggtgaacacagggttatcgagggccaccgactcggtgttctcctccggtcttcgcgggggccatcagcgtcgcgggagaagaggacgtagctgtcgaggatatcatcatggcgccagagatccggggacaacgggaggaaggggcaggtgaagtcgacgatgtcatgttcggcagcggagcaagggtagggcagctacacggggatgaagctgccatctatgttgaggaagccgagcagcggtggtgggtggttgacggcatggatctggcggagaaaggagagctcggtgatgatgcggcgaaagctagcgcgggtggtggcagtgcaagcgagttcaacgggggaaaggaggcgatgcggaatgggtagctgagaaggtgcatgatatttagttaggcatccaacacccgagcctaatcgctttcgactttgagccatgtatcagttcttgataggaagaagaaattttagccatttacctaaacaatatgcaatcggagaagatactgcaaaatagcgtgtacatgcatcctatatatccccattaagtgtagttaatgctaattctctcctctcataaaaccacgtcacctcaattgtttttagtatttggatgattcatcaagtatgtaaattgcatctcttgacatgacctcaactgtttttagccgttggatgattcattcagggtataaattgcatcccttcccccaaaaggcacaccatacaactagtcatttataacctttggataattgataaaagtataaaaatagataaacatataaaaaaaatcgtatagtaggtaagaaagaaaattttagaactcatatatagtatattatcacacaattctcccgtagcaacacgctgggtatccatctagtttaatagaaagcacacctcaaaggcatatgccccaattcctctcatgtttttcctattcccttgcccttcttccgtcccctctgtcccccttcttactgttttattacattctgtacacctgaaatcattattccaacatagtagatgatttgttcagactttttagcattacctcaaaaaagtatgcacataatataccgtggtatatagtccaactgacctttttctacctacatagctacataggtgttagcgtgcgcggcgtggcaccgcgctcacatttctagttacaattcaagatgtggttccagcttcatgttaagatgagggaacagaggtgaacttattaaataaaatctccaacgtcgggaaattatgtggacacacgagcgcacgacaacgaattggtcgctggaacaaacattatgcgctgcaatcctcgttttccaaacgcatctgggatcattttctacgtggatttcccctaggaaatttccacctccaattttaccaaaataaccctcagagaaattggagcccacgggggtattctccccaaatttaccctcacagaaatttgggcatattagtaaattaacaagagacggcccgacccgaccgaggagctaaccacagctcggctctggcccatataccggcccattaaacagtaacccctcgtttccatctgatcacgttctcccaccagccgccgccgccgccgccgacgaccgcctccaacacctcaaagccgccgccgacgatggctcgttcgaagcgggcctggagagccccgaaggtgccgaggagggagatggcagagaagtccttcttctgcccctactgcgtgaaacagatcaaggctgacctgatcaggggaagcgaacactccaagaggtgcaaagcgatacgagacaagcaggtcgcggagagggcgagggaggaggcggcgctccgccaagccgccgaagagctgcgcaccgccggcaagaccagcaccggcagcggcggatcgaccccggccggcccatccagccccaacatcaaaaagtgagcagaggtaataataagctactactgctggagatgattatatgatattagcaatatttttctgcatctcagtcttgagcatgtgcgaattgtttaattttgtctgccattgttaacaaccctcttcctccaaactaattgttctcaagaacaatagaattcaatacaaactcagagaatagaagagaaattgagtgagaagaagtagaggaagcttctagaaatggcagtgaagaggaacacgagagagtaagaaagagatagagatcgacgaggttcaaccgaaccaagccgccgccgtggccgaagccgctgatgcctgatctgttcgttgcttgaagttctcctgctgctgccttttgtatccctctcctttgtttgtttggcccttggcatggattagcaattgagtcagcccatgtgcagcccaatgggttcctgacaatctcctctccttgaaactgacttgtccataagttgatgacaagtaaacttcagaaatggcaaacctccactttgatttctctagtattcttgcatcgttccaaaagcttcattaatgtccaatttgttttcagcgtgccaacagaaaacttgcatctcaaaagaacagctcaagcaaatcctggcacttcgcatgtgaaagagagaactgtcttgcaatgagaatttgactgcctgaaatgtgatttgtccaagagaagagatagctagaaacttgagtaaacataaaccaccaggatcccatggcatttgtagatcaggtgcactaagacacaattcatccatttgatttacacagcctctgaacatattttgaatgaacaggccacatctttcatcttgctggatcagattcttccaagttttcatccaagatatccataggcgccgcaagcttgtttgacactgatcagaaagaccatacaacagaactgtaatttccacacagacccataattccaatactgtagtggcaatggtatagagttggtaaatgaggtacttgctgcaatggtgacaaccctgccactgcccttacttttgataaaactagtactttgataaacccaaactgtagcgaactcctctttgtggaatatcaattgttcatacaagaattcttggcccatagtattcaaccagtacacatctacttcaccatcttcaagtgttattttgtatgataatttgcagctctctgttatagtccaatccgcactaattaaataggtagcactagaagtagcttctgattgcatcaatttatagccagtgggcttctgccataattccattgagagcaaagtatacaactcgaaccaattctgagaagaatcactatatgttttttatttaaatttcctttcccagcaaacctcataggatgtcatgttcgatctccttcgctgcataaaactcaccacccaacaattctcctttaccacaaaataactgtagatacttccaaacttctctagcagaaagcagcgaacagcccgaagaccacaatattcttctcacataattccagctcatccaactaggaaccatagagaaatcttctcacataatgttctttgttatgttacccaactgtatatgattttatatgttatttgcttgcaggtaattgctaagatgatcagagggagaccatcagacagatgagaaatgatggaataaatgataaactacatactgcagttgattactttcttataatctcataatgcaatttaggaattatttgaactctcaccatgttacctataatcaatgtttctgtactccatggcattactttgcgtaattcgacgacttactttgtgtgatttgggaactatttgtgtagtttgctatatgattaaatgctagcaacattcagatgaattaacaagccttaccattgcatatctatttgtgttcttgccacgtagcatcacatgaaaaggagttccgtgatgattggacaacctggcaaaattaattaaagatatgtcattagatcatgtcaattcatataagaaagacattgcaggttaaagtaaaaacatattaggagtttgacagttcggagaccagatttaaacgaccttcaaggtaatctattgaagggaaatcatcagtgctaagggtgttttgggcaaaagaattctatagatatttcatacggattggtcaagtttgttcgacatccattttctcacacttgtataaattagtaaacccaacttaggcaaaaaaaaaactcatgtaaaccccgatcaaaaagttgtttaatttcaccataaaaatcacacatgtagatgagacgattttacataatcttgtaaaaattctcctaaaaactatactaaatttcaaacataacaaaagttttacataatcttgtaaaaattcttttaaaaactgtactaaatttcaaacataacaaaagtttgaaatttgttatttttgtaactcataaaagttgagtttagacaagatctttatacatggttatataacctcatctcatttgcatgtgtaattttttaatataaatttagacgacttgttggtcggggtttatatgagttttcatttaagttcgatttccaacgcatatttacccttcctacacttgcaggttggtgtctcgcaacttaatcaaggtcaatataatttgaccgtatgcaatcattactaccgtgatctgtgtggttcagtggtgactaattcgtcctaaatttaagctatgtacttactccaaaaagattcaaatcctaggatttaaatcttgttgataggagtagacagttctaatatggaaaactacacacgcagacagtaaaattttattgaacccattcgacaatatttcatgaaaaaaaacatgtactactttgttttatattataagtcatttgactttttctctaatcaaactagcttatatgaaaatttaacaacacctaaaatatcaaattagttttattagttctcacattgaatatattttagtaatatatttgttttgtctttgaaatagtactatatttaagaaaaaagtcacaacttataatatttaacaacatctaaaatatcaaattagttttattaaatatcacacattgaatatatttgttttgtctttaaaatagtactatattaaagaaaaaagtcaccacttataatatgaaacaaaaagagtacattataattacgaaaactctttgatctatctatttgagttgtgtttatcttacaaaatgaggcagcatagagatccgatcacttattagaactcacctccattgttaacaacgacttgtctgtgcacggtgctggcaaataatatggacatgaaaggaaaatattctccaacttgtaagatgaacatgctttcaaaatccttgtgcgcgagcaaaatccgcatgataaatacagaacaatagaatgaccatctccattttagttcactctgtaataacacttgtatattgccagtgatatgccaacaaaatataatgacaacttccaataaagtccgaacagcatgatgcttctcaagccacagaaatacggatctctggacctacaaatcacgccatataatgattataatcactttgtaattctctcgcctaatgaccatcccgactgagattcaggtcccgaaacttcaatcatcgcacgtcctcattctcttcaagtccaaatcctctcgaaaaaatagtccccttcaaatcaaatactctcgacaaaaaaaaaagagttgacctcatgaggctgcagagaacatttgcagagtgatgattagactaaaagaaaataaatcttgacgaacagagttgcccggaatcaaattaaagatcttaccatcaccaatcgcaggcggatgtcatatgcgacaagaccataccggcggaaaagccggcgcctttggccgctccaacaagcgcacggtcgctatccatcggaagaacagcatacagagcttttcctctctatcttgagaaaataaatcgtttatacatacaaggaaaaaaaagagaaaacagagacaagaatcaaataaccgtcaccggatacatccggcgaagaaaagccgccgccgccgccggccggcgaggagatcgatttccacttctccagcgcaccggccggcgccggacactctcccccacggcgagagcagaacaccatcccccgacgtcgcggatccggtgtgccagccttccagagagccgaatcgacgggggctggccggccggggagagtaccccggtggcggcggcggcggcgccgatctagggtttgccgggaggaaaaagaaaaagctttttctttcttcgcagggggagagtacgacgctatgcaaaggataggaagattagatgtggcgacaggcttttgcgatttattgcgagccacaagggcgtcatgcaccggtgcacgcggtgcacagaatcgatgcgagtgggccgagttggatccggtgacgcggtccatgagcctggtgtacgccacaaaactgccatcaatctcacaggcgaatccaatgtttgtaggcaaccacgtttgtagacaaattagaaaattaccgagagaaaaaaaaaaggtaattttggatagtactttctctctttttcttttgtgaaatgatgattagaggttttagaaacttttcctatgctacctcctctcattctaagtgcatctatgtgtccaacatttaatcatatttgaatgaattttttttattattagcaaaaatgaccgtgcgttgccacagaaagaaaaaaaagagaaaattgaattaaaacatattaaattctaattaaataaaatacaaattttctaaaatatttgggtatttttaagtaggtaggtatataattaaactaatttacaaataaagtaagcgtcagaaataaaatgatatggttggatttaatttttattaaattatccatattaattacactttttgaaattttcttggaatttacataacttaattactaattttgataatacaaacatcattttaggatttatttaaatactagcaaaaatgcccgtgcgttgctacgggtaaacaatttcatacttttaaagtatatttcatgataaaacaaattacaataaaataattaataattatatgtacttatactatatttcttgataaaacaaatcacaaaataattgaatcctaacgttcacaggtctctcacttaagcatcaaatatttctaaacaatcaagaatttttggggaaaaaaagtggcacgaactgagactagagctagacgattcattaatcgaacaatcctttccttgcatcctcttatttacctccaagcagctagccaagttcagttttgctacctcttatctcgcccagcacctcccctccctccctctcccgtgtaggcctcttggcccaagaggcccagcccgcccaagtttgtttttgtccctcccaagttgccaggtgggccctcactacagtgtcgtcttaagctcgtgaccaggctggacttcgccatcgtcaccatctcctcaagaaacataccagcgacctaccccaggcagtggcgcgtgcgtgacgaaaaaccgagcgtatcaaatacaatctgactatggacctctcaaggtccatctgttccggtgccaatgggttaggttgactggtggaggcgtaacgattgataacagtgggatgacaacggttgaccttaacaaggttggatactcggacgaaccttttgtccttgtcaatgatgtaacgcaagttttttacgtgaaggacatgtctagcaaaggaaagaagggcaaagggcctgacgagccgaagcgccacgtggttctcccaggcaaaagaaaaatcgtcggagtagagaacaagactgatgaggattacgatcagtttgatgggcaaccccctttcacggtgacggttgaccctagcatcctcctatcaaacgaagacaccccttactcacgtagcgatcacaaggaaggaacgataatgaggagaaagtatgtgcggacaaccgtcaccaccgatctattgccgtaattgttgtaacctattttggatgtattgaatatgctagttatatatgattaattacaatttttaacaatttaatatcatgcatatactaattatatacgattattagaatttttaaaagttttaaatcatgcatgtgggatttacatatgttaattacaatttttaacaatttaatatcatgcatatgctaattatatacgattattagaatttttaaaagttttaaatcatgcatgtggtatttacatatgttagttacaatttttaacaatttaatatcatgcatatgctaattatatacggttattagaatttttaaaagttttaaatcatgcatgtgggatttacatatgttagttagaatttttaacaatttaatatcatgcatatgctaattatatatgattattagaattttttaaagttttaaatcatgcatgtgggattaaatatgttaattagaatttttaatgcattattttctattttagaaacacatatgcaacgaaattcaatattcagtgctattaactttagtcccggttcttaaccctaaccgggtttaaaaaagaatttggaaatagcgggaaaatatctttactcccagttggtgag

SEQ ID NO: 23780 - DNA, 9409 bp, Oryza sativa
attcctgcacccccgcgtctgaagaaggagaacgctcagctgaagggtctcccagcgccaggaggagtccggatccgcactacgccccgtaagaggacgactgcacctgtgcgcatccagcttgcgcccaggaacccacctccaccagcagcccccgcagcagctccagctccgcccgcagttcctgcagctccagctccagctcccgcgttcactctctccttcgctccagcatcagccgccagaggttcagccagtggtaccggaggttggctgtctgctactcccagtggcagcggcgagactgatccgtcagactccaggagtcgctcagagggaccgggtgacgagcaggaggacgccttcgactccaccgaccgcaggagccgttccgagcattaggctcgtttttccactagttcatcgactgtctagtttttgtttgttagtttgtgtgtttaggttgcttgtttggggtcagtcgacggtcgatatcatgtgcctatgatatggctgtcttaataaggatgtttgcttgctcttttaagtgtttttaattcagatcagaacaattgcagttttaattcctatataataaagcttagttcttgagcatctgtttttcttcttttccccgtctgttcttccctccagatggtctacaccaggactggcaaccgcacgacaggcgagggcagcaacggcgaagaacgcgctgatggtgtgcaccccaacagtgattctggcaatggtccgccaccacttcccgagaacccgaccctggcccaagttatggcgcatcagactcagatgatggcagccatgatgcagcagatgcagcagcagcaccagcagatgcaccagaggatgatgcagtacgctgaacagcagcaccagcagtttggtccccctcccccgcaatccaagttgcctgagttcctgcgagtcaggccacccaccttctccagcaccaccaaccccatggaggcaaacgactggctccatgcaatagagaagaagctgaatctcctgcagtgcaatgatcaggagaaggtcgctttcgccacacaccagcttcagggtcctgcgtccgcttggtgggacaaccacatggccacccgcccaccgggtactgaagtcacatgggcagagttctgccgtagcttcaggaaggcacaggtgccagatggggtcgtggcacaaaagaagagggaatttcgtgcactccatcagggcaacaggacggtgacagagtacctccacgagttcaatcgcctcgcgcgatatgcaccggaggatgtccgcactgacgccgagaaacaagaaaagtttatggcaggcctggatgacgagctgaccaaccaactgatatccggggactacgctgactttgaaaggctggttgacaaggcaatccgtcaggaggatcagcgcaacaaaatggacaggaaaagaaaggcggcgcagttccggtccaaccaaggtagtcagcaccgaccgcgcttcactcctggacagcagggtggacctaccaccatgatcgtccgtcagcaccgcccgttccactctggcaacttccaccagggcgctagcggcagtcagaaccaccagggaggccagcccaaccgcggtgcagctccacgcccaccaatggcaccagcacagtcagcccagcccgcgcaagccaagaaggagacgggagcaaaaccagggtcctgcttcaactgtggcgagcttggccacttcgctgacaaatgcccgaagcccaggcgtgccggaccaaggtttatccaggctcgtgtcaaccacgcatctgtggaggaggcacaagcagcaccagaggtcgtactgggtacgtttcctgttaactcaatccctgcaacagtactttttgattctggtgcaacgcattctttcatctccaagaaatttgtcgggatgcatgggttaataagagaggaacttagcacaccgatgcgggttcataccccagggaatagctccacttcggttcaattcagcccttctataacaatagaaattcaaaggacaccgtttctagccaacctcatccttctcgactccaaaggcctagatgtcattcttgggatggattggctgaccaagtttaagggagtcatcgattgtgcgaatcgcacagtcaccctgaccaatgagaaaggagaaaccgtggtgtacaaatctctagtctcgccaaagaaaggagcctcgttgaatcagattgagacggaaatcccagtggacaccgaagagaagaacttgagaaaattggaggacatacccatagtctgcgagtatccagaggtgttccccgaagacctcaccaccatgccacccaagagggagattgaattccggattgatttggcaccaggaaccgctccaatctataagagaccgtacagaatggcggccaacgaattagcagaggtcaagaagcaagttgacgaacagctgcagaaagggtacattcgacccagcacttcaccttggggcgctccggtcatttttgtggagaaaaaggataagacaaagaggatgtgcgtcgattatcgcgcacttaacgaggtcacaatcaagaataaatatcctttgccgcgaatcgacgatttatttgatcaactgaaaggagctaaagtgttctctaagatagacctgcgatcaggctaccaccagttgagaatccgggaagaggatattccgaagacggccttcaccactcggtacgggctatatgagtgcacggttatgtccttcggacttactaacgcacccgcattcttcatgaatctgatgaacaaagtgttcatggaatttttggacaagtttgttgtggtattcatcgacaacattcttatctattcaaagtccgaagaggaacatgaacaacatctccgtctggtactcgagaagttgaaggagcaccagctatacgccaagttcagcaagtgtgacttctggttgacggaagtcaaatttctgggtcatgtcattacagctcagggtgtagcagttgatccatcgaacgtggagtcagttaccaagtggaccccaccgaagacagtgtcgcagattcgaagttttctaggactggctggttattaccgtcgtttcatcggaaacttctcaagaatcgcccgacccatgactcagttgcttaagaaagacgagaagtttaaatggacagctgagtgcgacaagagctttgaggagctcaaaaggaaattagtatccgcaccggttttgatcctgcccgaccagacgaaagacttccaagtctattgcgatgcatcccgtcacggacttggatgcgtcctaatgcaagagggcagagtggttgcatatgcctcgcggcagttgcgtccacacgaaggaaattatccaactcatgacttggaattggcagcagtggtccatgctttgaagatctggaggcactatctgatcggcaaccgctgcgaagtatatacggaccataaaagtctgaaatacatcttcacccaaccagacctaaaccttcgacaacgaagatggttggaactaatcaaagactatgacatgagtattcactaccacccgggtaaagccaatgtggtggcagacgctttaagccggaaaagttactgcactgctctatgcatcgagggcatgtgtgaggaattgcgacaggagcttgaacatctcaacatgggaattgttgaacacgggttcgtagccgctctggaggcacggcctacgctcgtggatcaagttagagccgctcaagtaaatgatccggaaatagcagaactgaaaaagaacatgagagtcggaaaagctcgggatttccacgaggatgagcatggcacaatctggatgggagaaagattgtgtgtaccggacgacaaggaattgaaggatctgatactcaccgaagctcatcagacccagtactccattcacccaggcagcaccaaaatgtaccaagaccttaaagaaaaattttggtgggtcagcatgagaagggaaatagctgaattcgtcgcactctgcgatgtttgccaacgagtgaaagcagagcaccaaagaccagcaggtttactccaacctctccaaatcccggaatggaaatgggaggagattggaatggactttataacgggactgccccggacatcatcgggacatgattcaatctgggtagtcgtggatcgactcaccaaggtggctcactttataccagtacataccacctatacgggaaagagattggcagaattgtacctcgcaaggatcatgtgtttgcatggggtacccaagaagatagtatccgaccgaggtagtcagttcacctcaaagttctggcagaagctgcaggaagaattggggacccgtttaaacttcagcacggcctatcacccgcaaactgatggtcagaccgagcgtgtcaatcaaatcttggaggatatgttgagagcttgcgctcttgattttggtggagcttgggacaaaagcttaccatatgcggaattctcgtacaacaacagctaccaggccagtctacagatggcaccgtttgaagctctatacggccggaagtgccgcacaccgcttttctgggatcagacaggcgaacgtcaactgttcggaacagaagtattagcggaagcagaagagaaagtcagaatcatcagggaaaggttgaggattgctcagtctcgacagaagagctacgcggataaccgccgaagggagctcacttttgaggcaggagattacgtgtatcttcgtgtcaccccgctccggggagtacaccgctttcagacaaaaggcaagttggcaccacgcttcgtgggaccatacaaaattttggaacgaagaggagaagttgcctatcaactagaacttccgtccaacatgatcggcatccatgacgtgttccacgtatcccaattaaagaagtgtttaagggtacctgaagaacaggctgattcggaacacattgatatccaggaggacctaacatatgtggagaagccggttcgtatacttgacactagcgaaaggagaaccagaaataaggtcaccaggttttgccgtgttcagtggagccatcattcagaagaggaagcaacctgggaaagggaagatgagttgaaagccgcccatccgcacctcttcaccagctcctccgaatctcggggccgagattccgtttaaggggggtaggtttgtcacaccccgaagttttcctccctagtcaaaattgcaatttataattgaccccaagaaaatgcagaggaaatcaggataaaaccctaagaaaacaatgcaaataataatcggatttgacatgtggaatttttcttgaattctacatgtcgaaattcattaacaggatttttagtggaattttcagagccctagaaataattttaaccaattaaaaatcactaaagtgcaattgttaattccagggaaaatcctttttctttttctttttcctttttccccttttttccctcctttttgtccaatgggccgtcggcccatttctctttttcctccccctcctctctgttgggccggcgcaggccgaggcccagcccgacagccggccgcccgcccgcctcctctcggggtcgccgacaggtggggcccacctgtcggacccgtctccctcctcccgccgatcccgctcgtgccgccgccgccgcaaccgacgccgcgcccacgtctccgccttccccgggccacgtcgaccacgcccgcgcgtgcgccgcattccccgcgcccgttcccctctctctcccactcgcgcccgcgcccgagatggccgggattcgaaaaccgaatcccgcctctctctcctccccactcccccacgtcggccgtcgaatcccgccgctcccggccacgtccggttcccccatcccctatttaagcatcgccggcaccccctctcgctttttccccattgcgccgacctctcccgagccccccaacgcctccgcgccgtgcaaccacccgccgccgccgcttttgctactccggccgccgctagccgccgctaggctcgccgccgtctcacgccgtcgccgccgttagcttcgcgcggccgaggtccacctcgtccacccctcctccgtcgaggttcgtcgccggaaccccctccccacgtgcacgggtgagcgtcacctctaccgccgccttcggccatggatcccgatcgccatggtccatctctctctctctaatccctctcttctccttccttagggcacgccggagctcgtccgctagccgacgccgtcctcccgtggcttgccgtcgccgtccgccatcgccttcctccgcgccggccaccctcggtgaggcatcccctccctccttttccccttcctctcctcctagagccgctagccgccgctctccgccgccggacgatcgccgtcggtcgttgctttgcgccgctgccgcatgcgcgccgccgccgtgtgagcgccgcgccgccggcgccatggtcgccgctgtctcgcgccgcgcccgcgcgccccggccgcgaggtcccgcgccgccgtccgatctacccttgggtagatcggggccgtcggttcggccgccacgtggcgccgccgcccctcctttccccgtgccgctgaccggtgggcccgcgcgccgccacccccttcctctctctcccggtcgctgaccggtgggccccgcctgtcggcgccgagccgcgccccctcgctgacgtcagccctggttaatattgcgcaataaaatatttaaggatttcttttatagtaataaacacagtgaatcttctaaaattcataactaattcatccgagctccgtttaagcccattcaagtctcagtaaatcaagaaaaatgtgtagaatccattaaaaatggttttgttctctgtttcagtagtcttatagcctgtttgcaatgtttgctttgtatgtcgctagattccgatctctccgacgctccggtgtacttcgagatagtcgccgaggtccctccagcagcagagcaaggcaagtcatgcttgtcacttgatcatattgatcctatattgcaaatgtcctaatgttttctttcaaatatcgcatttgttttgcaattatactatgggatggttacctattgttacagctatgccttttgataccatgctcctttgttagcttgggttataacatgattagattttggactaggaattgcttagccatgcttagttcaactagcacacattggggatctcatttaaaacctagactataggtttatatgataatgttggtttaataccaccgctctggtgttgggtaaataaaatgaaccacatggtgggctgtgggtgcatggttttgctagtcgcacccatggcagttaaggaccggttcgcgggatgccctggaagaatttatcgtacttaccacaagccagcgtgggcaacggctgggcttgtagtgtagctttcctctagtcgacgcatccaggcaagggtgggcgtgatggagcggggcgggccctgcgacggcctctgtcgcttccggattcacctaggcacgagaggggactgcccgtcgcccgctggggacgggggtgaaacctgaggtgtggtgtgcttggctagagggggttatgcgaagggtcctgtcacggcctctttccggtatgtcgtggtgacatgtcggcgcacggaaacgtgtcgtggggctgtgtcttgtgggtacagttgtacacctctgatcagagtaaaactattcgaatagccgtgcccgcggttatgggcggtcaaccagattcaccgtgattagtctcaccctagtgtaatctgttgaacttggatagttcaggtggatggctgggcctgtcgcaacgtgggttagcgttggacagcggatgtttaatactgcttaattattacaactgttttcgcattaaattcctgtttataaatgccagtatttatgcaaatgaaccactctagctcttctttgttaattccctgcatcatacccccattccggtatgacttgctgagtacagtgggtagtactcagtcttgctctatttttcccaaccccagaggacgggtatgtgtcagatgaaggtttccccgaggagtaggcttcgtccgtgccgtcgaggatgcctgtggagtggtgttcccgctgcggtttagtcaaggcttaagctccagtttcttttgttttccgctgcatttctgtaagacctttataatgtttgtaagacgaggatctgtatgtcaacattgtcgtttgtgtaccccggctggtcctggacgggggttttaatacacattctgcttggaattctattcgggaatttctgggtgtgacaagttggtatcagagccaggttgaccgtaggacaagccgaatggaaaaacctaagagccctctgaatccttttcattgcatatgttctttgcaattggatttgttccgggaaaattgggatctgttcttgtggttcaagggaaaaatcttggtcgctcgtttaagtgagatttttcaaaacgggtcagtctagggttttagtaaaggtattggcatttattcgtcagtcagttggggtttgaggggtgaaatgcattaggtcctagctcaggaatttgggttgcaaggtgtttatgcttcgtttgctattattaatatgtatctaatttctcattattttgacgttgtgtgagtctgtcttatttaatcgctctcatgcaaaatgatctatgcataaaatttcgctcttatttgattcccttatttgagtcctttattgctttatttaaatttggatttgagcatgcattgatcctactcctttgtcttctctagatggccggtcacccacccaaccaccgcggagaaggcatgatcgactttgttgcagagctggcacgcatgacactggtagtgggctaccccgacgcgccggagtacacgacgattccgccgctcagtggcgagcttcctcaccgtgtccgcttggaggtccatggttacgtggggacttgcctcgctaacatggcggtcgaggcgtcaggaggcacagcagatcacgcttgtcaggaggcagcctacctgatgatggccagactacgggagcgccacaactacattttccacgacacggcgtaccgctaccaccccagtcgagcccacggtgatggcgtcagctccttccgtccaacagctggcgagaacgacaccacctttggccacatgtgtgcggtgatgaggggtttggacaggatgcactcggatctgcacaaggcgaccaaggccttgaatgatgggaagctcatgaggatcgtcgctctgaaggacgagatagcgcgtctgaagaaggagaacgctcagct

SEQ ID NO: 23781 - DNA, 13646 bp, Oryza sativa
cgtcggtccttcctcttctgacgtaacgcaagcgtctaagtcgtagctatagatagagagcaaatgaattgtactatacatgcatgtgtatatatatatatatatatatatatatatatatatatatatatatatatatatatatatatatatgtacgtacatttactttagtgttaatatatattttggtaacatatatgtacataaaaatgttaagtgctttaaattataaatatgtgtgtaatatatgtatttatacatatatacatacgcgcatatatatatatatatatatatatataatcaaccatgcagcaaacagggccatgcaaataaaaaaaatggtacatagatctttagtcccggttggtcacaaccgggactaaagatggattagccggccacatggctgaccgatctttagtcccggttcgtgttaccaaccgggactaaagatcgatctttagtcccggattcgtagtcctggttggacaaccgggactaaatggggttacgaaccgggactacaaacgatttctccaccggtgcatattctcgagaatttcatttatcttatagcatttattggccatgtgcttatatattgttttttatagagtgtggactgtttcatttttaaaaaaaggagggtctgttgggctgaggctgttcctgacaatggaaacgctcgaaagcggctgtattggtttatggactccaacacattcatcttgacctgcacgaggtcaggtcaacctgttatcagtccgtgttgatcagatcatcaccactgggtttcctcagctcatcggcatttttcctaacagagggttgcgaagggtacctgcgaaaatcgattgtattgtagtgtccatcctaaaatataatatagtaatatattattaaattaggcaaaacaataaaatttgaataggtctattaagattcgtagacgtttaaatttatagtactactccctccttccaaaaatctgagaaatattttattctttgatttttctaaaaatcgaagtcttatttgtagtcactatgtgctaaattaaattgttgatcggaaacaaaaagtcattctaatacttattgcttgcatgtttattggttttgccactttgttgcatgaatgagttaattgcttattgatattgatgaaaaagaaataggtgtcagattttttgaaggaaggagtatttaagatggatagagtacttgctatgtagctccaaaaacagccacaaatgaaattaaggtggcaattgacctttgagtcaacttgccatgccatttcattttctactccaccatggctctttgatattctatgttgggccacccggccaacacgacgctcctcactttgaacaaatcaaacttgtgtgcaatcactattaattattagtctatcgatcgtactccctccattcacacaacaaccctatactcaaagaccaagaaacgattattattacctctttgtttaaataatcccaactaatactatacatgcacccaataaaattaagtatcttgatttaaaaattaataatctaggtgagagaatttgctattaattgtcatacatatatgcacgccttatattatgaaacacctttaaaaagtagttgcaccctatattttgaaacggagggagtatctaatattctcaagctggaggcaatcctattagctcattggagtgagccacaccaccacagactccaatttttattattttttgatcatggcccacgtaggatctacgcggctaccaatatttctctttttttaattcggagtttcaattatttataaattgtatcctactctagactttttttcaattatttcttttttaattcagaattttagttatttataaattatatttctatatggactctaaattctatttttaattttcttatttttttaatttatgtctttcagctagttctaaattccaatatagacagtaaatttttctaccaagattcctactttttaattttgaatttccgttatttttaattgtatttttatatggcctctaaactaatcttacaatattcctttttttaattccaaattcatttattaataaattatattcatgtatggactctattcttacttttccaatattccttttctattcctaatttcagttgcttctaaattgtattcctatatgtactcaagactcttctcctaatcttgcttattttttaaatttttaattttaattatgaccaaattgtacttttatatgtactccaaactatacttttatttttcttattatttaattttgtctttctgatagttctaaattcctatattgactcatctagactcttctttcaattttctattttctattgtaattactgccaaggctttgcctcgctatgtgattttcattaaaaggaaaagtatttactaaagacaattacaaggtgagcactcaaatattacaaaggttgtaaccaatcaaaaactatttgctttaaaggatctttcattctgcatatatgcaatagaacttctttcttgaacaagattctccaggcttcaaaacatggttgctcattccgaaatatcatttcatttctctctttccaaaaatatgccaggcaacaataaatttttttatattttcagttccaaatatccgttatttctaattgtatttctatatggattctaaactcatcttttaatatttctatttttttaattttgaatattagttttttctatattattttctatatggactattgacttttcttccaataattttttttaatttttaattttatttatttataaattatatttctactagaaaagatgcccgtgcgttgcaacgggtagagccaatttaatttatacatatgtatcggtggaaaaataatcacagcccattgtttcgtctagtcatgtgcttacccgaatcacttattatcaaataaaagactatttgtgtgtaaataagttctaaaatttaaaatttagcttataggaataagcataagccaaacaataaggccttcaaacacgagctcgatttgttgtccagctttatctcaagttgggcaggaattgataatggacggaatcagcaactttgatcatccttatttcagttggcatgttctttttgaaagtaaaattgattattacagattattgtaacggcatccctggtagtacgtacgatcatgtgtggagactgacttgaaatcatgctaacatatcctagaaatcgtgtcttataatacgaatagaattggatgatctgagcaactatgtatgtgatatccacacggattctgtgagtatcattcgcttggtatccacatcacacgaactctctctcgcagttcactcacgagtccactacaagagatcttatgataggtgacgtttcatttacatcacaaacgctgaatgttacgtcatgttgtgaaatctgtgacgctcacgtgacgaaaattcattcgtcacctatcatgtgtctctaatggcgttctatgacgaaaccttatttttttgtcattaatctagtgacgattcttctatcgtcataaagttatgacgtctattttcgtcactatcaaacccaaaaatcgtcatgatattccatgtggcctgttaaggcccatgtagtgagcaacctatttttaggctaggccttgtgaaagcccatgcagtgagaaacctattaatgggctaggcctattgtaagctcaattagattttaataaattcagcccaattcatctatattgaattaaatattgaacaggccatacacattcaaaaggcccaatcattgcaatgaaattgcatctgggccatgcacactcgagaaacccatatatcaatcaaatttgaaattactcgagaaaactattaatgaaattactttgaattgaatgttacgtgtgacgggaatcagatacggacgacgtaccatagttttgaaaaaaaacatcttcagatacgggcgagggcgacacaatctcaatcgaacaagcggcaaaggcaaatcgcgcacgcgagggcgtcgcgggcctaatctggcatgcagaaaatcacgggcatgagggcattgcgtgtggcaagggacacgtgaaaagcgcaggcccaattaattcacgcatgtctcggataagagggacactttgacataagataaaaggaaaggatttgacataaacattaaattaaaactaattaaaattaaaactaaaacataaaatgaaaatcgattcaaacacaaataacgtatcaaatttttaggggaaacatttttaatttttataatagtagatatggagatagagatatggatagatgaaaaaaggtcaccacgtcatctgaaggatggaattgaaggatgacgtgggacctgggacatgggccaggatacaatcgatttggggcctgcatgcaatagatccaacgcgtgggaaggaaatcatacggaaaaaaaaatcgatctcaatgaaccgcgatatacccgtacgcggggtagaaagaaaagggaagaaaaataactgcgcgcgtggatagagtccgacaacgtacgaaatattttttttgacaaaaacatcttaaacttttataatagataaagatatggattatggcttctacttttaatttatttataattccgaatttcaattagttggaaattgtatacttgtatagactctagtctcctctttcaatatttcttatcttgaactccaaatttttattatttttgaattgtatttctatatagactctatgtttttttttctccgtattctaaattatattctatacggactatagacttttcttccaacattctttattttttaatttcaaatttatttatttataaattgtatttctatatggacttgtcttctacttttatttttcttattttttaattctgaattcaattggttgtacactgtatacttgtatggacaatatcctcttacaatattccttatatttaattccgaatttttactatttttaaattctatctctatatggattctttttttcctcttctccgattaatatgagaatttctaggccgtgggagcgaacgtagatgcttctttttctatttatttaatatgttaatagatttctagttttgaaaatctaaaattctgacgctggtggaaattctctaacttatcatatcatatcttactataaagttaatatccgctaactcctaaagctcatgtcacatcatcacccactagcaattattatttagagtattttaaatcacatgcaagtgtactatatcatcactcactagcaattattatctagagtattttaaatatcacacaaacatgacatatcatttacaaatgttgtattttagaactcaatatgcaaacaatatcaaatcattatctctacatatcattttatattatttaaacatatatatctaccatttctataacgtataatatgtatttatctatatatcccgcaacaaagtgaagggtatgatcaactagttgggggtgagccacacgaccattcgtctgatgacaggtatcatcataggtcctcgcggactccaaatttttattattttttatcattttaatttttaattttaaaaataaactatcgtaaaacttatctaaaataagaaactttgagccatgccatcccgcctgacgtggcgaaacaacactaccacgtcaaccataatggacatgacaattttgttttaccacatcagctatgatggtgcagttaattgttgtgcaggttacatcattatggtcaaataatgttgtcatggtagctagaccggtgtgacaatattgttttgtcatgctattctagctggtgttgtcatgttttgagttgaaatagattctgaaagagattgtttttaaattatataggttagaaaaattcgcaagctcccacgtacctcctagttggccacacaggcaaccgaaagcaaattacgtaggacgtcggatcttcgtcaatccaaaaaatgactccactcctgctgacaagaactcgtactactacaaaaatcagtttcgctggcggccaaaatgtattttcgctagtgagttgccgccaccggatctgccctccgcgcacctcgttgccgccggacctgcagcctcgcgagttgccgccgccggatccgccctccgcgcgcctcgttcccgccggactggctgccccatgagtcgtcaccgccagaacccccgcgtcacgagttgttgctgctggacaccacccctcgcgagtcgcattgccgccggatctgctgccccgtcttggcgaagctccgccgccacccgtggacgccgccgccaatggggaaggaggagaggggcgcgcgcctatagactccgacaggcgcatgtagggaaggaggaaggggaggaggggggggggagaaggagacttggagagggcgggggtcagtggagacttccagagggtgagggtgtgcagacttttaatattgttgtagtttttcactgcagtgctctttggtggccgctagcgaaaatcgatttttgttgacggtcacttaagtggtccacctgtaaaatagggctatttttaatggcggatctcttaagataaccacttgcgaaaatagattttcaatgacggtcactaactaggaacctcctgctgtattttcaatggtgttttctattttagccgtcagcaaattaaaacgtgtggcactaggaaaatttttttttcagtagcgtcgtctcctacatcaacttactgataaattacgtagggaacatgaattttcccttgggtgcaaaaataccacttccatcttgaaccgttagatctaggatatccgtgcaagatcaagttcctccatctgtcatcgcacattttgcaaaaagttgccagccatcaaagaatgttatgcattttactccatgtagcttatagttggccaaaatgcccgacggcctggcccatagcacgaggtttgctcccagcccaaacacgataaagcccgaccggtgggctgtaaccgggcctctgtctcggcacagtgggctggcctggcacagtccaaagatcagagaggtaaaatagatgatggagccaaaatagacttattccagccataaccaaaagagtgcggaatgtaaaatatacttattacagccatataagagatgacccaaagagatgagggatgcaaaatagaatttttcaaaggaggagcacagtgggctttcgtaccttcaagccaacgccgcacgtcttattgggccgtgcctaggccaatggttcagcaagtgggctagaacggcccggcccagcgcgtaggacgggccgtgccggccggactgatgtcgacttggccatctatagtgtagctttctcttcctccattcttctgttcgagtaaaaagaaatcacagtgctaaattaatttgggagtgtattatttactacagttgatgaaccggccttaaaaacacttggttgagtaaaagaattacctatctatctatacctatattaattgggcaatttctacgagccataattagaaatatctggctatcgattccatagattaaagcatcatgaccgtatattaggtaccgtgggctctgtacagcccaatcatatctaggttagacctaaccttacataggtttgcccatattaatgtattgatctcatcccttacgtgaggacttccttcacctcctatccgttccgctagcatggccgcgcggagatcgcgacgagcggacttatttcatcccgtcgggtccttctgctcgcaaggccggtcaaagatcgcgacacgacggaagacgtcgagcagcgcatgcacgaagacgaggtagacgtgcagccaggctcacgcacgcagcgaaggtaagctgtccaacaatttttggtatttacctcatctgatcttattataaattttatgtattgagatgttgatttacaaagtttgcttgccccaaataagtccatccgtggtcagtgactaattgcagttaaaaagttccattgtagacaccgtacatcctctagtagtattaggcacttgctttaataattatagcagcagataatattgagaaaataaaacgcgaggcacaatgatataccgtttagtctattttcttaacgtgcttttcttaatatagatctgtttttaactttttatcccatgattaattctaaccctacagaatattacttaattaggtagacaggatttaaggccactaacatgatacaaaagacaccgacacaaaatacaacttgatgcaaatcatgggaaaactatatgactgactacaaaacaaattcaactttatattcataaactaagacttctgaaattattaaaccatgaaaaagttataattgagatgaaactaattaattatcacacaatatttgtgcaattattagattatgataatctataatcaagacaacaatctacagtataaatcttggtataataattctaaagttttgaattgaataaagggggaaaatacgaattttgatatgttgttaaatcacgaaattataataattaagcctgcaaactaatggtacgttgttaaatcacgaaattataataattaagcctgcaaactaatggtatatcgggtatattagttctcaaattctaaattagactaaggaaaattgtttcataacttgatactattaaagcaagaatttgtataactgagactgcatactaaggtattccagtatattagttctaaaattttgagttaagttaataacgataacaaatagagagttcaatgtgagaataaatggtacttctgaattcggaattctaaagtttaagttaatacatatttacattttgctatgctaattgggcactccacaggagtttctacattaaacaagcagatttggatgcacaataataatagcccgtgcaacgcaagggttggtgagtaagtaaaaaaacctaccttactgtccttacgtgagtcaaaaaaaaattgcacactgttaagttcgggagtaaaaaaggtactacagctgatgagttggactaaaaatatttcacgtagatgaaacgttggagtaaaagaattacaaatatttcaatctagagagtaaaaacatacatagaggacaataaagaggaaaaggaaaaatggccaccagagggccaccgtccatgagcatggccatgtaggcatcgccgtgtcagagatgtttgcggcgagccattgacaccaaattcgatattggagatgagcgaaccaagccaccggcaccaatgggaactgctggcgtggaggatgggtgagggaagctgccggtataaggggaagtgcgaggtaggcaattccatcgatggcaatgagtgggaacaactaatctgtcgatgcaaggggacatgaccgaaggtgacagggatggtcgttaggcaacagaacgtgcgactcttgatcctctcgcacgtaggtaggcaattccatcgatggcaatgagtgggaacgactaatctgtcgatgcaaggggacatgaccgaaggtgacagggatggtcgtcaggcaacagaacgtgcaactcttgatcctctcgcacgtacgttagcgagagtaagagggacagaggaaatggaagcaagagggactaaaacgaaaatacttctagtggaggtggtggctttttgcaaaatatgtggtgggaatgaagagctcagggcttatttggttgctaccctagcctaggggctctcgctcaggcaggtcaatccacctgcagacgcacaaaatcggatgcctgagagctgcactgagtcaggcgagatttctatggcacgaagcaaacaggccctcaatctgggccatacatgataaatcgatccaacaatggagaatggtagttgcattattgcatcaattggtgctattgcacatgatactcattcttttcccttcaatcctctctcgatccgctccccgcttccctcttttctcggttagaacccgaatctccagtgggaaacatgctccacctccgggagagaatttactatttgccatcctcccatatgcacatatatccaaacatcactctccctaattttcattctcatttgtcatccggtcccacatctcatttgcccaaatagggaacgaggttgacatgtggactcggatggcaaatatctctatatatctaaatccacgcagattagcgtgcgattagcgaggccacatggtgctgcgtggttcgtgcatacgcttttcccgcgaagggctaaaatataaaatatgatcttgtgaaggagtaaaatgtaaaaacgttagcctctcgtcttctcccgaaggttcgaactcatgcctcttccccttccaatcgttctcatctcgacgcctcccttttccggtaacggtgccagcgagccgacggtagggatcccagcctacggcggagcaagagaagaacggcgacaaacatcccgtccacgctctcgtccaccgacggtggcacggtggagactcgtccgatgtcgcagacgaaggcgtggtgatcgaccgcctccgccggtaaaatggacgaagaggcacagccaagctcctcgttgatagtgtccgtgcaaagcccgcagacatacctcccctcgtaccgcgcccgaatgctagcgatatggggccgtgcaatccgccgtgaatccgcagcagtcacagctccccgccccgacgaactcccctcctgggtcaccaaagccagcaccgctgccggtgctcgcttcgccccccacgtcggtggcggcatacgagcaagagcaaaccaatgtagacgatgtcttctccaaaaccaacagctcgggtaatttattcacaggtattttgatttttgaaacttttggagaaatcactgatttttacatgccaaagctgaccaaatttggaatcattttattgacaggtacatgatgtttgattagcggctatgtattctctgtgatatcacgattaagtaccaatacaagtagagacactcttccggtgtactagttaattacatttaatttggttctgataaggacgattgtctaaactaatactaacgctagctaacattctctggactcctttggccttctctaattaggcatgcatcttataagagactggatatggaaggtgcagattgaatataagttagcacagaaaaattatttaaaataggattcttcttatttgtcacaatcagcagtaaatggaactacaatgtgtaggaacatgattggaagggccgtcgtgaaattgtgttcatcacatttcagagtgcaggtacatttgcagaaatcctccatcattctttaggctttaatattactttgttgtctgcgaagaacaatcttaacataatgaatctttatttaatataaaaatggaattgtgtcctcaatctttacttcatttctgtattctttaagcatgattgcttttccgatggtatcttatcttgaatagtctctgtgttaggcatttattctattttttggagtatttgttaccaccagaaatcatcggaaccaggatgaaaatgtcagatatcctccgagcaggacctctcagggtggttatggtgcatataatgcatacatttaagctattatcatatctatctatctatacctatactaatcgggcacttttttggagctctcacgttaaccagaaacatctaaccattgattagatggattgtaaaatcatggccgtacattgaaatctgtgttatcatgggcttttttaagcgaatccaacgtgtatagagagtccctctattatacgtattgttaactacctacattgatatggatatccaatctgttaatatatctggacgtatcctatctccagttatgtcaatagatcgggctgtgttaaccacgtacgtacgtagcctagctgatgccgatcggaattaatggcggattaggcagcacgatatgcaaccgaggcatcgtcgtgaggagcgaccattcgatggaatcgtccggcaagacggtcagccccatcatattcatgatttccaggttcgaccgctcctggccggggcttcatccatggtactaacaagttcttcacttttcaatttattttaattccgaataaaaattaacaactgagtagatgaggaacaaggcaacatgtatgtgggatgatggaactgtcaacagcagtgcaatcatacagggtaagaaaaatacagcttattccctttggttctgatctgttaatgtcactgtatacatatattttctggaacatatttttaattttgtttgaaattattacgatctttggcgtatcgatagagttattttatcacggtcgactgacagtaaaaatttattagttcaccaaagattaagttgtttcataataattttgaagcaggcaacttacatatcgatttatagtttttctgaacataaacaagcattttgttctctctatacgccaggttgtgtaatgtgcaattgaactactttaaaaaccattttcgcaggtatccctttactacgttctttttgccgtacttctgtattctttttcgttggaaaatagctttcttcgttttggtaaaaaaaagttttcgtcagattctatggaataattcaataaaatgtgaatactactatttgaagatttgcttcaattcaattagtcatgaatatttactcaggcacccatctgtattccttctaaatagattttcaagccaataatatataggaaaagatatatctatatattattgattaaaataatgtatcaagacacatcacagcttcctaattgttaaaattacattaataaataaatgaaatactaaaattcagacccctaataggaggacgatctcatattttcaattctaatttacagaattattaaataaaaaattacgactccaaggagagttcaatttcgtatgtattaactgtgagtccacattatctatgatttttctattttgagaactattaaattagaaaataaaaaaactagaaaaaggatatagaaaagcataaataatgcatttggtactccagtactttgcataaaagcgagtgtcgttgtggagtaagattttgtatatattattattatcaaaattcacaattactttaaataggaaattaaattacttggtttttattaatctatttgtcaattaaaaatatataattctatgtataaatccatttatacattatatatatatggtagttctgtgtgaaaatcaagattcttttaaagtcgatctccactcaaatccgctaatatgaaatcaactaattgcctttatgagatatttttgaaaataaataaccaatattctagcatatgattaaaatttttaaaatattaatatagcccgtgcaacattcttacaaacattctcaaacgcaggtggggtacactgtgatttaatcttaattttctttaaccttcaacttattgagtcaagtggtagaggtttagagttcttttattgcacatagtagt

SEQ ID NO: 23782 - DNA, 4016 bp, Oryza sativa
aattcctgcagccctctggacagtagttagttggatcgaattatcatggccataggtaccattaaaaattaaataacaataccataattaataataggctattgtaattaataacagactactgaaaatactttggattcttcagtttatactatccacattgtaattgacatctgatttatcttttagttaaaccgatataattaaaaaataactaatgatttttctataattagaatctaaacattataatattaataataatagccgtggaacgcacgggttggcgactagtactagtaatgttgaatagtctcacattggttgtcgaagggcaaaggacttaaagatataagtgggggagcccctcacctcaatggctagcttttggggtgggaaaggccatttacgatcctacaattggtatctgagcctagctaggttaacatctctggcctgatggaccgtgggtgcctgcggggcccgtatacctgatggaccgtgggccggtggggcctggatacggtgaaggggcggtgaaggggctgagggacaccaatgtatgaagggggagattgttgaatagtcccacattatagctagcttttagggtgggaaaggccctttacgatcctaccagtaatatgcccgtgctaaatgctacggtacatttaagctttgagtgcactaactctatcttacctatccacggtcagcttatggaagtaaggctgcgttcgtttgtgtgatatagggtgagaaagcacctcgttttccacgcgcacgcttcccaaactactaaacggtgcgttttttgcaaaaattttctttaggaaagttgctttaaaaaatcatattaatccatttttaaaatttaaaatagttaatactcaattaatcatgcgctaatggctcacctcgttttgcgtatcttcccaatctcctcaatctccttctcctcaaacacaccctaagtcttctgctatgaagtaccatatgagttaacaatataattttacaaatgtaaatgatggttctgtttggtgaatggtgtcttgctttttgcctaaatccacctggaatcaaagcgggaatcaaagcgagaatcaacacgagaggactgacaacagaggaacatagtatgaacgataaatagttccctctttaccatcaactgtataaaaaaagggctaataaagggcaacggcacgggaatacgaatgatgtggagttgtagagacacaagacccgaggtagaaaagaagtttggattttatatttaatataaatcgcaatatatatgtgtttgttcaacaggtccaattgggttgaccctctactatttcgcatggcaaagccatgcgtacttctagtgagaatgaaaattaggaagagtgacatttgggaatgtgtattttaggaggatgataaacagtaaattctctcgtacctgtaactatatctgacgacttgcaatcttccactttctagatggagtacccaccagcaacttttggaaaactattttaaatcctcgagaggacattctctcgctgtttacatgtcgtctagatgattatgaaagaattcaataagatagattaatatgtgataaattactttgcaaacatgcaagaccaaattaaatttctacaagttgtaaaaaaaataattttgactgtgaatatacgctaactagacatagattatactccctccttccctaaatgtttgacgccgttgacctttttaaacatgtttgactgttcgtcttattcaaaaacttttgtgaaatatgtaaaactacatgtatgtataaaaatatatttaataatgaatcaaatgataggaaaataattaataattatttaaattttttgaataagacgagcggttcatatatgctaaaaagtcaacgatgtcaaataagaaacagagggagtatataattacttctctggagccacattatcgactggcctgtggataatagtagcgtgtgctgtctctctcataaagtaggtatgaattttagctgtacttatatgttttatattaattcgaggttgtttgaagtgtccctacactaattctaggtcaacatatatataagctataacatttcccacatttttctaagaataactagaaattagatcaatcgacaaacagaataatcgtgaccatctgatttctatatatgaagtatcgcacagattgaatcaacaaaaaaccctacatgatgttatgtacctttgaaaccttggtcacgaaggactaaaagtaactatatatatgcattaaaaattaaagtatgatgtgaattagacttcaatattaattccaatagcatattgatggcttatataggtacaagtatgctacagagtggcaatatatatgtacacatggtctttttttttttgactggaaatactgccaggactttgcctcgcagtgtgattttataaaaagaaatttttttaaaaaattacaagaggccgagaagggaaacaaaagattacactgtttgtaaccaatcaaaaactatatgctttaggggatccttcattctgcacaaatgcagaagaacatcatctttaaataaagccctccaagaacttaatgagggaagttcatttcgaaagattttcccattcctttgcttccaaatgtgccaagcagcaatgaaggaaatttctaaaaaacacttctggctgaactgaatgcgggccgaaaccaccatctaaaaaaagttgagactagagttccacacaattcccaaatgctgccagcactgctgactgaaagggcagaagagaaaaagatgctctcttgtctctctgatattatttaggcataactcacaagtgaggtcatcgttctcctttgcacaatgccgtctatcaagcatatcctttgtgttgagtctgtccctaaataatagccaagcaaaaacttttatcttcattacgcatcttgttttcactggtggagaaaggggctttactcccggttgagagcccacctatagtcccggttatacaaccgggactacgaatccgggactaaagatgggtatctttagtcccgggtgaaataaccgggactaaaaatccatctttagccccggttggtaataccaaccgggactaaagatggtgggagcagtccggttgattttttttttgctcaaatcgatctacttccaaaatatcactaatcatatccccaaatcatccacaaatcaaagtagcatcacagatctggaagaaatgcatcacagattagaaggaaatgcatcacagattacaaatacatcacatcacaaaatctcaaacaaaaaatacatcacaaatcctaaaagaaatacatcacaactcaaatacatcacagatcagatccaatatcacatacatcacagatcaaatccaatgaatcacaaattcaaaaaaaatcacaaattaaaaaaaaatccggcagcagatgagagggcgccgccggcctcctggtctccgtcctctcggcctccgcgccagcttggcctccgccgcgcccgcccggctgccgccgcgccagcccggcctccgccccgcccgcccggctgctgccgcgccagcccggcctccgccccgcgccagctcggcctccgccgcgcacgccctcctgcccgccgcgacagccccacagccgcgccgcccgctcggcctccgccccgcacgccctcctgcccgccacgcccgccctcctgcccgcccgcccgcccggccgccgcgcccacccgcccgggcgccgccgctcccgctcagccgcagctatagaagaatacagagaggggaaggggaggaacgggaggaatacagagaggggaaggggaggggaaggggaggaacgaacagaggggaaggggagaggaagggatggaggagttaatgagaggggaggagatcgagaggtctgtgcgcggatattatcgagatggcagcggctcgggttactctttactcccggttggt

SEQ ID NO: 23783 - DNA, 5128 bp, Oryza sativa
tataccaaccggtagtaaaaataattgggatctgttttaaacctgacaacttcttgaaccgggactaaaaatgatctttagtcccggttagtgttaccaaccgggactaaagatcaaaaagtgcccttcaacttttaaaccgggacaaaagatgctttttagtcccggtttttattagaaccgggactattgtggaatttggccgaccaaccaaagatagtttctccaccagtgtttccagatccaaacaaaaggccttggcaattgcacattcgagaaagtgagcttataaaacctcttagctgtgtatttgtcagagttccagatgaagaccaatcatcacccttgtcattctgcaaagagagagagaggacaattccgcttctagaacgatgaactctccataagcttgggtgttcggaggtagcaagaagtaatcctcaagaggagtagagcatatttgattaacagagagggatctttctaaagcaaccatacacaaagatgggaattcagtgcaccttatcttatcagtccaaacatcatcccagaaaagagctgatgatcctgtcctgatgtagcattttgaaattcccctgaagacatcagacagagccactatatccctccaccaaaaagagcctttattccaaaccaaatgagacactttggagtcataataagaattccagatcagttgaacccatggcagatcctgccctttgtaaaatttgaccaggtgtttaaaataacgtggtcccttatttggttctatgaaatgttgcttcgtatatatgctatggttatgtatatttattcctcttgaaccatatatgctgctgattgtatgtccagtggacagtggtgctctttatgtggtagatgagttttagtacgctcttttaaagtccccacattaagcatcaaaggcttcctttggagcaaattgtttcttggagatctttcaggtggctacttggatcctgtggaaacaaaagaaatgatcccatcttccaaaatgtgcaaccctctctctctctctctttggaaattcttcttgaaagaggaattaagtctacatttactcagacttaaaatagacaaatacaatacattgacctttctttcaatcatggattgacaacttgtaactcctctggttgttttttctatacttaactttgccacccctcttgtttttttttttgaaacttaacttgtaactcctcttgtaaagttgtgtttctgtattttaaattaaaatcactgtgggggcttccccactctttcctggtaaaaaaatggtccatatttcagctggaaattccaacattgatataaaatatctacaaattatcacgttaattaaaagataattgatatatcttacagatcaaatcatgtctataaaaaaatataagaattaaaatataaccatgtatatataaagtataaaataactgatattttgattccatttccacctagtacattgattgcttctcgactctatcagctagatgaatgtcagaccctttgttgtgtcagtatctctcttatatatcttgcctttctccatggatgtattaattggtctgtcccatatagtcgaatgcaaatgtaggccatcgctttctttctctacggtcagtcgttctgggtaagcacaatcaagctcgatcaaaccaaaacaattaaccaaaacaatttgcatggctagccaattaactaaattgtttatggtgctactaaattattgttttgtcgatcaaaccaaaacaatcaagctcaaaccaaaacaatatggtccatgtgtgtttatgtgacatagcaccttacgtgccacttaactaaatggctcctatcgcaacacccacctcttatttaacagcttaattttttagggacaattactcattggaccctattctagactctaactactaatttgaccctacttttttaactttgcttacttgactctgcttttcaaaataagaactgccatttgacgctgttttcactgtaccgttaaggtttatttaggaaacaaaaaataaatcattttatagtctaaattgactaaaatgtccctaactaccaaatcaatcctatccctaaaattctcacccggtggtccactcatcccaggccttctcaagtctcaacgacgcggctagggttcggtggaatcggcgcatggtgggggctgcggcgcaggtggcacggcgctcggtggggctgcaatggcggcgcgtggagagggcttgggcgctcggtgggaggtgcaaaggtggcggtggtggcggcggcgcagggagagggcttcggtggcggcatgacgctcggtgggggcttcagcgaccgcggtggcgggagttgcggcggtgacacgcggcgagacggtggaggcagcgtgagctgcggaggtggcggcgtggcactcgtgggggcttcggtggcagtgcgcagagagggcttcgacgtcggcggctggcgttgcggtggcgacgacgcgcaggtgcggctgcgacaacgacgcgcgagtgctgctgctgcacggcggcacgtaggagctgcggcagccacaacatgtggatgtgggagatggccgtctacatgtgtttcttttcttgtgtacagcttgagtttgatcaatgctgtcaaaattttatcaaatcgaagacaatttgtcaaacctatgttaaatttatcaacccacgtcaaaacaaagcaagcaaaacgtcaaaatcccttatattatgggacggagggagtagtaagtatataaacagacaactaaactgtatcttgttaggaaaaaaacttttcaattagcaatcattgtaaataaggttgacttattgcatttaatgaatagctgtatgtaatttagttcgacacatgtggcaatatttgacaatatgaatataatttgttctcttttgcacttggtttaaatgaatatacccaatcatgcccaacattggtaaatattttaaattgtatattttaattaattacatgtgaaattcttgtattctctgtatttaaaaatgcgaaaaagagatgcattagctatccagctttaattattcaatgttttttttcctgtgttgaaactatgaggactgatagtgatataaataataatgattccattttcagatgaataaaaaattaagtttcgtgacaattaatgagagataaatatagaacctattatggcgttgtcaaaattaaacaaatctttttgtgagataaattgaataaactcttggtgcactgtaataactttatctattgtttgatttggatgtgcatcgatctagcattagacattagctaattatatactttgcattgcaaataaacagagtacgaatttaaaaaaatcacggattaaccctgctgcttggatcagacgaacctgcttatcaggctatcagcatgtcctacggattggaaccaaaaaaattaagacacaatcatacatatgggttaatcaattgctttgattgaaaatgttttgcataacctaatatatactctccagatcgagttactcaccacggatcgattatgcgttgtcaaagcagctacctaaggtgttgcatacttgcatatgcatccgtttggagcgatcgattggaatcatagacggcgtgcatcagatcaactgtagtagagccatctctgcactcgaagccgatcttgggtcgatatggccaccgttttgagtcttagaaaaagatgtcttcgttgttgaagccccgtgaaccattactgattggtagctagggtacgctggctaggtcatcatcgaccagattaattggatgggcttaaactggcccacaatgcgcctaattaaattttttaattaaaattattaacacaatctatggctgtgatggtccaatctaattaatggtcggatctttctaattaatgtggaagctcataaaaaatacccaataagtataggtatagaggtatagatagatagatggagacatggtgagcccccagtattaaactatagtcggcctaacatcgaaaacactcgcatgatagatatggtataaaaaacatactctaggcaaacataataaattttggatctgataatatcatatggatctgacatatacgtacgataaattgcatataaaatatttcgtacctttgtagacgcatatcggatgcatctacgaaattagtatatcagttaaaaaaccaatctaccaattaccttgttgcgtactcgttcgacatcatataatttgacatcttttggtacgtcgcgggtcttggcatttggatgatctagatagatcaatttttttacgatgatgattccgatcttgaccggggacgttctctggtcatgttagatctcccatgtccaaagtcgttgaggtgtccctcgtcgcaaaatcctcatcgatgatgactagacggagcttgagatgcgagggtcctgatccattggagaacagacttcgttcgggtcacatcaccccatagccgaagtcgtcgagtagtttgttgtcgaagaatccatctcttgaactcatctcaaccggaatcttgaagcaccaaaatccccctacttggcgcgccactgtcgacatttgatatcgtgactacggtatttagacagtatgggtatcattggtactagggtatatacgagatttaggttaaacagatggagacaagaatttttatacaggttcgagccccttatcttacaggtaatagccctactcctgctggccgaagccggtgttgcttttattcatcataatcacacaaatataatgtatagtataacctatctaaccgtcgtcgacttggcagctggatcatcaacactagtcgacggtggggtagtctcccacctcgaatacgctcttgatgagatcagagatagcgctagatctctttttactgcctccgcagacaccatattgggtttttctaggcttaactctaatatcgatatctggcgatgtgtattgatttgtcttggccttgtgtatcgtgtatctctatgttgtgtgtcccctctcctcctaggggctttgtatttataccgtagatatccccttgtccacataga

SEQ ID NO: 23784 - DNA, 9959 bp, Oryza sativa
agaacgcttcactctacgtctctacgttcgacttgaatgcttggtttgcatgcccgttcgcatggattcggtttaattgtatagaaagcgaagaaaccatactgcgccaaattccttaatttgtcttatcaaaaagttttacgcgccgaattttagctgttcctatattttcaatattataattcgatatcagaagtttatcataacagtgatgcttgataccttttgctatagctgctcatcctgaattgaacatatgatggatgaggagcctcatttcttgatgatctagctgattttactgctttactagttacaagagttctaaagaattcctctgttcttatatcagctcatcctaagataagctattaatgacaggtttgatctataaattttgtgtaaacaatgctggttttatctattgttggactgaatatatgaatttctattgaataaaagactgaaagtactaagcaggattttgtgaaagagcagagtaaaggtagtatataagtactacaaataacttaacatcaatgattacgattatattggttgagatttttcgatgtgttcaattttagtatgatgaagctattgcaatgcaagtatgccctgtgatattactttttccagaaaattctttagatcctttacgtagtttcatactctttgattatcattcttctttgctacgacatttcatcaagctgttcattatcaattttgtcaatatacagaattaatactgtgtcgaaactagatttcggcaataataaaagggggtggctatcaagctggagaagtgtatgggtttggagacaaaggatttatacaggttcaggccttcttattcaagaagtaataccctactcctgtccggggatgaatccgccgagtgtcttattaattgtatgatttggagaaaatcaacatgtgcccctagaggcatccggacctcccttatatatgggaaggagtccgtgttacaaaagataatctatatccctaacgaaatatgcagatacaaataaaatacagtcgtaaccgactaagtctcaaggtatttccttgatgtacaagttgagaaacaaacccgagacacaaataagatattctatctatattcggtatcctgtactcagtccaaataccattgccgtgtagatatgggatatccataatctccacaaatacgtttgtgctttcttcatgataaagtgtactggcatcttctcgcttccaaggtgatatcaaagcttagcaaaaaaaaaaaaaaaacttggttgccacagaattggtaagttatgatccacagcttcaccagtgtaaagggttattatacttccatttagtcctattgcttttgggccaataaaaaaagatgagtaggtagagagaagatggatcgatcgagatggcatgccaggaaactatgtcgtcgtcgtcgtccttagcagcctggctgcactagtgctgctgctgccgccgttgtttgctgctgtggatgatgggatgaggagcggcggcaagtgcaccaacagctgcggcaacgtcggcttcgagtacccgttcggcgtggaggacgggtgctaccgcggcggcggcttcaacctcacctgcaaccacacgtaccagtcgcccaggctgttcctcggcgatggcagcgtgcaggtgctcgacatctccgtgccacacgggtgggcgctgatcaacaacaccggcatggtgttcaactccaccgagacgcgggtcgtcctcaacagaacatgggatcagctggtgggaggcccctactccttatcgggctcaaacaagatagctctggtaggctgcaatgccagggttgatcttcgcgcccgggtaaaagtaaaacacggcggccgcggcggcgacgacgatactggaagtaatctgatcagctcatgcactgccgtctgcccattagacctcgaggacatgactccggttttcgccatcggttctggcggtagcagcgcagcgtgctccggggttggctgctgccaagcagacatcaacttagacatcccctcttcgtacacaatccagatccacaacttgcaggagctgggaggctccatcagtccaacggatctagtgttcatatcgaaagaggagttcagctacaccaatgacatggctttcggcaacaacatcccacaggcgctcccagccctgctagattggtatataagcagtgacccatcagagtgtacgtacgaatcagcccccgattgtctcagcgccaacagcttctgccacgcttacgaccttgggtacaagtgccactgctccgatggttaccaaggaaatccatacattcgcggtggatgccatggtaagtactagtactagtaattaataggagtaatagtttgcatgccgctttatatatactacttattaatgtctttttgttactagatatcgatgaatgcaagtccccccaagattattcatgttacggcaactgcaacaacacgccaggatcgcacatttgcgactgtcctcgtggctacgagcgcaatgcttccacaccaaatggatgcaaaggtacctaattaatggattaactctcgttcatcggattaaaaatacatatatatgtatataataaacttactagccagtactacaacggtttatatctaattactattacaaacttgttactagtacgtactgtagctagctagccatctatcaattaattgcttaatttacgctgacacatgttgatcgttgcagcacgtgtgttcgctcaattagtatatgtcaataaattgaggttgttaatttcattactagctacccctgcagtgttgaaacaagaaatagcgcgtacatagcacaaaactaattaaaaagttctccctggtgtcattattatttgtaggggagcacacggtaaaattcccatgtacgttttttcctatgttgatcccacactgaaagctactccgtcattctaacattttccatgttcatattgttgttaatgaatttagacatatatatctatctagattcattaagatcaatatgaatgtggaaaatgctagaatgacttacattgtgaaatggaggaagtagctagcttgttggaaaattaattactgcgtgtttcggcaatataggcacccgcggtgtttttacatattattaattattccctaatttacacagctcacaacaagaaaagcaaattaactaataggaaaatacatatacttttctagcatgtgatcttattgatctttccatgctgtatacaattaaccagacatcgatgagtgtgggcaccgcgaaacttaccagtgctatggagagtgcattaatttccctggaggtttcgattgcctctgctaccatggaactgacggggatcccagaaaagaagggggatgccttccggtgaagcatcatttgtcaggtaataagagatatacaaaatcgtaatatatgattaatgtagcatttctatactcaccgttaaaatcttcattgataatcattgttgatagtttccttaacttgtttgctagctcgagacttaggtctattcattgggcttggggttggcagtggcacaattcttttgctcattgcagttggtgctcccttcctatcaaggaaaatgaaggtacgcaagctgaaaaggatgagacagacatttttcaaccaaaaccacgggttgctattacagcgactgatctcacaaaatgcgcacattagtgagaggatgatcctaacattaccagtgctagaaaaggccacaaataattttgatagaactcgcgaggttggtggtggaggacatgggatcgtatacaagggaatattaaacttggaggttgttgccattaagaagtcgatgatcatagtagaaagagaaataaacgatttcataaatgaagtggcaattctctctcaaatcaaccatagaaacgtagtcaagcttataggatgttgcctagagaccgaagttccattattagtctatgaatttatttcaaatggatccctagatcaacattttcatgttgatgaaccaatttcgctttcatggaaggaccgaatgaggatagctgttgaagttgctagagctttaacttatttgcattcagctgctacagtaccggtattccatagggacattaaggcatgcaacatacttcttgacaattagttaatagcaaaggtatcggactttggagcttcacgatatgtccctatcaatcaaactgaagtgactaatgctgtccagggaacgatcggttacttagatcccgagtattattatacaggccatttaatggacaaaagtgacgtttttagctttggagttcttgtaatagaacttcttactcggaaaagacccacctataggactgatcagggtgatagtttagttttgcattttgcatcactactgagacaaggacagctggttgggatactggatcctcaagtcctgaccgagggaggtggagaagtcatggaagtagcattacttgctgggatgtgcactagaatgactggacaagatcgccctactatgagagaagtcgagatgggactggaaaacttgcgagttagtaagaaacttgcttcacatgatacagcatcaagtagccttgtatctcagatggcagagcatcgcatgatagcgacaggggacatggaggaatcaagcatacagtacagtatggaaaaatagatgctgctgttattgtcatcgatgttgtcttttaggccacaatttaataattaccgtgacatatggttattgtcctttgaacaattaatgtcatttttcgttgttttctctggtttttttatataatggcctgtattttgaaagtacaattaatgttgtgttgcttgtaatcgtgtttaatattaaatttcatgtagacgtgtttaatttagtctgtgaagccatttatgtgcaaaagtaatgactttgtcaacatctgtgttttgatgtatgtttgattgaactcagtacatgtttcatgaggaaaaggatgatgtcagcaatgtgcacgtgtcttgatgtaatctaaattagcgtagtggttagtaccgaaataaaattatatatgacgatgcaaaattatctattttttcatcttgaaatctataaaaaacattagtactgcatatagatgggcatatcacctggagatagtgtttatattgattcaattatatgctggataaggaaaataataaaaaaaaagtgactataacaattttcttatcctacaccattcaattatgattatataaaaaaagttatatttttctttagtttttggaagtcctgtcagccaccattctcctgctcgtgactactggtgttcatattatatattttgggtataatcttttattggtagacgttcttatattataaaatagagcaagtagacaacttgttgatttgggtttatggggataagagtggtgatggacaggcaaactagggtgtttggttgctggccaagtataccaagtatgtttgatcaagttatcggttctagccacatattataagtcatgccaaactttccttttaacatagccccacatttcataggcacagtataatatgtagcaaagaagctaaggtgtggcttcatttttcttggtcacaactttggtaacttagtcataaatgtttggctagcttaattaggtagtgttagacaaccaaccaatcagcctcatagattgtagaagcaatgtcgttgatgctgaggtcagatcacaagagggtaggagagatacgtgcatgggagagtgggctattacagggagtgtggtactatcacattgataatgtttgtttcactggtggagaaaccatctttactcccggtttataaccccctgtagtcccggttttctaaccgggactatgaatccgggacttaagatcgctatctttagtcccgggtgaaataaccgggagtaaagatcgatctttagtcagagggatctttagtcccggttaatgctaccaaccgggacaaaagagaggataggggcagtcatggttggtccattttctttttattttctcccaaatcaagtgggatgtatatactcagatcaaacaacaaatccccaaatcgagtgtcatgcatatacctaaatcaaaccccaaatccccaaattcaaagtaacaacacaaatcattcacatcacaaatacaaatcctaagttacttacacacaaatcaaatacatcacaaatcttaaaaaaattacacacaaatcaaatgcatcacagatcgattatacatctcagatccatgcaatgaatcacaaattctaaaaaagaaattatacgtctctcaatcacaaattataaaaaaagaaagaagagccagtgcgctgccgctccgtgcacggccccgccgcccgcaccgcgcgcagccccaccgcccgctgcgcgctgtgcctcgccaaccggccaccgcgtgagagcgtgcaaggccacctccgtcgccgcccggccgccgcgtgagggcgcgcgaggccctccgcggccgcccggccgccgccgcctgagaagtcgggtggagacgggagggggtggatccagaggaggttgagaagtggggaggagagggaaggagacggatcagaggaagagatgagaggaggaagaggaagagatgggatgagtgaggagaggaggaagaggaagagatggggtgagtgcggagaggaggaggtaaaggtcggaacttattaactgatcctcccgtgcgcctcggtcctctcgatctcgcaccgcgcatgtcgatcttttttcccgattggtaacaccaaccgggactaaaaatagatctttagtcccggttggtgtcaccaaccgtgactaaagataaaggaggagtctgacaccacctgccgtcttttaaactaggactaaaaatgatctttagtctcgattgatgttaccaacccagactaaagatcaaaaagtggctctaacctttagaactgggactaaagatcatctttagtcccggtttttagtggaaccgggactattgtggatttcggccgaccgaccaaagatggtttctccaccagtgttttcaatattttctatgtgtagtgcctggaagagatctatttgttaatacgtaatattggctcataaattttgaatatttaattattatgtattgtgcattccacgtctacgactagtagcgcatgcgttattattcaaaatatgtgtccttttggataaaaatgaacgtgaaattaatttcaaaatgtcacattccacatgttggatgtagataaaactttggagggtggtgtatgaacaaaaaaaaaagagtaatgctttacccagtaatactaataactactggagaagatcaatactgaagaagtgatctttgccggaatggcaaaaaccacattagtcctggttttaatagaaaccggaactaaaattaaaattgatctttagtcccggttcaaaaggttaggggcaccttttgatctttagtcccggttggtcccggttgatgttactaaccgggacgtttaatacagtgcaatgcggccctgtctttaccaacaagtaatcaagaattaaaaatatagagagtggagcaaagtacacgtcctcggtcaaccttggacgcatttttcactgccagcgttagcgcaagaacgacctttgtagggcttatctttcttagctttcagcttgggaagagcatcatagtttatcatctctgccttatctttcttagctttcagcttgagatgatcgtccctggcgtggggctggatgcgtcgaccgattgctggctcaccgccagcatgacgcccaataacagcagtgccaccaagcccaacctcgtgctcatcttctccatttgaaagtaggtcaccctcctgggattatgagcagctagctaccttaatttgtttctcgtatgacatgcaatcgatcacatggagtgacttttataggacacagtttgcctataatatcaatggtggagatggaatttagatgacataaggcttattttagtacaagctaatcttgccttttaaccgtatacgttcccgtaataatgttgctgcgtaaatatttttgcttaatttagccagctctattattgcaatcttgaggttaatttagtatatagagcggaatcacatggaaattaataacggcagataattaatgaggacaataatatctctccttttttttcctcttttctattcatttttatctatttgctatataaagagactagaaaggagactaacgacctatattgattcaatcattgggacttcattgggcgaagctatagctatccatcggggtccactgaccccgacgatttcttgtgtacgcttcttagcccacttaattttaccgtgtaggaccccggtcgatataaacactagaccccggtaaccatattttgttacagcccgattagcaattagaaacgacacgtttgacattagcaagcaacaaataggaattagctagttctaatgattatacgtcagcccaaatgctcaatatacattttggtaatcttagcggtgagtatttgtgcatttaatgtctactttgtttagattttaattatgtccgtttttaatataatttatagacatgtcagtgcgttgcaataatctcctatgggccaatggttgctcgtagcattatttagttttctgttgggtctgttattttttcctttttttgggtttcttttagggtggatgataaattctgtagataaatagtcgagcaaagcattatggagctattcttgaaaaaaaaaagatactcctattttaaaagatctaacaatgcatcaaacactaagagggtgtttagttcccaccagggtttcccttaccgccggtaaccgcgaggttaccaggcttaccgtagggatacggtaatataaataccgcggtaacctccttaaattcaaataaatttaaaaaataatttgtatttttgataaattttgcacggtttttcacggttttccactgttaccgcggtaaccgtgcttaccgccggggtgcggtaaccctggccccgacggtttgggaaaccctggttcccacataaaaattttacaccatatcacatcgaacgtttaaacacctttcatgaagtattaaatgtaggctaaaaataactaattgcacatattgcgactaatttgcgagacgaatcttttgagcctaattgctccatgttttgacaatgtggtgctacagtaaacatttgttaatgacggattaattaggcttaaaaaatttgtctcgcagtttacagccggaatctgtaatttgtttggttattatgctacatttaacacttcaaatatgtgtctgtatatccgatgggacacggcaaaattttacccctagatctaaacaaagtttaagttagtattgaccccgacgaccatttatcctggcttcgcccgtgcttcattcggactccgattaccgcaaacttatagtcttctttgcagtagctactttatgtgtaggttcctatcgtctattcgaataacgattcaaaagttgaaattttcaaacctcactttattttttggagtttgtaatgacatggggtattacactactagtttagattggaatccatattttcaacactttgtctgttttcacatatgtactctttctaaacatgctaaatataagttaacatgtttcccctgaatttgtgttgttttattttttctaacaagctattgatgcaaaaattgaatcaacacgcgaagacctgagagcttttcttaattctaatgcaggtcctaaaatttaggttcgtagtataccagatcatacaactaacctggatttttcatattttga

SEQ ID NO: 23785 - DNA, 12039 bp, Oryza sativa
gccagccactctggcgccccaaaaaggaccatttctgggataagttttttcagggatctatttgtgaaataagtttttcacaaggaccaaaatgtaaaaaatccaggcaactaactaggtgaatggaacaaaaattgcattaggttacagagcaaccatatttggattattctggcattataatgaagggacaacaaacttcattttattctatacttgaaatgaggcaacgtttcgagatggtgacaccttcaaaacactaccacgtagtatataaaagagataatccattatatgccactgactttgtcgcacgtctacgatttgccactgactttgtcacgttctacaacatgccatcgacttttgcttaacttctacgatttaccatcgccgtccggttagccaccgttagtactgtacaaatttgtcgaaatgaccaaaatacccctatgacaaaaacttccaaaacttggataaaattatcaaaatattatattatacacataagattgtaaacatccaaaatttgaccaaaaacttgaaatatgatattacatagtttttatccaaattttgaaaccttttctcccaggggtattttggtcatttcgacaaatttgtatagtactcacggagactaaccggacagcgatggtaaattgtagaagtttagcaaaagtcgatggcatattatagaacatgataaagtcagtggcaaatcgtagacgtgtgataaagtcagtggtatataatggattctctctatataaaaaatggtaagttgtctaatggatggagtagaggggtatttatactaggaacacccctcctagcataggtatgaacataagaagccatgttcggctaacataaatgagaatgcaaaaggttttcttgggtttgcacacatcccttaaactcatggatagtcttcagtaaaaatgctataactttgttattgaaaaatgatattgaggtggggtttgatgcgttggaaactagatttgtccctctttccaaccatgtatgccatgcaaaccatctcttgactggctgggtcacacaagccttggaagtttagcctttgtagcataaaccatattcttgttggcgtagaaagctactagttaggcatgggctgattcctcctcggagtaacccttgtcgttctcaatgtaacgcatccttcttggcgtagtgatgagtagtgatgatgtcctcaggtataaaccttaataatacaaaggtagagcatttaagtagtataaaactctcactaaaatttgggttaagttgagcaaagagcgagttcacctcttactgtattttcctcgcacggctgcacgtaattgtaccatgatatgtttcattgttcttgctgagatgtaatccatcaacttgatttacatcatcttcattttattcatgtgatgtgtgacgtgaaccatcacccttgtttacgtcaagtgtagctgggatgtccttatcaacggcacatcaaggaggaggtctggtgctaaggaggccaccgagcaaccctcgatccactggtccgtccagaagaggatcaacacattatttcctggcacgaagaaggtggacgctgcaaacatgttggagacgctccgctcgatgggagccttcaggtcagcctggtaaggatgctctaaacactgaaaccagagccagcaaagatgtagagcaaagtccgttgtccttagatcagcaatacccagtccaccaatagatctagggcggcatacattcattcaaagcacacaacactgtctcgcattggccaactccgaacccgtccacaggaaggcgcgacacttcttgtcaatgattttgacaacccagcctgtcatattgtcaagaacacatggaccgaaatagatgaaagcattgcctggactagaacagagcggtacgctagaatggtgaggtgacccttccaaggagggagccgacacatatgttgcgactatatgtgtgtggatgcggtttcagtgttcagaataggtgtttggttattccgtaggatgaatttttcaatcaaatagttgtccctgccaagaacagaaaaaggaaggatcgatttagagccataatttaatctgatgagctgaaattgtgcctgtttggatagaaattgcaggtgtgttgctttgtactgctgtgaatacctgaagcctgaactttgtttgtcagcaacgggagattatgggctgtaaagaaataaaaaaatatcggcttgcattggtttcttataattttgtttgggatccaagaggaattgagaaacagaaggatagtggaatccgtcgaataataaaaatgaatatagcttcagattgagaacataagagttaatgggttacactatttaatacttttgcagttcttaagttctgactacattttatacattagcaaagggggactgcagggactgaagactgtagagggttataagggaaagtggaaaatgagaaagatttttctagttagagccatctgaaccatttctatacatcactgtggttctatgaaccaattttagatttcttcacaaaatgctaggcaaaacttaggttttgtgcccctttaaaaacggcggtagcggccgtaatagcggtagcggccgtaatagcggtagcggccccctcccgctaccgctacgaagtagcgtcttggatgtagtggcctggaacttagcggccgcaatagcgtgtagcgcgccacaatagcggatggcgaaaacgatatagcgggccgcaatagcggatgggccacacatatatgtatacccacttaaccctagcccacctttcatcttccgtccgtctcccctcatttgcgccgccaccaacacaacagcgcttgcgtcgtgcggcggtgctcagtggattcgccggccggccagccggacgccgggcggcagctaccgtggagcgacagagcacttccacacctcgccagttcgattcgatggccaaaggttagttcgtcgtcagcgcagcgccggccgcgccagccaccggcgctccgtcgtggtggttgctccttcatttagatttgagtttgacggcttttctgtgcaggttattaggtgatggtttgacttctgagcttgctggccggttatcttctccatcgaggtggttgtttgctgttagcctgttactggttagtgcttactacttagtggttggtgctcatttctggtctccagtaagaatttacaagatttacatgtaggacttaagattatcaattttttttctagttgcacaatgtcgtcggctgcatcaactgcaattcaagccaatcaacagttgtgtctgtgtcttaaattttagttatgttggaaagacatcaactctttgagtgcaagtgtgcaaataaatgtctatattttctcaaatttacatatgattattcaatgccgctatttgaacttagcgcccgctatagcgcctgctatccacgatccgctaccaagacaccaatccgctactgacccgctatctgctatttattagcttgtttgggaagttgttctgttgtcctatccaaccaacagaggtatgcattctatgtcattaacatccattttccatttgtttgtgcctgatagaattataaaatttacattccaaatgtttattttaggatcagaacatttcttttgcttgctatacaatactaatgaatggtaacgttcttatttcaatagagaaaacgaggttcctccacagactccattggcatgtatgcagttcaatgttttaagtgtcataaatggcgcaaggttcggacgaaggattgacatcgaatatataacagccgtatatgggtccttgaaaagcctaacatacaaaagcctccagcaggaactgagagactagtgattgtaagaggtgatttgtctaaaatggatgcccattatgtcattccaaatgggaagccctattaaattgatatcaaaaatcaaaacaaataattagcaatttgctacaaacatggaaattatttgaatataataagttgctataatttagaaataactaatgtatttctcatacaactaaaatttataccattgatagaaatagctacccgatgctcagaactaatattctcccttttctgataacagataataagcaaatgtatttatacccacaaagattgtatcaaccaacaaatgatccggaggaacgcgtggttgttgtggtcgccgatgtgggaacaccactgcctgagaacgtgctacctgtactgacaccgccgtaatctacccccacggcgacatctcttggaggcggtgacgccttggacttgtacatctgcggcgagagatccggcaacctcgcgtcgtcggactgcaggacgttcatggcgcgggcgatggacgggcgctcactcaggtcagggtgcgcgcaccacagcccgacgaccagcacgcgctccatctgccgctcgtcgcgcacgacgccaacgacacgcagccgctcgtccaccgcgtcgaggatcgcgttctggctgtacaggttccatacccacctcagcagcacgaagctcggctcgttctcctgcaagaccaccggcggcttggcgcagacgatctcgaggaggacgacgccgaagctgtagacgtcggactcggtgctcggccgccgcgtgttcacgaactccgggtcgatgtagccggccgtgccgagcacggaccttgtggcctgccacgctttgccgtggtcgacgagccttgccagcccaaagtcccctagcttggtgttgtacgacgagtcaaccatgatgttgcttggtttgatgtcgccgtgcaggatgcattgctcccactcttgatgaaggtaacgtagcgcagctcctaatcccataatgatcttgtatctgtatcaattaattaaggaacacttgttaacacagtagtactccaccggttcttaattttttttatgtcatggttagttaccagttttttttttacaataaaaactttttaaataacaatttttgatgaacgcaagtagcatagttatacatatagcatgccaagtacttttcatattataagacgctctaatgttttcctagttaaacttttcaaagtttgactatgtttatcaaaaatttagcaacaatgataacatcaaattagtttcaataaatctaacattaattatattttgatagtatgtttgttttgtattgatagtgtttctatgttttttatactccctccatttctaaatgtttgataccgtagactttgtagcacatgtttgaccgttcgttttatacaaaaacttttgtgaaatatgtataactatatgtatacataaaagtatatttaacaatgaataaaaatgatagaaaaagaattaataattacttaatatttttgaataagacgaacggtcaaacatatttaaaaaagtcaacatcgtcaaatatttagaaacacggagagtataaacttagtcaatttaaaaaagtttgattagaaaaaaatcaaaatgacttataatatgaaacgtaaacggagggggttttttttccagaaagacgagctatcaaagtttatgtattaataatatctaatgtcaacgaaaaggaacaaatttcctaggaatgaagggagttagatttaatatattgatttcaggtgcataaattttttaaaaaaattctggtcatttttttttatcgcttaacttaatgatagtccaatggttctcatcattcctatttctttgtcaaaggatatggcaaaatcaatagaggacatacaattcaccaaaaggatctctaaataactagaatattttttttattttgaaggaaggatccaaataactagatcaataataactaaaaaaagaacaatcggtcatgggacgaattgttacctctctggccaggtgagtatcctgtcggtgttatagatgtgcttatctaggcttcctcctgccacaagctcgtagacgagcaagagccccttgcggctatcacaccaaccatgcagctgcaccaggtttcgatgcctcagctggcttatgatcctcacctcggcctcgaactccctccttccctgagacatggagtccatcgagaacttcttcacggccacctcctggtggtcctcgccgccgccagtgccgacggcgaggcggcccaggtagacgttgccgaaccctccttgcccgagcttctcctcctcggcgaagtcgcgcgtcgcggcggcgagctcgtggaactggtaccgccgcggcccgccgccggtcacggctctctccaggtcggcggtgccgtgctgccgctgcccgtcggaggagtactggtcgctgtcattgtttgccggcggcggtgagttcttgcggcggcgcttccgctggcgccacagccatagaagcgccgcggcgaccacgcacaccgcgagcgtaggaactactactgccatggcgatcgtcttcgtcgaggagttggtcttgggttgtgctagtggcagtgcttgcgcaggtagtggtggcgccgtcagaatttgtggtggtggtgcttgtggcgatggcggtgatgaccatggagatgaaaatggatatggtggtggtggcgatggcagtggcggtggcggtggagatggaggtggttgtgatggacctggtgctggtgtcggagatgatagattatcgtcaagtacatatcgataagaacgatattctgctggcgaaggtggcgaggccatgggagtatacccggtgatgataactgatgatatatcaggagtggcgatggaaggcaacggaggcagccgcgacagccaccacccctctctctctctcctcaaattgttgaggatgatcgatctgaagttaaggttgagatctttcttggtgttgcgaagaatgttatatacgagtgtttaggcaagatagcaagagaaatggacgatgaatcctagctacaaggatcaagaggttatggttccgcgagctacccaaccatatatgtgatgggaattgaatgccttttatcgccgctgtcacgcctcacgcacgacccagtctgtccaactccggctgttttcaccttgactgtttgttaacactaaacagtatcatccggagaaaaggagaaaagtgaaattaagcgtgtaggatggagaggacgtgcaataaccgacacaattctctgcatcgattttaatgattccattatttcaacaattcaaagctaatgagatgtttgtagaaacaatctaagaaattcaaaactcaaaaattgacaactaaagtcactaaaatggaatatttaacttgactttatttgactttattactccgaacgtctcaaaatgtaactattaactattaatcgggacagagccctatattttagaatgaaaagatctatatgctaaacaatcttatattttggatcgaagagggtatgtgatacaaaagtataatcataaatatatataaacctaataaattcaatttttgtcataaatagtatatccaaataataaagtgagtttttattaaactattatcctactaaggaaacaaaatacaaccaagggagtatggcctggtttagttcctaaattttttttcccaaaaacgtcatatcgaatctctagagtattaaatatagataaaaacaaaaattaattgcacattgcatggaaatcgtgagacgaatcttttaagcctaattagtccatgattaggcataagtgctacagtattccacttgtactaatgacggcttaattaggctcgaaagattcgtctcgcggtttccagatgagttatgaaattagttttttcattcgtgtataaaaacaccttccaacatccggtatgacatccaaaaattttcttttcgcgaaccctatatattacaagttggagcaaaatgattaatgaaatcacgtacatttcactcaactggactgggacgactagacgaggtcaagtcaactgtcaagtactcccaataatatcccgatcgatgtgcagactgcagactgcagactgcgatagctaggatttcgaattaaatatgttccaataatcaaataatagtatatatggagctaaataagtacgagcctgacttcacattttgtaggtatgtgtactgtaattatcttgccttgatatgtgaaccggatattaaatttgacggtccaatctttcgaaagtgttcatagcgatgagtgcgtatgtattgtgggcgtaatagatagaagaaaatgacgaagaaaataacagaggagcgacgaccactcccaaacggccaaactgaacctctacttgcacggagatgtgtatatatcaacgtcaacggaacttgcatataaatttcccgtacgttgtgctaaaatcacgtccaatatttggagtctatgcaatttgatccactactttgcagttggaaagcacagacatagcaaaataataaattatttaaagtatttcgtgaaacaaggggtacaatatgaccgagcaccaaacaaaaattaattaagtttcctgctatgacacatatgttcgcatttctttgcaaaaacaagctattcacctgcgcagttgaagtgagatattattacggagttgctaaatattggcgacatattttgtagaaataatatgacaattcctagactgtccgatacacctcaagattcgtgcagaacacgtaaaaaattcaggcgacccaacggatgggtatatgatcgaactcgtaacatgagccttgcaagccaaggcgcttactgcgagcaaccaactcattttgtttcaagtacacaacacttacgtacaatataattatatataatataattatagtgtaattacaatatagttacataatatttatacaataattatatctaacatgttttcacccaaaaatatatcgacatcaactgttacccttggttaccaattttaaaacatcaattgtttttaactttttactcccttaattcaaaagtattgagactattttatttcataacatttccaaatgaaattggtgtacttgtagtctccatgcatctaagagttaacgaagaagttattcttttattttacagtactaaattaaattattgaccggaacctgagtaaccacaatgctagaatgactcatctctgacggcccaccaatgacaagccgaaatacttgtcacggatggcctcacctttgaggctttgactggtccatcgggaggccataacaggtaaggccaccggctacggcccatcacagacattaggtcacctgtgacaggctggaattagcatacgacatagggatacctttgttggatgatagttctggcccgttataggtgacctaatgcttgcgatgggccgcgcggttccggccatcaaagatgagatttacttatctctaacgggttttagccctaacccgtccgagatatcttatggcctataaatacccccaaactagggcaacagtttttcattccaaccctgcgtaccgttcacatttcgggtggaagagtaaggggggtgaatttttgctggaaattggaggtaaagaaactttgataattattattatttaacatatatcatatattgtgtcgtattgagtcatatagcgtacattacatatattatacaggggcttgtggagactctcagctctgatgagccggaaaatactggcccatcagagatgaccaaactttatacggagggaatactacatgttagtcacactagccagaagggcagaaagcctgcagccatgaaccccccaagtaatgtcctcatgtcatgtgtcctagaccgttcctgcagctgattttagcaagtttattttaattcttttttagcattttattggtcgattttgtagattgattcctggccggttgctactgtaagtgatttgccgaaaggtgacggtcgttgaccttgagtcaactcgtcaatgccatcgtattcttgtcgatcagcctgctgcgcgtctgctctacgctgggtcacgctcaaacagggatcctctctccattgaacaaatcaaagtttggtgcaattaattgatgttgttgcccatggcaccgaacaccgttacaccggacaggcacgtaggtttttcacgaggatcaaatcctgaaatccttgactatgggcatagacagatttttatgcagatttataggtacgtagtaacctttttttttcctaattaaccgttgatgaactagccgctcgtaaataattcgatctttgctcctttaatttgtttgggtggggggggggggggctgtgttgtgtcatgtcacgcagtaatatggtacatttcactaataagaatgcataagatgtgaggtgaagtatagtacattgaaaagtatgacatttcaaaatatattctcaagagtagtacgcccggcctagataacaccgttaacttttggctatattcatgtgtatttgtttattcattgtattcaatatttttatattcaatatttttatacaaatatattaaattataatgcataattaaacataaaatgtaaatcgcgcgcgctctcgattttgccctatccagcgacgcatagcgatccatccgatcggccgagaatgctccagatatgacgtcgctctctgtgttaatcaactgaaaatatatactaatagtccatcaaacaaataggaaccatctatgcgtcaaataaattttctcttaaactactcatccgatctgttatgaaatatttgagtgatctcatccatctatatggatagagcagcaaccaattctgggacacgacggttggtcatgccccacacctcttctcgcctcacggcgattctagcaacggaaaccatcgcgtcttctgatgccgcctctctcccccctatatattataaccattgttatcaataaaggattcgctcattcattctctacattcttgtgtgcaattctctctctctctcgattcctctcgctcaatcaatcttatacactttcaacacgttatcagcactttcgctctcgcgaaggagatcgcgaagtgaaagaagaactccatcgcttttgatctaacagaaaagcgaacagaagaatcattagagaaggtacgatgcctacctttcattggatcatggatgccattctcggcctccctcgccatcagcgcgcacgccggcttcgccatcttcttcgtcgatcgatgaggaggacgcgctggggaacccgcagaggcagggctagggttggtggccgccgccactaccctcgctgtcgtgtgcctgcaactccggttgtggtccccccgcccgtccctttcgcacctcctcctccgcctccggttgccgaagcacctcgccggatccttgtgcaaggggtacagtactgtgcccaccatggatggatggcggtggtgacaatgcccggcgagccgtgtgatctcccactagagatggagtcgctgccagccccgttcgtcaccactctgtcaccaccaaccgctccttccccacctccatcaacgtcgcagccgacgccaagctttcgacgctcccccactcccgcgccaccaggattcggccgtaccggaaccatcggcgcgcacgggggagccgcctctctttacaccgtctccaacacgtcgccacactggagccgccactgcacgccgtcccggcctccgccatacgttcatcgccgttccccatggctcctggagccgcacgataccaaatggcgtgggggaacggtattcgggtccggccggtctccgactccgatgaggagtcgggatcgtcggcctaaagccggccggcatgccgccggccgatgagggggacgcggcggcggcagatggtggatggcggcggtggaggtggtggtggatggcgacggcggtgggcggcgaagggtggatgcaggtggtatcggcgtgtggcggcggtggaaatggaggcagcggcggcgaactcagcg

SEQ ID NO: 23786 - DNA, 877 bp, Oryza sativa
taacattaattacaagagttaatttatttctgccagcaatatatgcttcaaggccccaaccaaaaagtaaataacatgaattcattttaaagcacgtttaatatatacaccaattgcatccccgcaaaaaaaaaacaccatttgcaagcatctaaaaaaatcgtttattattattgattgcttgatatcagaaaatttaatctagttttggtacagcttggaagcatattatttattttgagtttgtctccagtacaattgacagcattcagctgtcaaataaaattacactagtacggaaactaaatttaaatctacaaagtacaacgacataccaatagcctctgatgcagtaagtgggaaatctgttaatacaccatcaacactaaagccaccgtcgctgacaaatgacagatattcccccaaaggatcataactgtagttgtagggaaaaattccatcgtttgaaaaatcagacgcatatatttctaaacctgcattgtgagcttcttggacaatctgtgtgtgaagctgaatataattatcacttgttactggccatatatagtttttgggaaccattatacctgaagcaattgtcttaataaatgtcaagttactcaacatatagttatatgttttatttgttgaaggatcagacagggctttatcaagaaagcagaacactagattcacttcacgattaatgcctcccgataaactttgcaggaaacctagttcaggtgatgagatgtacttcacagagccaagcttctgtattgaaagaatgtaatttgtcatgttcaaaccatgctctctgtagaaaatgtcatgctgcagaaagaaatgaaaagagagttatcttctgaaggacaaa

SEQ ID NO: 23787 - DNA, 12544 bp, Oryza sativa
caagaaaacaaaaggcactaggataacatccatttttggtcgctctagccggccggcaactgcagagacaagataggaatgcagtacgtatccatcattttttccctttttttaaaggaaagggaatacatatatatatatatatatatatatatattggtcagatgcaagaggatattatttcacgatcacattgacatgcatggcggtagtatccattcatgcatttaatggcaatgcagcgagcaagcagcatgatcgagtttctaataaaaaggagttgaaactatatatatggtataaggcaaagttattgcaagccttcctttcaaaaaaagaaaaaagaaaaacaaagggttgattaaactgatttgttgcaactcacaagtaacgtttctcagcgaagccatgttatagtccacaggtaaccatccggttttctgtgcaccattgattagatatgccttcatcccctctggataaatttcagtgatatcggtgcagttctgcataagtaaatctcggaggcaaataccaacgccatctttcgtcagttgcacgtcacaccacaagcttatgtggagcgaggaggcaaaagcgaaggcatattcactggaatcaggaaaaactcccgaaaatccacctttagcaataacaagaggagcattacctgcacacaaccaacaaattaaattttaatttcgggcggccatgcatatgctactgcaagtactgatgcatgggacgaaaaaattgactgtatgtaattcccgtcaagatttccaataaaaccgatcgaacgactcgctgcaagaactaacccaaactaaactagagctggttcagaaatcagaaattcagaattcaggtcagtcctgacatgaacagagccgggaaatactcctttcctctctctcctctatctctctctctatatatatatacacataacgattaagaggagctagatcgagcttgccgttcaaggttttgaaggtggttggcgccggggggagctcctccgcggcaacggcgacggtgacggcgacgatggttgagagtagcaggaggcagaagcagtaggaccgcaccatggggagggagccggtaatcctcgacaacatctcctccaagggccaaggctcgatcggagaaagaacagcacgcacgcacgcactttgtttggctgtaaagaggcgcatgaacgaacagaacggagcagtactgtggtctgcgtttttatagctgtctgtcagacacagtggccaaaaaaactccctaattgcgttctagtaatgtattatcagtaaacacaagcatctatcatgctaattaacaattactcaatcaacttgaaattaataaaacaacaggggttgtcggtggagtatatatgaatatgagtgggatatgaggattgaagggtgagcagtagagtgtgtttttctctgcaattaatagctagccattaattagtagtaggggtgctacaaatttatctgttttttttaacggatcggccgagtaagaggggtggatcgaggcttgaaggccagctagcaagagaatgatcagttttggtaggaggaatccgaatcttatctcatcagttcttgcttcggttgagcctttacctagctaagctacctctgtattctctgctgcgttaattagggaccatcgagcaatgctatgctcgctccggcgagtacgggggaggccggtgccattaaagctgttgttcttcaagtacagactacagagtggcgactggcgagccgctcactagtgaagaactgatttttaccaccggttcggaaccggttatagcaactggttgtagcaaatcaggactaaaatctcgattttagtaccagccatttaaccggtactaaagatgcatataaagtaaaaaaaaaatttgtaggatgcgggattcaaactcaagatctctcacctcagccctcacgcgtattactatcccacctagtacacatatctaacttggatagagatactttatttttaaactaatcctgcagacatctttcataccacttggtaacaccaatcggtactaaaaatatctttagtcccggttggtgttaccaaccagtattaataacaaccgggactaaagatcctccagcattagtctcggttggtgttaacaaccaggactaaagatgtatttttaataccggttggtataacatcaatcggaactaaagattcggttataaatctaatcgaatatttgtgttttgggtaccacgataaaagatcactggtggttggtctggagcttgttcaactccggcgagacagtgtcacccttcgtccttcgatgcacgcggttgtggtacaaatcgagatccactgtagaaactgaagagaacccctccggtaccatgtcggctcaactggccacctagtttgccccatcttctgctttttttaaacaaaacacaccaaacaatgcgatggtttgtattgatatagcatgaaaaaaaattacaagattacaaccctagaagattgtaaccaggaaaaacaaaataaacacgccacactggaagtttgcagcttctcacacaacctaggaaaagacactaccaccaagtcgatcgcaggcctacaagggtgtcgcaaaacgccccgccaaaaactgactccacacagttgattgttaacgagctttcagtcatcctcacgtacagaggttgggaagagggaaagggcaagagagaagaaaatccacttgtccctcgctccaacctgatgaggggggaatcatggcgctcgaagatgtcttcgttgccaactcgaggaaccctgacctaggctttcgacttcaacaccctcacccacttgtcgtcgccatcctagagctccacataccaagcaacttctactatccacagctccaccgcactggcgccccaccaccggtgagcgcagacccacctttgtcgggtctctcatgtggccatcgccgctcctacaatggttgccctcccactcaccgtcactgcaactggccaccaccaggtgcctctcccgctcacgtcgacctcccactgctgccgagctagtacagctggccgccgctagatgcctgttgatgaaaaatctgcgctcggccgatggtgctagatctgtgttagcgcgaaccaagtcgacgagcacaatggcctaagagatctacttagctccagtgtaggtccaaaacttgatgagatgtgggcgtgccagtcagtttgattctacaactgacaagatagataaatatgttgatcagcaaagagtcgatcggctgacaagccgatagagcgattccagccgatgtcgatagggttttatgcaatcggctatatgtccaatgtagataataatataaagacaatcggttgatcataatgtaatataacaataatataatccagtagaaattaatcggctaaaataagtgatccaatggttaaagcatacatcgattgaaggttcgatgtcattaaatccaaatgattaaataaacaatgaaacctttgttgccatcggctaaatccaacttgtatctaatccttgtgagccgatacaacgtccagataactcatcggttgaaaccacgatgaaacccttatgggcaatcaaaatgcaggctagagattatggttctaaacacgactagtgctgatgtagcgcaaagtttgaaaagaaacataatatctagacaatcaagcccttgactgatttttaagagttgtggataccttagctaatctaatctggcaaaacaatttagccgataccggcaaaaaccctaaagcagatcctaaccgatacaagtaaatcgagctaccaaactagattaactaagatatatgatatgtaggtaggcaaacatatcaaccgaatcaaagcaatccaagagattgaagcgatgcagccttaaacaacaccaatgtagccgatacgaagcaaagcaatccaaggaacatagcaggagaggcccccactgttaataaaactttattagtaagaaggcaggaatacaaagaaaattacaaagaggaaatccaactaatgactactaatttgtctctctcatttaatctaaacaataaaaggagtatatcatccttatggagctgcctccaggaagacaaagaaggaagcttattatcaaaaataaaaccatttctttacttccaaatattccaagaccctaacagaaacttttccatgaaacaaagaccatgatatcttcttttagcatccatcagcattaactccaaactgagagaggtattccaagatatgcccacattattccaacaattttgagcaaaagggcataggaaaacgaggtgaagcagagattcaattgaggtagatgaacaaagcacgcagttcaggtcacaatttggaggggcacaatgcttatggtctatcatatatttagtgttcaatctgcccattaaaagcaaccaaccaaaaactttaattttggaacttttccatagccaaatgaaatgctgacgcaatcttgtcttgattttgattacatggaaaatgctgaggttgtgcctgttgattgtcctgtctctctcctttagcaaattggagctgatatgtttggtgcttcactggaagaggtgatcccaggaggcggacaagcatgtttcctgctgaagatttaggctcttgcttgggggggggggtggggttggggttgtggagagtggaaagagaatgaaatatcaggtgcaatagcaccattcggtgtaataatgcaacttccattcctccttattggatctagctaggacgtatggcctagatcaaactcctcattcccactgcacattttgcaaaaaagccagtcgtctctattaaaagtattttctttagtccctgtagcttcctcttcttttgtctccttattctcgagacatatgtgtgagaggattgagagtcacacgtctcgccgtccgatggccatccttatctctttcaaccctatcctctggctccacttgttgccacaccagatcagccattcctacttgtcgccactgtcggatttgccctcctcgtgcatccttgaagacgtgtgttgcctcgcacttccttggcattggcagctcgccttgcccatcctctacgctggaggctctcacattggtgttgtaacaaatagcaaattaaactgaaactagtatatattttttatttttgttacaacatatagaaatcaaatttgaacatgcatattttagatagtgatatattttatattaaattatcttgttattttttttctaatttttttgttattattttagttggcatgcaaaaacctctcctctggagtggtgaaaagacttctggcctaagtgtagcatactactacaaattttgatacctctcagaatctcgagtatcaggaggttaccaaattacacgaaagtttttctacctctcggtactactcaaatgtcgaaaatttttctcttgagcatatatccaggtgtaaattacttgtgtacattttgaggtgaggagttgacaaataaaacaattttattgtacgtatttaggtggaaaagaaaaactgaataataaaatgtgccgaattttcttatgtatcacacatcataggtacaacatcgcgcttgggctgggctccgcattagattgcaatacctccaagactgcaaccggtgcgtcgtgcacgggtacatcaaaccggcgaatataatgctcgacgcgtcacgcaacgccaagctcggtgacttcgggctagctcgtctcgtcgaccacggagctgaacgccgaacgaccgtgggattacatcgatccggagttcgtcaacagccacaggccctgcgtcgagtcggacgtgtacagcttcggcgtggtgctactggagatcgcccgtacgtggccgacggccaactttgtcgtcgaggcgagcccccgcgctgctgagctttgtccgtggcatgtatgaccgtggcaacgtgctggacgcggcggatgagaggcgcaatggcgtgttcgacgagcggcagatgcagcgcgtgctggtgatcggcctctggtgagcgtgccacgacgcgacacgtcggccctcacgtctcgcaagctgtggaagctctgcgtgcggtcgacggggagctgccggtgctagctccggcgaggactggtgcagagcgttccttggtggaattacgtacgtgctgcttacggtgatctgtccgtcgaattctccacgccacatgcaacagcgtaccttacttccagtgattcaactaatctactagctgcagaagaatgaagaatcttaatgcacgcctcatggcatgtacaactctgttttcactggatgtctaggtttgaactgctgtgataaacgtcttacgtacttacgtgtgagagatgtccatttactcgcattgtgatcttctttaattttaaccttacgagtcattccatctataactgggactacctatacatttgtttaaaaaatttcttctaaaaatatcaaatataatatagtagaaatgtacaattatactgtaattatattgtaactcacatgtaactgtaatgtttttctagaaaaagaggggggcctctcccatttcattaataaaatgacagtagatttttatagagtcttgttacaaccatgtaactacaatgtaactcatacgtataacactggatagctctgcagttgatggtgcccttcagaagcagcaggaacaggaggaattgctcaagaacaagccaggcttcggctttctttgccaatatatatgaacagctggtcgatgaatggggcttcagggcccatgatcccaaccattttcttaccaaagcattctgatgctaccttcctcctaaaatttataacattgtttagttcatatttacactaaccaaaatcataaaaaagaaacaaagggagtctattctgccgaaaaaggaaagaacttgactcctctgttcctcctgcaaaaagaatgttagctcaagtggaatagtaccctaccttgcaatatgtttgaggaagaaatcatacagccaatgcctctacctgtcctgccaccagttctaccagaaaacccattcgaaagagaaactggaagtttgttcctgaaagtaatcctcctactttgatcaaggcaaagaagaagtattagagttagattagacttgtatagcctagatatttgttgtatccgtatatgtctcttatttaagagtttgttgtaatatctactgtattggatatataaatataaatcgccctccacattgggttggtgtggcgtctcataattctctacatggtatcagataccggtttccctctcctttcctaattcgccggcttctctccacgcgttgcccgtgatctcgcgacttctgctcctgccgcgatttgtttttccctcgacgagattttcgtcgccctcgacgcgtcccacccagcgtcgtgttttttcgttgtccccaccccacgccgcgccgtgccctatcaacgcgtttttgccgctcccacgccgcgcccagtccaccgcaccgtgccctgcccactctgctcgcgccgcgccttgccctctccacgccacgccgcgccgcgctctgctcgcgccgcacccctgcccgctccttgccgcgccgcatcctgctctacgcgtcgcgtcgtgactccctcttctctaagccatgtctaccgagtcttcttcctcctccacaacctcgggaacaatggcatctacgtcttccggttccttttcaacctctgccgctagcagtggggagtctgccagtgcaatctttgtcaatccttatgccaccgtcaacgtaaagactcatattccaatcaccctggagttcaagcaccccaatttcaacaagtggaaggctttcttcaccgcaatgtgtggcaaatttggtcttcttcctcacatcgatggtactgctcctcctcgacccgacgagtcggcttgggctcaagccgattgctgcgttcggggttggctcttcggctctgtttccgatgcaatcctcgatgtcgccatggaacctgaccaaacagctcgcgatctctgggtcgccatcgacgaactctttcaagcaaacaaggaaccccgcgccatctatctgagtcatgaattccactcacacacacagggtaatttgtccattgctgactactgccagaaggtgaagactgccgccgatgctctccgcgacgtcggccatcctgtcactgaatcgcagcttgtcctcaacctcctcagcggcctcaatccgcatttctccagcactgccgacaacatcgccggcgcccctgtcctgccatcctttgcatcggcgcgcaacactctgttgctcaaggaactacgcatcgccaacgacaccaaagttcagaatgagacagccatggtagcggctgcctctcctgccaacaacagcacctccggcacatgtgctgcctcctcgtcgcaacctcgcggtggtagcggtggcggtggtggctccaacaatggtggacggcgcaaccaacgccgcaacagcggccggaacaacggtggtggcggcaatggaggtcgacagaactacggtggtggtggctatgggaactctggaggcggcggtggctatggaaattctggaggtggctatcctccgcaccaagctaggcctcggcctggcggcccgtgggtctgcttcaatccatggcccgtgcaacaacaggctccatggcggcctactggaaccggcgctggcttgcttgggccctatcctcaggctcacactgctttcaccggcccatatgtttctccaccaactctaggctggcctcctgtgcagtcagtgcagcccacttgggatcaacaaggtctggttgctgcccttaatcagctgtctgtaaacagtccgaatccctgggtgcttgacactggtgctacatcacatatgtcctccaccgacggtattctcgtcactcgcctccctaattctcatactttcattactgttggtaatggtcatactattcccgttctatgtcgtggcacttcttttctacctataggaaccactaagtttgctctcaaaaacattcttgtcgccccttctttggttcgaaatttactttcagtttgacaattcactcgagacaataaatgttctattgagtttgatgagtttggtttttctgttaaggaccttcggacccggcgcgtgattcttcgctgcaatagtcgcggtgatctctacacttcacctactgccgtccctagcattgctgctcacagcttccttgccgaatcctctacattgtggcatcgtcgacttggtcatcctagctcagctgctattcagactcttcacaaattagctattcttccttgtaacaagatagatcataagttgtgtcatgcctgtcagttagggaaacacactcgtttaccgttctctcggtctcagtctagtacttcttctccttttgagcttgttcactgtgatgtgtggacctctcctgtcttgagtacttctggctttaagtattacttagttgtgcttgatgattttagtcatttttgttggacttttcctcttcgccacaaatctgatgtccatcagcatattgttgagtttgttgcctttgctaaaacccagtttggccttcccattaaatgttttcaggcggataatggcaccgaattttttaaccagaacacaacctcctttttagccatcctcggtaccatccttcgcctatcttgtccatacacttccccacaaaatggtaaagccgaacgcatgcttcgcaccatcaacaattctattcgcactcttctcatccaagcatcaatgcctccgtcttactgggccgaagcactagccactgccacatatttactaaactgacgaccatccacttcagtccacaactccattccttttcaaattttgcatcacaaagttcctgactattctcatcttcgggttttcagttgtctttgctatcctaatcttagtgccacgactcctcataaactctctcctcggtcagctgcctatgttttgacatctcacaaaggctatcggtgtttggacatctctactcgtcgtgtcttcatatctcgtcatgtggtttttgatgaacaaaccttcccgtttgcggctactgccccggctgcctcttcttttgattttcttctacagggatcacccaccgcggtcgctccatcctctttggatgttgagcatccatgccctctcccggctcccattcttaagtcgccggccactgatgatttggccgaccctgatttatatcagctggtccgtcacagaagaccgatgccatcatcatgtgctttggatccggttgtctcggtggagcacgtttcctctggtgccgatgctggtactacgggcaggagtgctgacacatcttccccaaccgaacaatcatcatcgcatgctgcacaaccaactgttttgcgtgatgttctttctgctcagcagattgtttctccgtatcggcatacttatgtgcgtcgagctccacctgttgctgttcatgggccaatccgtactactagggctttccgagctcaacaagcacaagatcagcagcgacactctatggtaactcgttctcaaagtggtacacttcgtcctgttcagcggtttaattatacagctgtgcatactgctgtttcgccggtcccttctaattaccgcagtgctttggctgatccaaactggcgagcagcaatggtcgacgagtacaaggctcttgttgataacaatacatggcgtttggtccctcgtcctcctggtgctaatatcgttacaggcaaatggattttcaagcataaatatcattccgatgggactcttgctcgacataaggcacgatgggttgttcggggttattctcaacaacatggcattgattatgatgagacgtttagcctggttgttaagccagctactattcgtgttgttctcagtattgcagcttctcggtcgtggcctattcatcaacttgatgttaagaacgcttttctacatggcaatcttgaggagactatgtattgtcagcaaccatctggcttcgttgatccttctacgcccaatgcagtatgtttgttacagaaatcgctctatggattaaagcaagctcctcgagcctggtaccagcgttttgctacatatattcgtcagttgggtttcgtctcttctgtttcagacacttctctctttatttataaagatggagaaaatattgcatattgttgctatacgttgatgacatccttcttactgcttcatcatctgcacttcttcagcacattactgctcgtctacattcggagtttgccatgactgatcttggtgacttgcatttctttccgggcatttctgtcactcaatctccagatggtttattcctttctcagcgacagtatgcggttgatttattgcgacgagctggtatgtctgaatgtcatccaactacgactcctgttgattctcgctgtaagttatctgcgacagatggagctcctatttcagatcctacggagtacaggagtcttgctggtgctcttcagtatcttactctcacacggcctgagatcgcttatgcagtacaacaggtgtgtttgtttatgcatgatcctcgtgagcctcatcttgctcttgtcaaacggattttacgttacatcaagggcacactacatattggtcttcacattggaatttcgcatcttgactcactgactgcttattctgatgctgagtgggctggttgtcctgattctcgttgttccacttcgggatattgtgtttttcttggtgacaacctagtttcttggtcttccaagctacaaactacagtctctcgctcaagtgctgaagctgaatatcgtgcagtagcacatgttgttgctgagtgttgttggcttcgtcaactacttctcgaactacatatatctcttgcttcgtctactgttgtttattgtgacaatgttagcgctgtctatatgaccgctaatccgatgcatcatcgtcaaacgaagcatattgagattgatattcattttgttcgagagaaggttgctttaggacaggttcgtgttttacacgttccgtcttctcatcagtttgctgatatcatgaccaaaggtttgccagttcagttagtcactgaatttcggtccagtctttgcgtccgtgatactacttctcccgctttgactgcgggcgggtattagagttagattagatttgtatagcctagatatttgttgtatccgtatatgtctcttatttaagggtttgttgtaatatctactgtattggatatataaatataaatcgccctccacattgggtcagtgtggcgtctcataattctctacaagaagttgcgggaggggtttgtaaactctcaagaaaacatctcctcgttatttgcatgtcatccaaattattatga

SEQ ID NO: 23788 - DNA, 10907 bp, Oryza sativa
tgtaaggaaataatccatagatagcattctttgcatccgattccttatcaatcttctccaattctcctctctagataattcaagttggcgagctgatttaacttgccagctgccaacatgatgaaccctgagttcctctcgacactcaaggctgttgttggcccgatctttcggtgagttgtgataactacgatttgggagaaacgttgacgatccgactacaaccgtacgagacgttgtgttgcgccttagcgatcgatacacctctccgtgggttgttgatcttgccggtgcagatcaaccttattcctgcaagcaaatcgaagaaacaagcaagaacaagataaaagcaatctgaactgcaaataggaatgaatacacacgataagttggggtttcgaatacaagcagacggacggtctagccgacacgcgcgctgcaagcgaagtagcaatggctaaactttcatctaaacaaaacccaagaaactgtaaaggggtacctaactatttaaggaggtgggaggatgacctaaggggaccctagggtcgtgctccacccggttggggcgcaccccacatgggccggggtcccagacgaagttacaagcccataggcccattataggtgacacagcaccttgttgcttcaattgcggctcaataagatggaatttcgcaatgaggctggatccattggaaagaggactccaagagctttccatcaagtactcacgggccaaaaacggaggtcgtatgcagattcggcggccgtttgaagtcagcagtgtagtaggtggccgaatcggattccagcacttggaggacttgatcttgatatcttcttgttcatccatgatgtgagcaatggttgcatccgtggtagccatggtcacatcacaacaaatcagagaaaaatcaacacatgaacacatacatgaaagatcaataaattgatgcatcatatttacaagatcaattaaagcatcgtctaataggtggtatgacgctagcaccaagccaccaagcaccaccagatcaagatgttgcttgcgcttgatgttctattagtctcatgataaatttgtaattgtcaatagcagccgcgctaccaccaggattgctagatatacacatgcactagcacttgaggttctagttccaaaatccatggtagcacttgattgacacttggaacaaaggaaaatgcgctggtgaccgtgctgtgcctagcgacggaggtgctatgtgggggcggcggaggtgctgagcgctagctggtgcacccattagcttgcgccagcgcgctctgcttcactgcggccgagtgtgatgcggttgtttcggtggatacgtgcgggatacgtatccgtatccgttcgcgcatccgatacagatacgtggcttctctgccgtatccaggtaacgtaggccacagcatctatggcaggtggatcatcaaggtaatcatcttcaaccatctcatcgtctagtggccatcttgtagcatcggcggcggcggcggcagaaacaacagctgctgatgcgtccacctcgtagaagtcgatggccgcgtgagtgcccaggaggaggtcgttgttgtcgaagtgggccgcgtggtatgccggtctatgttgcttgtgcggctgcggcgccagcgcgaaggtctcggcgtgcacacgctcgtgctccccaccggcgatgccgtgtcgggtgtcggcccaaacttgtcgtacaccgtggtcgatgtcgttgaggccaacgagtccggccgggcacattgtgcgagcgcggcaatagtggcctcctagtgggtgggggttgcagggagagtctggcgaggttcttgcgctactccctccgtcctagaatataagaatttttagagttggacacggttatatgaaaatatatagaattaaatagtagagggttgtgatttgatgtgaattgaaggtaggtgagaaaattgaatggtggaaggttgtgattggttgagaagaaaatattggtgtagaagttgttatattttgcgacaaattctagaggctagaagtagttatattttgggacggagggagtacttattacgtgtagtctacaaaagtaacttaaattttaccataattattgtttagaacgtggttttgggctggaagagagcaagtatgttacggaggacattcttctctcaaaatagtctttaacagacaaaaaagtgacccgcgaatcatcaggggactactatttttccccttttttctttctccaaaacattgatccggtgacaactactttttttcaaaaaaaaaaacatagatttatcctgttaaatcaaagatgttgtagcagtctctaatcagaagaaaatagaaggctaaccacatacaaatggggcacatacaaatggggcacatatgcagcagttgagatggtcatgacaatctcatctattgtggaagctcatcgacgacgtatggtcgacgtcgccttctcccttgacataggtaggaggcacacatccgtccctatggcattccatcgtggtcggtgttgttgaggccaacgtgtctagccgtgcacattgtgcgagcgcgtcaatggcggcctccccagtgggtgggggttgcggggagagtcgagcaccagatggggttggagggggaagaagtcatagtgtgcgtcctctgcctcgtggttgatcgcctcctcctggatctgtccaacgaatgccatgaaggccctaccgaagaactgcatacaagctatgtggctttccatttgggaaatgggtatctcgcaggcactccggtgaacaaacaagcgtagcgtccaagcgctgatgcgcgcggggcacgcctgatattggcgctcctgctcctgctccttgaatgtcacctggcggacgccgacgcccttagcctcgaggatgctcttcttggcggcgaggttcttgcacatctccagtttttgacgcagcttggagagcttggcaagctcgcgctcgaccttgcgttctaggtgccacatgacgccggtggcgccggactggggattccttgcccacacttgggcctcgtatttgattgaactcatcaaatcatctcgtttctccggtagagttgcttggacaaaacggcggatattgcgggtgccgaagaggcgctgcgcgttgaggagccgtaccttctcgtccccatgaagtatgacgcgagcaggcactccagcgagcaccccatcttttgctccctgcaggtggcgcatcgcggcctctgctgctgcggcgggaacggaggcggcggcagtggagatgacttgggcgcaagggacggatcgtccaccattgtcgccgatgtcgactgcgatttgggcaattacgggagtggccggcggcgagggaatggaaggcaaggtcagcgggtgttggtgtgggctcgccgatggcaaggggatggaaagagaggtcagtgggtgtgggcgtgggatcaccggaagtgaggggagggaaggggaggtgagagaagtcgaagtcggtgggcgtgggtgactcggcgtggccacgtgggctcgccggctgaggtgaccagggcaattcatatacaaagagtgaagagctctctccgagttgacaagtcagaccacttacgccaccgacatgtgggcccaagttgtagtgttgtccatgaaaatttgtgcagctggctgttcaccttgtctatttccacatgtctctctccctatccctcaacattttccagcttctcgtcgcaatcgcaattcacaaccacctccaaaatcacacgaaccccaaggccaaaagaggtttttccttgtgtgccattaagaaagatggtgtctgcctctgtgcgactaaaaagttcgagcctccctctctacccacgtcaaactttatcgcgccctccacaccattcggttgctattttgtttgggtttaaccgtttggcagctctgacatgtgggcctgggcagaaaaaatgtcgctcttgccctttcagtcgctggcatattggagacccctgagcgggccctacctactgtactctcaccactactacagaaatggtttttccgtacgatggggtgatttggttccatgcgggtgacttgtgtccgtgcctgcaaaaatccctgccggggggcgggtcgacgagccgtatgcgaagatgcattatcgcatgcgactgcttagatcggccgcatgcgaagatcgattttcgcatgcagccgtcttaagtgaccacatgcgaagatcgattttcgcatgtggctaggccggccgcatgcgctaatgttgatctttgcagacgatttcgcgcatgcgggccagccaaccgcatgtggagatagattccagccgtctgcaaaaaccttttctgtagtagtgcacctctctctctctcccttcttcccgtcttcctctctctctcgtgagcgcaatcaggagcggcggtggccggcagccggcggcgggcacggcaagggcgcggcgggcgtggcgaggttgtgtgggcgtgtcgaaggatcccaatggcacgctcttgacgtggagggaagccgacaacgacccctgcggctggtccagcgtcacctgcaccgacgacggcgacggcagggtcgcctgccggcgtggtgctcgccaactcctcacttgcgggctacctcccatccgagctgtcattgcccaacaaccagctcgccgaccagatcccggtcgccatcacagcgttgcagaagctcgcggcgctcgcctggctcacaacctcctctccggccagatttcggcggggattgggcagcggtggaggtgtggttggagatctcggaggaggggtcgagcacggtgatgcacatcgctgcctgcgaggggcatgccgagatcgtcgagctgctgctccagcgcggggtggatgctgtcgctgccggcgagatcgccatggctgctcgctcgctcggtcgacgcccgcctccctgccacgcaagccgcgccctcaccacgcccgccgccggccaccgcctgcctcccggccactgccgctcccgactgcgcccacaagagagagaggaagaggggaaagagagagagagagaggtgatagagtatgagaggtgggagaagaggcagacaagcacgcgacgcaagcgagacagtgcaacgcaagcaagcaacaagcagctagctagctagcgcgcgccgcggcaatggcgagatcgtgggcgaggagtactgcgccgcggaggagcgggtgctcgatcacggtgagcaagacctcccacttctcccccggcgacggcttcgcggcctacgaccaccgcaccggccttcaggcagtcgagctaaggtccatctcaccacgccgtgggcgcctgcgcacggggtcggcgggccacgcgtcggcctcgtaagcgacctcgccggccgggctgacctcctccgcgcgccaccagggaccggaagacccccgcgcgccgacgaggaggcacgcgtaccggtagcgcacggcgggtgatcagtcatcaaccaatatatatatatatatataagtataattgccgccgatccaattaagccgatgagatctcgatcgagattggaatttcggcgcgctgcgaggctaggctaggctggtcgatcgatcggctcgctccggtggcacatgagcaaaatacacagagagatgcatggagctctggccgaaatatgcggccgcgtaagggcacctgcgttggattccgaatagggcgacgacgtacgtacggatcgttcgagtctcggattctctcttattaattcgtctcgagctctccatctctctcgtatcgtagcagtggccggcattgcaaaatccaccgcaatattgcagttgcagtaaccctgttcacatgttccgtccagctgcatactattaccagctagctagataaatcaacctcttctttcaattttgttgctatatcgtatatacggaagaacagttgatgctatcgagatcgatcggcagcaaattgctcgagtcttttttttttctgaaactaaatcggcagacagtggctgccaattatatttttaataagcaggaataaaaactcaaacgggttacgataaagaaaaagcatcgtgccgagaaagtattgccaagctccccaaaaataaatactaccgttgtcgaccgaacaaattcacagcacgtacaacaactcaacgctacaacccactcatagtagaccactgatggagcccaaatgcaagtcatcagtgccaaagcttgcacaaaagcgatagcaggtccgactttcatattgaaagcatgtcatcgttgttaagcttgcaaaagcaaagcacctccgacttcaccacaaacttgtatcgttgttgtcgagctcatcatagaaacgaccaagcagctccgacttcccacggcggacatcagccaaaaccatcatattaccacttcctgcttattgctagcaccagcacacctagaaagagactgcaccgtgttaccgttgctgaggttcatcgcgcctcaacaataaagcaacttcgacaccaccttgcaaactgaaacaaaggcattggctgccagccgcaagcaagaagcggatccaggaaagcgaaggcctcgccgaacatttcgggcctatttagcgttggtgtggaagtagaaatccctagagctaacgccaactccacgaccagagatgcgcatgaaaaggttctccaaacggtacccacagcagggacgcgacgtgaatcgtcgctgccgttcacctggaaactggggcaaggctttcacctggagcacaatggtgaaagaataagagggaacacaccataacgatgtctccaaggagagggacggtgccaaagggtgtccccatcgtcaagccggccaaaaggcacggcaagactttcgcctacagttccctgtccgctcctacacacctaaccaatccgcacacacgactgttgcaagaatgccgcactagccctgactaaccgaccctccggcgagcaagaacctcggagctccccgcgggcacggcctcaccgaaggcgcaactatcaaaccacctccaccacacaccaacacgcacggtccccgagagccgccgacctcaccaacgccgttcccagccgtgagggcgatctgggtaccggcgccacatgaccaccacggctccttgcccgacaaccgccagcctcaccgtcggccgcaccggccagccgcgccatcgcccgcgtcttctgccgccattagctcgctgaccagatccggcggcgacgggtcggttccagccgcaagggaggggccgagtggggggggggttggatccggtggcggcgaggcgggggagaggaggggagggttcgcccgcacctggctacgacgataggtgcattgtgatggttcaatttgaagattgccgacgccctagtaatttactattaatgcaatctggagataacctacaataaactaaactctgaattcaggggctacttgctactaatgctgaaacaagagactactttaacgacgcactagtaatctatttccaaaacataggagccaaactgtatttccaaaacctaggagccacactgttaatgcaatctggacataaacctacaataaactaaactctgatgaattcagaggctaataattgtagcagcacgtctgaatacaagattgtcttcgttggcacaacgccagcgaaacatcaaacatctgatcagatcaaagcgcggtcctcctgacgccgctccgtagacgacaccgcagcatccatggcagaagtagttaagggctcgagctcgatcgagtgcgtcgggtgccggcggcggcggctgggcgtattggcggtgccgcgcgagcgcgctctgcgcggttgcgagttcggccttcaggcagtcgagctcccgctcgaggtccatcaccacgccgtgggcgccgcgcacggggtcgtcggcccgcgcgtcggcctcgtaggcgacggacaccgcggcgtcgcgccgtttccccgggtccccgccggccgccagcaggaagccgacgacgttgccgacgccgaagaggcggaacgcgttccggaatagccggccgtccgctggctggtccccggccgccgggaagcagcgcgccagcgggcatcccgtcgggcacgcgcgccccaggtgggcgcacgcggcgcacgccgccggtgggtcgtcgtcgtcggccactgcgaccggcgagatgtcggcgacgaacgggcgccaaggttgggccatggagatcggcggcgagacgagagctgggtctccgtcggattggtaagttggggcaccggaacggagagttcgcggcgaaatatgcggccgcgtgcacctgcatgcgtcgggatatatatacagataacacaggacgtgcttgaggtgaatttgggccaaattaaatggagaaatttaatgggatcgatttttttttttacacatacaaggccgcacccgttatttgtataacttagctatatagaatttttttaaaaaaatggtaaattgattgggacaggattaataagtccattctggtgaaattaagatacatatgttatcttgatttggatatttttcaaactactaaatgatatattttgtgtgaaaattatatatatgtattaaagttgatttaaaatataaaataaatctaatttttaagtttatagtaattaaaactaaattaatgttaatggttttcttgttttttgtgccctagcttaatctttgtctaatcaacttcaaacggggtaaacatgaaggataaattcagtctacaatgaaaggaacaaaaataataaaaccaagcaacaaaaataataatagtactgtgcatgcacacaaatagaatttattttttaatgtcgattaaatttttatttgttgtttttatgtagattaaatttatattaatttgcatgtttgtataatagtgattttggatctgtcataatttatatcagcattgcgtaatgttgatgtggatcggagtagagttagcgcaaaactctcacaaccctaataccctaaaataaaacaaaaatccgtacaacatcaaaattctgcctctatattttacgctacataagacttgccattaacctgagtcaagttattcactgtttcagtgtttcatccccaatcggccggtacttttacatattttcccattataaagggtaattataagctgtgtttccttgatggcgtcaacaacggtcagcactcctccactgctccacaaggagtcaagcaacgcaaggaccgcaacctgcattcggtgaatactgatcagcaatatatgtcggccttattcattattattatttgttcaactttttttttaaaaaaatatttttttcaaaaaactttgttctactgtattttaaccacttattttaagctatttattaattatattatatatcaatatttagtttatgatatacttaataatctaaaccaaacatgttgtcaataacaaagtataaagaataaagaaaaatgtggaactatgcgggaattaacacacaactttggtgcgacaagccaacaaataaaaaaatgaaggtacaaaactaaacattagagatatgaaaccattttttttcttgaataatttggacaccactgcataacaattatcattacaaattttcctaaaagaaagggatcagaggcggctgtggcaattcggctggtaaaccgatcgagtagactggtgtttgctaattacgcgtgggtctacaaaagtaacttaaaatttcaccacaattattgtttagaacatagattttgagcatatatatgaaaataataaatttgatttgttaaaataaaaaaattttacttattttggatttatgtaaaaggattttaggtggtcaagcttgttgacttaaaaaaaagtctaaagacgaccgcttttatgactagcaagagagcaagtgtgttactaataaaggatattctcgtttgaaaatatagactttgacataagagatgacccgtgaactatccggtgactacttttttttctccaaaacatagattcggtccggcgactactctttttttgtcagaacatggatccggcgacgactacttattttttttaaaaaaaaacatagagctatcttgctaaatcaaagatgttgtagcagtctaataaaaaaatagaaggctaatcacatacaaatggggcaaatatgcagcagttgagaccggtcgtgacaatctcatctatcgcggaagcttatcgacgaggtatggtcgacgttgccttcttccttgacgttggcaggaggcgcatgtccgtccccatggcgttccggcgccgtcgacgtcgccgcagcagcatctacggcgggtggatcaacgaggtaatcatcttcaaccgtctcgtcgtcgcagtggccatcttgtagcatcatcgtcggcggtggcggcggcagaaacagcagctgctgctgcccctgtggcggtggcggcggcgaggggaggaagcccccattggaggcgacggcgacgggcggctgctgttgctgctgggccgcggcacggcgatggagctcgatcagccccttcaccgcgtcgagctcggccttcaagcgggcgagctcctggctgaggcccttgacgatgccggcggcgccgccgagggggtcgatcacccacgcgtcggactcgtagacgaccgacttcatggcgtcgtcgcgcagctcctccgacgccgaggccatgaccctgaggatgttcttgatgccgaacaggcggtgcgcgttccggaaccgcgccggctggttggccgggaagtagcgcgccagccggcactccggcgtgcacct

SEQ ID NO: 23789 - DNA, 5959 bp, Oryza sativa
  unsure (1)..(5959): unsure at all n locations
tgggggcgtggtgctggtgttgaaggtgggggaggagtgtccgnacgaggacggcccggcctcctcgtcgcccatggcaatcgccccgtgtgtcgcggtggatatttgatgaggacgcggctgcggcggcgtagggttggttgcatgccttccgatttgcacgggatgtttttggttagtgatcaaacggccggagagcgagatacgccgtcgcaacgacgaaccctagctagctagagttcagtgttttgggcctttagcccgtaggctcttgaacgaaacagaggttggagatggcgtataggtatagttggccataaggcccgaggcccgaaggcccagcccatggcacgcctttttggcccggcccaagcacggcacggcccgacttgggtcgggcccgtgctggcccggcccgaccgtcgggccgtgcctgggcctccccaccggcacgctgggctggcccggcacgatgggccgacaggccaggcccggtacataaagtatagggactaaaaatagacatataaatgtaacagtctaaagaatagggaccttaaatagacttattttagctatttatataccccagcccaaagaagagggaggtaaaatagactttttgtagctgtacatatgtcacagcccaataggagggaggaaatttagacttattctgaggaaaagcacgacggcccatcgtgccttcgggccggctcggcaaggcccgaggcgtgttgggccgtgcctgggccgtgagtgcggcacgtgggctggcacggcacggcccggtgcgtcggtcgggccgtgccggcccgacaagcctcggcccaggcacggccgggcctgggccgtgccgtgccgtgccgggcggcccacatggccaactatacgtataggctcattcttgaatgaagtctctttattatcttattatggctaaagtatcgtgaatgcccgaattataaatcggggcagcctaggctggggcgcccgatcaattcggagtaaaatcgggcgctgacgttagcgtccgatttacgtgcaaaactattttaaactgatttttctcttaaattacttatcaaaatcataatccgattgtaccattaaattcgttataattaaatcttcaaaacaagaccatatatggatatattccgatgaaaaaaaatattagcttattattgaattattttttagtgttgtacgatgttccactagttatatcggaattgtttcactaagtagatcgaaaatatttcactcgtttaaatcaggtgttgtttcaccttatataaaaacaatgtttcggcaaatagcgaaagaatgtttcagttcactgcaacatttgatccacacatagtgaaacatttttcggtggaacaaaaaataaaacgaattcccttaatagagggtttccaaaatatgttggtttttttgttgcaatggaatatttcagttcactgcaacattaaatctatacatagtgaaacattgtgagtgcactaggtgaaacattttttgtggaacaaaaataaaccaaatttacttaatagagagtttccaaaatatgtggttgatttgttgcaggggaccggcactgttgtaacataccgaaaattaaccattttctaactctgcaccatgctgagtcttatgttcttaataacttcttaaacctaggaaaatataattagagggaccttctaaaactaacttgcataaaatccttctctggtattcaatttcttttgtgtttttcatttaaaaatatatttggttaaattgaggtatttcttgatttggttttaatttaaaaccttccttcgactaaaattcttttattcaaatttagtttcaaaacccttactattttttatggattatgatccaagaaaccttcccaattttgccattgaacctaaaccaaagtaattctaattttatcgggattatttgttagcccatcctttgaccttaaacatatcctttgattcttgatccaaattcttccttttgatctagccggtgatctaatttctgtggcttgatttccttctcggcacaagaataatattattacaaacattgtgaataattgctcttgtgctaagataatatattatatccttgtcatccaaatcttctttaaattcaaattctatccaaatatcctattagcctcagacaattctttgaaacccatgccatatattttgaggctaaaaatcctatctatcttcctccatttatttcctctccctctcatttgagtgcatcaaataaattccgttatattctatctctcaaaatattgcactcaaactagaaaatatctcttttggaaattatatccaaatataatttcctttcaaaattccctattcagattccttccaaatactaatctcatccaatttctatcatacaaataacctacaaaatttagaattgatttctaaatttaattgggctaaaatccctttatctcttccttttggcccatcttcctcttcggcccagcccagccgagccgccccttcctcctccgtgggcgcttccaggcgccgccatgcgcccgctactgccgccgtgcacaactcagctaccgccgccgccatattgccttcgacgccaagcaatcgccgccaacgtcctgtcgtcgccgctaaggcatcgccgccgacgtcatctgccacctcacgccgccgacgtcagcctctggagcaaaccgacatctccaaccaatcacaagccacagccggcgccgtcgccttccttctccacgtcgccgccaccaagaccaactccatcttctcctctacaaccgaccttcacaaccgacgtctgaggcctataaatagaaggccagccctccccttttctccacatatgagccgagctcctcgagctctctctctcctgttatgtctagccaccaccggccactgccgatctccctcaccggagtgtttctggccaagcccttgcgccatcgggtttgcctcgacgaggcgaactcattttcctagtttccccttcctttccccttccgaaaccaaccatcacagccacctcctcttgttgccggagcaagctcttgccttcgccgttccggtctcctccctaaccctctctaccggaaaccaccctccctgagtgcgcgttgctcgggaacgcgtgttgccgccggcgtcacagtcttctatccaccggagagccggcgcccctcctctcccttctctctgtttgttcgtggagaaagagagaagaagcaggaaagaagaagaagaagaaaaagagagaaaaagaaaaagtctgacaggtgggcccctgtacagtactactttatattttctagatttaacttgaatcctattctttagaagcccatatctcctaaaccgtagatctgattctagtcaaacttggacctaaattcatctaaattcaaaccctaccttttgataccaaatttgctatttaaatattttatttgaatttccttgatttatttaaatgtcatatgcttttcaaatatctccttttactccaaaataccctttagccagtaaaaagccgccggttggaactttacgcctttcatggagacgtttgcggtctatcggccccgatgtcgaaccgttggtcgtaaagcccggcaaaacccaaacccaaggtcaaagtgctgctccgggtaccccacgcctcaatgcgtacaactgtcggagcttcactattccctcgacctccacagcacgtcgcacaattagctctcgggctctgtgtgatcttagctgctcagccgccactcacggttgtcggagtaacacttccgccccactaaattaacctgcacccacatcttattcctctagccgatatgctgtctgctgacaccggcgagagaagacaccaaatctagtcgttatgctgttcaacactagcatcgactagcacacaaccaaaccctagctgacaccttgctagttaaatcccagttgtcatccaaattccacacccaccagtatcgcctatccaccctactctcagtcacctactctctaactacctagaacctatacataaaatatagagcctagccaatatgctgtcctatccccaatcggcctaaatataaccaaaccctagatatatactacctaaacctgccaccaaccaatattagctacatactcgcttaaccagtcatatctcttactctccgaacaaccaagacccacacatgaaatataagtgacatttgttgcttgatcccctttctatcttagcctccaaccctttagaacccagaaatattagccaataatccctataccttttaaaggagatatttataccccaaacccagcctttctcgccctttatcgctttcttattattttgtgacttttattgaatttggttctttctcttctacgtagagtctgttatattttggatggcaacctgtggtatttcaaggatcggataatcaggttgcctatctcggatttatttgcgttggagcaaggcaagttattattcctctcctttgagcataataatcctatattctatatctccagtatcttgtgcattagccatacatgattttgaatgcataacctgaatatatagcaaaccagatatatgctagattttgcttagccatgcctagttagattgcataaaatataataaacttagattggaacagtactgtagaaatggttgatttccgggtggctagtactgttccaaccgacataaaattgccaagtacatgtgaagaacatacgagtacgaccgcaattctcgtatgggcatagacctagctgattaagttatctagcaaatgtggtacctttgtatagtggttcttcttaagtcctcgcgcaggaagcaaacttacgctgagcagggcgattgcaatatttaccgaggcgcaggtaaatatttgagataaattgtgatatcacaaactgtgtgtgtattgtgaaaacctggttgagatgacgggggtctctcaaccagttctcttcaaaaacctcgggaacgccagaattcctctcgctgctgataacgctacgttcagagcgcatggggactagagttcatggaacaggtaccactgatgttagtaaccgaaaagctttgccatgacaaggctaatgtgtttggcacgtcatggattgcgggtaaagcgtacatttactgcagtaaagtataaatgaatctattcgaatagccgtgctcacggatttgagcattgggactcatatggtatttggttagaaacttaattccaaactttattaaatattgttgcatttaaaacattctaggctttattcctctatattctttgatttctgcaagtaaacctagatctactcagatattaccatttcatgcattcattattgaatataatagcttgctgagtacgttgtactcacccttgcttcaaccccctttttcagagtccaattgatgttcttaccgaagctgggagttcaatcatataagttagttccattctaacttaatcctcaagtatagactagataaatggtttaagtctatagcaaaatagtagagttgagtcattctatagcttctgttgtattaattagccacaaatttgtaaacacccataaatattttgtaataacatatccttcggagtcatgtttaaatgtatgcaatgaggatccaaattgttaaacctgtatcaatctactgatccaaggcttgatacagttttaatatgtcggtttccaaatcattagttttgggacccgacaactgtggtgggccagacactgtggtgggccagcggcatgcaggcgcacggccgcgcgctgggagcggggccggggggagcgcccaattttgctccccccgcctggtcgcccggatagcagaatccccttataaatcacaacttata

SEQ ID NO: 23790 - DNA, 5594 bp, Oryza sativa
attcctgcagccccagagcggctgcagcagcgggtggtggtggtcgtagggcatcgtcgtcggccacggcgccatctccggcttcacggcgtacccgcagttctgctgcaccagctgctgccgctgctgctgctgctgctgatgctggtgcggcgactgcatgacatcctggtgatgctgctgctgctgctgctcctgcagcgcggcgagctcctggtggtgcgccatgaccggcggcggcgagaagagcagctggtggtggtggtggtggtggtggtggtggtgccccggcgcggccatggcggcggggatgccgccgatggccttggcgctctcctcggtgagcgcgtcgcagaacgcccggtgcgtgatgaagctgtcacgcctgcatgcaatgcaagaaccgaaagacacacacatcaaaaaccacacggatcacaccaaaaccaaaaaacatcaaatttcaaaaggccaaaagccaaagatatcatatttcccccgtattcttgctcacttgtcattgttgcttctacactcctactacacctatagccatctcaaaaaaaaaaaggatagagagagatgctcaagctagaatgaactccatggaagtgacaacacagagagatagccatgcatgaacactcttgcagagtagagtggagtaggcaattaggcaggaggaatagtggctaggatgaacagcataggcaaagcctgggagagagagggagagagagagagatggaaaagccatccatccatccatgcaggagcaggatgcagacgactgcaaagagattcacatgtctctctttcttcctcctcctcctctctttcttcctccatggctcagcatcatcagctgccaccacagctagctagccatagctcatcatcatcaagctcagatctcccctccttcctttgtcctatgggcaaatagctttgctgcttgtttgtttcccaatctctcatttctctctctcatcacacggacgcaatgcaaacagacacgcgcatacgcacaagccagtagtactaccaccaacctagctaccactagtagcgtcgtcgtcatcgtcgtcgtcgtctccatcgggtcctgcaccgtgcgcattcatcagcccggatcaatccaaaggaggtttcagccatggatggcagtggcagcacaagccaagaaacaaaaagaagaagaggcaagaaacgactccaatctcgatctcgatgtcgatgtcgatcgatcgatatggcttcttttctttgcttgtttcgctgctgcagcgagcagctagctaagctacgtactagttgccactgttcacaaatcttttcggctagatgctcgcggcagggatgggcacatggttgttgctggttaatcaacaaccggtatatctatcgctgccctaattattggatgattacaggtgtgttaacactaacaaacgctcatcttataggctgcttcgattcctactcgtcactgtgccaactgaaagcgcaggcggcagcgagaacactggattactggcaaagtggcaatgagaaaggagcacggcaagccagccaaggcaggtatatctgagcagaaggcagtaggagtgcaagtgctgcaatcgatcgccatggatggatggaagcaagcaagatggaggaggagggaggaagaagaaggacctggagaagatggtgccgcaatcgcacttgtactcgcgggtgccgcagatcttggagtgggccttccagtcggagtggacggcgtacttcttggagcacttgtcgcacttccacttcttctcgccgtgcttgcggaagaagtgcttcttgatgccggtgaggtcgccgagggcgcgggaggggtcgtggtggacgcagctggcctccgggcagatgtacaccttcttcctcaccgcctccttgctcccccgctgcttcagcttccacggcaggttgtgcccccgccggtgcagctgcaggttctggtccctctggaaccccttcccgcagatctcgcacacgaacctgttcgtcgccatcagcgtcgccggcgacagcgccaccacctccgcttccgggtctatatataggttcgatcaattgctttcgcttaattgccgagaaaattaacggagcccggatcgatcgaggagctagctatacaagaacgcacctgggttgcccgggaggctgcgcttcctcttgttgctgttgttgccgttgttgccggaggatggcggcggcggcggcggcacggtggaggcggaggaggtcaggttggacatgctgctctcctgctgctgatctgctgcctcggcggcctcttccaccaagaacaatcctcctccctcctcctcctcctgctgctgctgctgctgaagatggtgatgaaacataggagcttcgatcttttcttgctacatagcatgcagcatctgcctcaccatggaagcaatgaattttgggaggctcaagtgaagtgatgaagaggatgcattaaaactgaagaatggaggcaggagacaggagggcatgtaggatgaagggagttcagagaatctcaaggaaggaacaaacaagaaggaggaggggagggggggacaaacaaggaggaaactagggtggtcaatgactctaaagcaattttcagattcttctttctttcccttcctcctcctccttctcctctctctctctacagtctacacacactcagagcagaagcagcagcatcaccaagtgtagaacacaacaaggatgctcaagagaagagagagagagaagcaagcagctggaagctagctagccaggcaagcagcagccatgagagagagggagagagagagatcaaaggattgggggagaggagcagtagcagtgtgttgcttggcaggcagcagctgaagtagccagaggggagagtggagaagcaaagctgagcaaatggaagaagagaagggcaccaaaaaccaaatcccttttcttcttcctcctctttatctgctcctgcctgctgatcctatactttactttcagggccctgtgtgagccagctaaaaagattaaaaagatttgtagagcagttcagactttcttcagactagcttcttcacttttcttgcttgcagaagaaacaaaaattgaacccctttttttttcacttgagtaattaccacagtgccaatagcttttttactacatgtgctctcactggttaattttgatcagtaagccaaggggttgtttatatcaatcttgaatagatatttcaattttaaaaaaaatcaagtcttgagaatgcatgactagtgtacatatcacaatatcacagtgagtgaactgttttatgcattctcaaggaagctgcatctgcatgaggcaagaacagtgtactggtagtagatgaaccagcactagctatagctagtagaattgtgtactacagagtagagatgaggagcaactgtttgggtttgtgcctgaatcacaaaatcacacaacactcctaacaatgctacactgatgttgagcttttctgtcttttcccttgtctccttacaagtgcagataccgtccgtccctgatgatcaactcttgcatttcttctttctttttatttatctaacctgttgtacacctacttggttggtacaccagagataagtatgcatcaatggaacaataagctagacaggtagattccaattttatcacatttgttttataaattccagggcctgcactcaatgtatatgatagcaacaatacatatgatatataatagtactcatacatgtacacaccaaccataatgctaattcacattcatgcatatgccaatatatttttttgtacattgccatgtgtgatttatcattcttatttttttcccatcctctctctctctctctctctctctctctctcttttgatgagtcaccctgggccccatgcatatcatggatggtcgtaattcaaaaatagtagaaatcctatcctgtcatggaccagttatttgtccatgggattatatcttcagagttgctttggttttgcaagacccacagctgatcttgctgcagtagtactatcagtttttaattaattagtagtttatttctttgtcatttgttcatgaaagatggagcattaaataaacactcctttttctcttttgttctcttgaggtggaagtacatcatagaatgatgagtttccaattgacctgatgagggggagaaagagaacctagggaagttcaaggattgtctgtgcatgggaatttaatgcgacctaattaagcaagcaaatgtgctcatctgatacatccatcccagctactactaggccctatttgaaagattagcccagagctaatgtttagttatgaattggtaagctaaacattagtctagaatggcatgtttggatccatgggctaattcaatgctaaaaggtggagagagagagagagtagaaagagaggagagagatagctgcttttttatggtccccacagaaaattagtctcattaacacctcctttgaggggctaatgttttgagggggaataattcactttggttccaaattagcccacatatttagatctttgggagctaatttagggctaaaaggtgggggctaataattagcccatgaaaccaaagaaggccctagctaatactccagtatcagccatgtttaacagaactcgagattctgataagtgtagaatatgaaaaaactaggtaccaaacttctagtttcttttatcattctctatatgttacaactagattttttaaaatctatgtgaaaatatagggtctaatggtaagagctttaaattctgagaaacagttagtgagaatccaaccggtgagaatctaaaaaagctaagaaaaccagcttgacttctagttaactttctaaattgtatgactacaacttttcgaaattatgaaaaaagatacagctgctaaaaactctctaatcaagcctattgactgttttgggagccagagattatgaaggaaagctacagcaaacagctgccagaaactctccaaacataagcttggtagcattagacaaaatagaaagattaattaaagcaatgattattgaggcttaactaagtgatgggtgttgcttgttcacaaggcaagtaacagtggcagtgcacagcaacagtgctagtactatactactgtactactagtaggagtagtagctggtaggatgagtaaccagatgggtgagtagtagaagtaggatgcagcaagctatacactgcacactgcactagggtgtttggcaatggcatcaaggattttggtagtactgctcctctcaaaaagatggagacgtattttccaaagttagctggtgactgcagcctaggagcttcatgtgacactcaaaagcatgcatactcttgtgcttgtgttgtgtagggtgccaccagcccaggtgtactttttactgcaggtaaaaaaacactttgcaggaacagaatcaagaaagagaattttgctattaatgtacagtgatgacactactaatcctgtaagattagtggtgagtac

SEQ ID NO: 23791 - DNA, 14796 bp, Oryza sativa
ctggagcagagtggagcaggggttaacactggtgattagcagagatagagagagagagagagctgtggtcgctgtctgattctgctgtattatattcccctgatggcatccggacaagcgtcaagaggggacggacataccatgtgccacctcatcctcgtgatccatgggcataattgctaggtgcacacggcggggttctggttccggcctcgatgggtggctgacgggtggggccgtctcacaaaccgtgtgcggccaacgtgtcggctttgcggaattcttgctagtatttcttttttttttcaaaaaaagtttttattcaacacgcaaggaaaaaaacgatatagagatatgattgttgtaaacagctcaaacacgctggctacatgaaaccctagcggtctgagtttatacccgacagtcccataaacccttagttagcatacggactcgaacatgtgatctccccttcccgaattcaagtggttttaaccgctgggatgtcatttgacttgtgaatagtatctcatatgtcattttccccttgtaaattgagctttcgtacttaggtctcaggtagtaagtatttcccgaatatatttatcctatatcccaaaataactgatcactttattacttatgagtcaattatgagaaaaggtaaatgacctagatgccctatactaatagagatgtcactagtgggctgtagttgagggtataataaatatatataatttttaaattagaggttggaagaaattttggattggcaaacaatattcacttatttagggataatttttgaattttgaaatttgagatggattgacaaatagtactacttgttttcccgttgaaactggtagggtaaatactaacagtttgtgtcataaaactgctacaccttcacatgatgtcttgtcagaggttttgtttaaatctctcaccctttttgtggaacaataaaaaagcattactcctgaagcaatggaacactcccaaatcccaattcaccttttgatcagaagcacatgtacatgtacatttgtacacaagctgcctgtcttttttgctttggtccttttgggctaggctagaaaaagcactcatccaacacatgacttcctgatccatccaacacttttattttttttctgcagcaaatcatcattcagatggtttgcaaagctgccattctttagcatccaaagagatcagatgcaaaaaactttttcccagctactacaagacggccaaaaagaggaagcacacatgaacaccaatcattagcagataattggcacgggctttggctttttagtagtgccttcgctctgaatcgagtcaaacagcacaaccaaaataagagttgtttgcaaagtgtgagcatgccatcacacgagtgcaagaattgtgtatttagcaaccaatcaatcacaatcattctttcattcattcagacttaccaaaaatttcttcagaagatggtggttcttttcccctcttccttttccaacccatatcgacatcgatatcgatatgcttgaatttctattcatgtatgattttttttaaaaaatgcggtcaaggcgcgaattatgagccagaatataagcaaagtctgcatcaggacaaggacatgctcctccccatcttgcagtcgcagtttttgaatctggagaccctgaaaacacaccaacatggagaagaagaaaagctaaggattcagcaacagggacccctgaaaactggatcttctgatccacaaggcaaacaagaacacaacaaaattggcaggacgaatggttagtttgttagtacaagagatggacataagaagatgataggaggaggaggaggatattatgaaatgcataacaccttgatgataattgcttgcttggatttatttattttttgatgaacatgaggacaagccactgatcaggcttcacagaaaatcgaattcgtcgttgtcgccaagttgtaggtgttcttggatgcttggctccgtttctaactgagaatgtagggtggtgacagcaaccttagctgcaaatctgtccaaggaaaactgtggtttggtaggataatatactgatgatgccattgttctgtcaccggtacagattcaagaaagagatgtacagtacaatatgagctagatggcactgacaattggccaatctccagaggtttagagacccataatttcctaaaccctgctgctccaaatgactagccagggccaagtctatcaataataaaagctgctagctgtttgctcatagatttccttcatgataatctgagggggaaaataaagacatgaatggtcaaggctatgatttggacatgtaaataaatacacatactagaatagttaatctcggatttgattcagacatgtaaatacctgaaatatggcatttaaagtttcttattactgactgacaaggcatgaaaaagacatgtaactaacatcattattcttttgcattcgcccccggttcttctatctcgcgctgttcttcctatgtgcatttggctcaatcatatagagcagaatgacctgtttaaattaaccacagttaaataacagtacagtacactgtacaccatacaaacaggaagtatcctattagcaatttaacaggagcaggcttgtcccaggagaactgtagcagctgaaatgcagagaggccttggacttcagacatgaactgaaacggattcaggaggagttgctgtttgctgaggggagggtgtgtgccagtttgatgaagcagatgtcccagtggatctgtgtttgtcagccagcccctgtggaggattaattcaagtgcagtgcaagtgagaaagacaagaaataaaacggtgtcgggacagcgatcgccgatcaacgaatgtaggcgcagtcaaaattcagctcttttttgaaaactagaatgaaaacattctgaatattcagtttggtttggtcccatgagacaaaaacaggtcagcagaaaaaggtcaaaaaagagaaaaagtttgcacataccatatagttattgaagtagaactgatcaagacataaatggactctggaattttctgataagtggttaggtccaaaagcttgtagtactagataatgccgcgaagttcaggtcagcactcagcagacaaatcatgtcatatgaaacaatttatatccaggaagaaggacgcaagctcattgtttcctaatttctagcctttttcattttgagtggaggcataccatatcttcttcttcttttttccttgttcttttgtgtgaaagaaatgacaattcataatatagctagaaagcagaaagtgtcaaatgtcatgattctgaaggaggacaaaacaagaaggaagctgaggcagagattcatcatgaatataaatggtgagcaaaggcagaaatgactcaacaagtcatttcccttttccaaaagaactaggacaagaagagagcttttgctatgatcatcctaacatgcattggtctgttttaatgagtcaaatcgttgactgaataaaaacagcagaaatcttctctgacatctgctgctcaagatgacaaaagggtaacctgccacacacacacactagcagcaatcttgaaaggagccaagggatttattgtgtgaagcaggttttcttgaactgaaactgtttttgaagccaagcatgcatgtgagctacagaatggagatatttattttcctttgtccggtgaaatgaattcggttgtcagtgttgcatattttgtcgagggcagagttgaattgcaattactggccaccagcatgtaaacaaatggaaaaaaagaaagagagaaaaagagggagaaaaagaaatgcattttgcttacttgacgttcgccattgttaggggagcgagagagattcttgaatgataaaaaaaactgacctgctgatgccggaggattgtaggttgcaggggccatagttctcaatacctcgacggcgagaaggcagagaggggagcgccgccgccctggcggtgatgaggcgggcctcgccggccggcgtgctcaaatccggcggaggtgatcggaagaggcttcagggtagtaggacagtcagcggtggaaatgggcagtaatttcctattttattctttttcactcgttttgttttcctttgggttaatttgggttttcaagcttagggggtatttgaactttttttttttaacttcttcatatcctgtgtgattttcaatttgctagtcactaactaccatgaaaaaaaaataaggtagatgctattacgcataaagatgttattgttttcactttagagagataccgacgaatattacacacatgtggagaatttagtgaggttgagtatttattcttgattgatttccatttattgcgcgtactaataggaaaaagcgtttttttaagaaaaaaactaaaacaaatgagagtaaatttctttctttttttatccatattcttcaatttcagttttgagtagagtaaattttataaaaaatagatggaactaaattttataaaattttaaactattgtaaaattatatatacacttgacagagtatcacaaaatacatatttgacactaaatttgtaacaaaactatatcttttgttgctccaacaaaacattagtaccaaggtaaataaatcaaaacattaatgctaagggtttaaactctaaagtctataatttcaagataatttaatcattgaaactatagttttgcaatacttcatcttataaatgtatagtttcataacaaatttggtaaaaatctatgataactttgtgatatacatacaacgccttataaatttacaatagtttgatttgagatatctatagttttgcaaaatttacccttcctttttttctattatatctagttgcacagttcgggccggataaatactcaaggatttgctttatctccaacgcagacacaatgataatatcaaggaaagcgaccaagtagctaccctccacagctccatttctttggggccttccgttttcgcctgaattgacatgccaaggaacttgcttatccatctccagtgtcacccaacgcatacaggtcgttcaggtcttttctagtcggttgctttcaccactgacacaaatattcgagcaactgaccaccgagataacaagccaacacagccacgactctctcatatacggtggtaaaaccaggtaaaaaaaaaactgacagttccatcttaactacctctaatgaaaaggccatcggaatgaacggacggttgctaagatcaattcattttcatcaggagcaaaaagatttgactgtttagtgagatagtagacagtcgctgtcacttgggcatgtgatagcagcagtagagagggacatgtagttcaggtgattgcttcgcatggcaagcccggactgatgaaacggccatgtgagccctcccagcgatcatgtgaaatgtaactctgaaccgatgcaacaacacccgggattttgacagcaactaggcacggacagatccaaaccatgtttgagatgtagcaagcaacgatcacacgttccagctcataactggggccccttatcttctgcacttgtgccccacggcctccacggatagtttcacaagcaattctgaaccaaacgataggacggaatccagattccagagtgctatgtgcatgtaaagcttaaaccattgcactgatgaaaccagaggctgatgctggtgtcctgtgaaggacccatggttctggcagagatgtaacccaaaatcatcatgttgttcgacgactaaaacggcaatcttctagctgccatcgtcacatggcaatggagtaaagcttttgcctcaagaagcttgatgccctgaaagccccccaaaagagagattgatagattaatattccttttattttctacttctgataagcacactaaatgcttgacaaaaaaagcagatggagaaattgctttgtataatgcccatgttcatggcgaagcatctctcaatagacagcgcaacagaaagaaatgtgtaccgtaatgaatccacccgacaacagcggtacctcaaaaaagcagcccttgtacagacatgaatgacacatcaaatctccattgctttactaagtcatatggcgcttagcattttcataatcccaaacaaagagataaacaccaactttccaattcaaatctgcacataaattcaacattcaattattgcatgaaacaattacaagcctgcagtttttaagtgtacatgatatttggatgcatatttaacgtaagagtaagagcacactagtttttgagtttcctattatgcatttaatccaataatattgaaacaattgtgttttgacctttattttatggtaactaggtgtattcaacagtcacctttattgaggaacatacttaaaacctgtaaaagaagactacgtagttgattatgttatagaggaacaagcaacaaaacgatccacctaggaattagaagcccatgtgcaaaacactggggccctaaatttttaaaaacactgtagaaccaaagtataccttcacttaatatggattgatgaaatgaacaaataaactcctatttcataaccaaaatcatacatttcagaagacacgatcgatgaggactgatgaaataaacaaataatttcctgcttgtttataacatgaatttgaaacttagagaagaaaacaaattgtagggaaatgtgatggcacagtgaactcacgagctgatggatgcacacgggcatactcccttttgctgcactgttggcttcttgctgctgcaaactaatgaagattaggaattgtgatttgctgttgtatgcctgcgcgacaccaagccatcgagtagcgcgtgggcagcaatggaggagccaacgatacagtctttgggcctggtagtccttgtgggcctttttcttttttcatttattaggccttgtaatttgctggtaattaagtatagttgattagtactaatgatagatttatttggggacccctaatttttggggccctgaacacatgcactttgcaccggctaatgtatgaccctgcccttgaactcataaacctccaaaataacactccacaactcagacaaatacatgcacacaaaataaacagttgttactggcatcataattcatagagtcgcaaaagtatatgaacaaagaaaacttccagtatgtgcacgagtaaaaacagggaagcagcagcaatatgggaaagaaattgtcaccaaagttctaaaaagattcaatcacaatttacttttatcatgttgaacctactttactatctggtcatgagaaggaaagaggtactcttatagaagttgtattgatggcgtgttctacacccacccactcttgaatattttttgtggctatatacatgcaggcatgtgtgccatgtgctatttgtgtattttcatttctaaaaaatactaactttagtacgtgtatagtatatatgtcgatgttgattgattcgtgtaaaattgagtattgtagaatcttttttaaaaaatttgagggtaattattttttgatattgttaacctagaaacttataaagtttatagtataatttgccatccattggtacaatgctaataaaaatataagaccaaaagaaaaaaaatatgggctctgtctgaggatgtaatagttttggagttttcgtagaatacagtggtttccaaaaagtactatagtatttagtttgagaacagaaaatactgtagttttctcaacgctatggtttttccactcctggactccttttcttttgtaaaccaagaaagtgaagcgattccacagcagttttaaatattgcaaagtcttggggtataatactgtctgtaaggtagttttaaatccatctcttatatgtgagcaaatctgggtttacagattgaattagctaatgatcgttaatatgtgtaaaagctagggctacgagcctacgacacaatggtacattgatacataggagttaaaaaagctatgcatagagacatctgtcagtacacgttgatgcttcacatacccatcttctaattccatgcacccaagatatctaaatagaactagccaaacaattcttttttgaaaaaaaaaacagtaatgtggtaaatactgcagttgccaaaacaagaaactatggtttttgctacagtgtgaaaaatgtagtattcaaagactggcgtattcatggatgcaacaaacttggaagtattgcatagagtagttctttaaatctgtagcatcctaacagggcctacatttacaggccaaaaaacatgcatgttacaatgtcctagaattcctaatagctaagcacgagagaagttaaaaccatcgatctaatcaatcatcttctagaaaagaaaaaaaaagcaatcattgagtcacagatagtactgacatatatgttcgcatatcaacaatgacctggaacagtttagaataaacatttattttattatcccagtactacatatagggcctgttcactttgatgccaaaaaaaaccttaccaaattttaccattgccaaaattttggtaacttgccaaaattttggtaggatttcttatatagttgctaaaatttggcagcaaactaaatgtagccactttttttgtaactttaccaaaatttggtaaggttgaaaatggcatcaaagtgaacaggcccataaagtgtgtcccatgaatcatacgaatcatgtcaactttttcatgaaactactgactcaaggagtgcatttatgacaacactaggcctacatcttcaaaaccattcactaaatggaactaacctgtggattgaacagaagtgcattcatttgatagttaccaatcttcaaaatctgacagtaaatatttgccccaagttctgcaaaataagtcctgaatgaaatttattggtaactaaagcgcaataaaacaccacagacaatgttgttctcttttcgacataccacatcagcagttgcaacttgcaagatggagttacagcaataaaactggtgtgcggaatacaaaaaatgctgcacaatctcatgggcacgggttcatcactgaacaacatccaagtatgctgcaaaattcaaggaacatttatttaactaccaatgcatatatgtagtctacaggtatcaaaggcatagtagtagattcatacttctctctaattgccagaaccaaacaagaactcctgcaaaatcctggaggcctctgaaacttcatgctgagtgcttactgagctgggcactgcagcagtggtaggcaaactatttttctttggttctgaacatggatgtagattagcttgttttgatgagtctttttcatccaacagtggagctgatctatgtccattgtgcttgccaagttttttcccgtctgcgggttgaggtcttccaaagttctgatgtggaccaccagttggattcttatgcttctcagtggacacaacatcctgatgcaaaatgctagaatctggtctggctttattgaaaggaagaaactgtataccccttggtatacgaacaggtaccttttgagcatttcctgatatgccagcaaggtttttaaggatggaatgatgtttgataggaacagaggttgcaggttcaccactgtatactgttgaagttttctgacgacttgtttgctcttggcaatttgctttttcaggtactgatgacgcattagatttctttgcatctggtgtggacggaccttctgcagttggtatctgacaacgagtgcaaagcttgcttaattcacagcatttgctaatattaaaatttaaccaggctataacaccaataattaaataagagtgaatgatttgttaaattacgtaccacatgagaaaatttgcatttatcacctctgatgcacattccattttccataaaattgtggcaagggtactttgacaactcatgatcataagggcaatcatctcctttcaaacaagaaccacgtgcataatgcgtgcagggctgtcaaggcaaaaaaaaaatcaggataaaattcgcaaaacctcaaaaggacagatacaacaggaagtttagtaccaatacttggatcaagatttgggtacacttcagtttatgatttagcactatactgatacgtattcataacatgtgcagtgcgaacctgttctgtgcatgctttaaagttcaaattcaatattgatgtcacattttcatctaaaaaataggtggtatgcataggtgcgtacaaaatgagctcatgcttgcgtgtgggcagaccacatagaatatatccacacatattaaacagcatacatgcatcttattataatacattatgattactgcaagcatgtgataaacttctatgaaatggataccttagattttgtcaaaggtgtcgtatcatgggagaacttgcacaaattgccctgcaataaaaaaataagaaatattaggtactacatccgtttaaggttataagactttctagcattgcccacattcatataaatgttaatgaatctaggcacacatatatgtctagattcattaacatatatataaatgcgggcaatgctagaaagtcttataatatgaaacagaggaagtattttattaaagtaaatcctgtgaaaagcatttttacagtctttgtaacatatttatatagaaaacataacacatatacaaagaataaagtggacatgttacatgatgaaaacaatatgattatataaacagtgttcatcatggtctaagctctcaggcagcacaccagcgcctaatcagcaaatagacagacctaggcagggctaatcgttaccaggtgctatctagtggacactgaatcaaaatatgcatcctatgctactgatatggctaatcactaaattacacaaatataatcagtgtgtccagaaaatcgctacaatatgtttcaaggccagggcatgtgctgtgcagtttacaacagcaaagaatataattttttgtcgatccaaaagtgaagcagatgatgactaccatctgtctgatctgagagacagactcacctgctggcacttcccatgcaagtagaagtggcaaaccttcaccactttaggctttataactggttgaagtttcagtcttttcaccccttcggcttcccgttgcaatgctctcttaattcgtttagttttctgcatattaatagcattgaaagcaaatcttaatatttctaaaggtaaaaactatttgaatgcacagttcaaaaatgtttatacattggaaccaaatggtcctgagatcagaacataccgtcttcttagcttttctctcctctgtcaaggtgcgctttcttgtgtttccatgtttgagagcctgcaatattaatatagaacagactgaaaatccatacttacgtagctaagaagaaaatttaacacagacgaatcaattgtattgtatattgttcttaaaaatcttgcattgtaaattgactgtgattaacttgaagttacaaagaaagtcatgaagtgtgaacactcgaactgcattcattgtactcaagcaaggtatgtatgcgatgattaaaaaaagctactgaattcagttaatatgaaacatcaaacaagaattaatcaaaattgtgcataaacaatgaagcaacaaaacagcgtatgggtaccaaaaaaagagagaatatggcaagcttgtacgcatttgtggttgacaaagaagctataccttatcatcaggcaaaggtgtctcattccaatcgagaacttcatcataactgactgcttgcgccctggcaacatgcatttgagaatcacccttgctattacatagcatgttccgtgcagtgtcgccatttcctttttgaggtatcaaatgcaaattgctctttaagtcatggccacatgacccatcctcctctatccttctgctatcaaaatcctcttccaattccacatcatcttgaagctctgaattgccagaatcatctgcatctaaattctgcgtgtcgccctcaatctctccttcctcaaaaccaccaccaccatccagtgacccatgatctaaactgcacacagatctgtcattgccaatcccagctcccaattctttcacctcctcagctactctgtcatcactctgcagtttatctccagatactccacagctctgcgccgacattacacaggcactagcatcatcaatcaaccctgacaagttgttcatcatcgcatcgagttgcaattgctcattgtcattaccaaccatttcaatcaccaattcactatcctccccgtctaagcaagcctgcatcgacctcaaagcctcgtcatcccccatcagtccagccccagcccccaactcatcgccatcggcatcagcctccccggaagtgcctccggcgaaaacaacctcttctacaccctccacccgctcgaccccagcgactctaccctcctccgtcccctgcggcaccacgccgggatcggtggtagggttcacggcggcgtccggggacgccgaagtcgaaggcgtctcgtgcggagcatggtttcccagagccacctccacctctaagttcttcccccgatcgcctcccacgtctgcaggaggcggcgaatccccatggggaagcccgccggagccgccgggagggatggcggcggcggcggcaggctcgacctccgcgtcggggcgtgccgcgtgccgcggagggtgcaggtggaggcagtgcgagaagagccgggagagcgcgcggtaggaggcgctgtcgagatgggctctccggcgagagaggacatcggtggtgggcggcgcggcggcgagggaggcaggagccgccgcgggcgggacgggcgagggttcctccatggcggaagggactggatgagtgggtcggagctagggtttagggttcgcagctgtgagctgtgcgtcgcctcgccgcggctgctcgtcggcggcggcggcggcgacgtggcggcgagacgagaggaggaaaacccatcgcagggaaaggcagaggcggcggcaaacgagggcgcggccagaagcccagaatataggcctagtaattgggcctaatgggccttgctacagctggttgagtaaaggaaaaagaccacttagactctcttaatagttcaccgaatctaattcgtgacccttaactagaaaaccgggtaggacgactccccgaattattgaaaccagtgcaatttgactcctctagcggttttggagggcggtttcgctaacgtggcactgacgtagctttacaattaaaaaaatatctgtgggaccaatctatcattcacacacaaaatatattgtgggacccactgacatctggagcccacgtgtcatcctttccctttcttcttcctcctccctctctctctctcccttctctctctcttctctcccccttcggacgcacgcgaggagcgggagccagatcggcgacggcggcggccaggggctggaggggcgacggcggcgtgcgggcgagggctggagcggcgacggtggcgtgcaggcgacggccgcgccaccgcctgccccgtctccaagccggcccaccgctgctccccctccttaaagtcccagagctgcagcctctgctctcccccattggtcgtcgccgccggagcagtagcagcagcgccgccgccgcctgcaaggaagaacgagaggccggcgacctcagccggagcggcggcgaacctctgcagcaggcaggggtgctgcgacggcggcggcggccacagcgaagctgcgacaacattggactgaagtgtgcgctgatcgaaggcggccaccgtggcgtgctgctggtcctgcgagaacgcgaggtggggtggcatcgccatcatcttgaggtggggcaagcaagcgtcgcctgcttgctgctcctgctgatgttgcatttgcaatggcttgctgttgctgatgttgcaatggcttgttgccgttggtgttcgagcagtggaggagctcggcgaacgcgccgccgccgccgttgtaggcgttgccattgttgtcgcagggggcgttggcgagggagagcacggtccgccgttgccgatccggctcccgctcctcgcgtgcgtctgaaggggaagagagagagagggaggaggaagaaggaaggagaaaggatagacatgtaggccccacatatcggtgggtcccataatatattttgtgtgtgaatgctagatgggtcccatagatattttttttaattctaatgccacgtaagcgccacggggatgaagactagattagcaccgccacgtcagcaaaaccgacatcctaaaccgctggaggagtcaaattggactggtttcaataattcggggagtcgtcctacccagttttctagttaagggtcatgaatattcggtgaacaattaagggagtctaagtggactttttccttgagtaaaaacgggtggcctttttacgtcggaaaaaaatacgaacgattttgctaaacttttgtcgggtgagttttttctactatgatatttgacattttattggccgtagaatcgtgcgtcgagattagtgtaggaatcagcgacgtttctcactcatttccccacttcgggcctgtttggcacaactccagctccaactccactcctcctggagctggagctcagccaaacagcttcagctccaccaaaactg

SEQ ID NO: 23792 - DNA, 19210 bp, Oryza sativa
tccacaactctactccagactcaactcctgaagttatatttaggagttggagctgtaacaaacagggcccttccttatcgctctctctcaccctttcttttctaaataaaaatagataggcagccccctgtcgtcatgtagtcgatcttgggcaaattgctttcgaattccgatatataaacgtggaaatatttgcaaggcatgggggccctggtcaaccaggagctcggcggctcgcgcacggtgcaagttcaacagcagcagcagcagccggcgttggacttccaggagaacatcctcctcctcgtcggcgacctcaacgcgcgcgaatgccggccaaagaggaaaccatcgtgtacgaggcggatccggacgcactcaccgtggaccttgtcgacgatccgttggttaaagagttccgtgacaagttagtggatgaggtcctcaccatcgatgccggagatatggaggcactattcgaggaacaccaggagaatccggagctggagaggacgctgatgctgatctctcagtccgaccaagacgctgatgccgccgatggcgacaccccatgagactcttattacctttctttgacgtgatttgtctcggactttcattttttcggcccagcatgtgttgggctgtgattgtttcttttctttgacctttgtcaagttttctttcagccttagtaactcttctatttttttttctagatcacagccgaattccttccttggataccctacacgtactactactactacttctgcggccgtggataaggcggcggagacggaccaccacctggccacacgtgcctgcaggcgctgcgtcttgataattctgccaacggagaaaacccatgaggaggagtttatatttataggacgtgactaatactcgtagagactatactctatactgtattaactatagaccagggtttcccaaaccgccggggccggggttaccgcgcaccggcagtaagcacggttaccgcgcggtaaccgcggtaaccgtgtaaaaccgtacaaaaccgtgcaaaatttataaaaaaaattaaattattttttaaatttatttgaatttaaggatgttatcgcggtatttatattactatacccccgcggtaagcctggtaaccgcggtaaccgtgtggttaccggcggtaggggaaaccttgctagagactcatttcaaaccttgttgcctaactagtacaccaaatgtatacatgtgtacaaatttaatatttcagaaaagattatatgtacaaaatatatctattataaagtttctatgcgtaaacttttctacgtataaatatttatttttctagaccggagtaacacgctgataaattcattctaaatttaaacgtacaggtttcataggtacaaaaattacatttaaattactcgtacagggtatctgaaatttgtataagtatagatcggtgtaaaaatatgtatataatctctatattcttttaaaaaagtagtggtggtgataatgaatttgccaccccacctacctacttctattatgaattctgcaaattatctcttcaacttgctaatatttaaaacaatcaaaatctggatataaagccacatataaatcaaatggatagccacatgccacacattttctatagcaaaacgatgggtaacatgtttcatgggaattttttttgtttattttattttatagcaaatatgcccatgtgtttcaacgggagatggctcttttggttgaccatatcgtccatgtagaatgtagcatcgttagtttttactcttggttaaaaagacaataggcaattatgttcttaactctgttttcgttctatgattttgtccttgcttattaactaaaggtcaagtttgcctccatttcattaagatgacttagcggtgttgtaaatttagccctattattttctgaagaatttatgattttggtcttgatttgacaaaagtgtgttttgacacgattttttcccaacctgaattttcatattctgatcagctaattattaaattttcatattctgatacatgactactcattcatatttaaaatatatatatgaaaatagtactctgataagctagagtactataatttgatagtactccgaatatgagtgagtgtcggatcgccattgcagtgatcaaccttctcaccgttggccatgcacaacatgcagctgaattttcccttcagcgtgtgctagcatgtgtggtggactcgctccgcgctgacgaaccttgtcttgaggcacacccacacttgtttcgccgtcttcttctttgccacccgcatgaagagatcctttggaagcgcatggagcaagtgcgacctcaccttcttgtcaaatgccctaatcttccatcatcgcctgcagccctgcacccggatcacctagctggtataggtggttgcagtgaccagtgagctgcgggtagaggaaagcgctccccgtgctacgccgtgccgcgtctgccgtcgtgacgatagacatagctctgttatctttttttgaaacctaaggcggaacttagttccacttttatatttagaagaagagaattggcccagtctataaggaaaatcgggcccaaaaaccatacaactgcacggttaattacaaacccaccgctacacaactaacaatgacggcggagcccaatcgcaggacgtcgccacaaagctaaacacaaaagcgacacaacagcttccacatcgcagaagaggtgttatcgttgccgagctagccgccccagcgacccagcagcgccaaagcgaaagtcgccaaagccactgaagacgaaagtcgccaaagcgaaaagcggctccggcatccaacaatagacatcagccaagccaccgaggagccacttccttcacacggccagcaccagaactccttggaagagactgcaacatgtcatcgttgctaagcgtcgctgcaccccatcagcgagcagcttcgacttcatcagcagaaacaaccgaagagcatgtcgcccaccacaaaaaagaagcagacccaagaaggcgaagcctcaccgaacacaagatatgaaagcttttgaaccgaaaaggaccatcaacagtcatcgatgcattggaacttctccgaagcgacgcccctaaggaggatacgacgtgtgacgccgccgccgctcgtccaaaaatcggaacaaggttttcacctggagagatttgtgaggatatgaaagagtgccatgacaacgcctccaaggagggaaacgacacccacgggcgcgccattgtcgaaccggccaaaagcacggtaaggctttcgccagcatcttcacaacacccacacaagcacccccacatcgatggccgcagaatagttcatgacgtctcagaagcaatcataccttgattgtaaccaacggcaaagacgggcccttggccatcctcgaaatgccatccatccgccgcaaacttctacagcaagccggagcctccgccctccccatagcattccccatgaccagaaaagggtccggccaaggggggaaaccaaagagagggagaacactcggccgacaatgaggaagtcaccgtcacggacatcaagcaccattcctgcttcacgccagcacaagccgtcgtcccgccatttccacatccgcacatcgctgcccatcaacaacaacgagacccaccaccggcagaagccccctgccgagtaggaggctggctgccagcgagccgccgccgcgcttgccgtccacacgcagccgtcccaccgaccagctgccatctggcgtggaggcgacgaatctagccgcggacggccagatccagccaggtacaggggatgaccagctagggcgcgccgccgcagcattaccgaagccaacaccgacgcttgacagacgccgacgacaacgccgcgaccatgacgggagcgagccgccactgccgtcgcccgtccaccgcgacgccgcccctgcctgccggtttccgcgcctccccggcgccgaccactctcccccagcccggattggagaggcgacgcgagggagcgccgttgccgctgctccacctttcccgccgcctgcatctcccttccccgcctccttgggtgccgccgtcgtcccgggaggaggccggaccgccggatttggcgagggacgccaaatctggcgtcgtcgccgccgcccccgttccgcacccagccgccttcgcccagctgttccgcacccggtcgcctctgcgcgcctagcccgacgccccgacgccgacgccgatgccaccgcaccgtcgccgcccccaactggtcggggtcgtgggcaccgacccgcgccctcgagggagaaggaaggccccaccgccgacttcctcgcagccgcgcggtttccggcagtctgctcgggcggcggcgaggtggaggagggagcaaggcggcggtggggagaaagacggcggtggtcgccacccgtgtcgcccctgcccctggaacgacacgggggcagttctcatagctctgttatcgatcactggttgcctagaacctcaatcgaacaccttgcgggcagggactctagttgctcggcaatgccaaagaacaaagaacttaatttgtgacctatctttgtgactttgtgtgtcttctattgaatggaacaagttgggatacaatttgtgaggaatgtttcctttctttttgtagcaaagtctaaaaacagaatccggccagcacacatgcgtacactagcgcgattaacccaaacaattttgctatatatttgtcgataaattttctcctaaaaatttgacaaatataattacagtataatcgtagtgtaattacattgtaactacaatgtaacttatatgtaactttcaaaaatctctccgtaacatgttatttgggtaaaatggaggtcgtgggaacaaatcctttcacatatgtgtgtgctgtgattttttttctttctcaccagaacaaatctggtaatagatctaacgattcaaaattacatgaaatttacatacaagttacactattgttacatgcaagttgcagtgtaattacatataagttacaatataattacactataattatactataattacatctatcaaatttttagaaaaaaatttgtcgacaaatagaaatagatataggtgttctcaatccgaaaattcggaacgccacgcgcacacacgccctgatcgcgctcccggcatctagctggctccaatccgttgcacggccgttggcacccaccgagccctgacaccgccgccggcgaaacagcaagacgacacgcatgatcaggtccggtcagctaacgaaatgctgccagacgacacgcatgaggccttcgcgccgtacgaagcatgcatggtttctgttttctgtaaaaaaataaataaataaaagtcttctgcattttcctggtatatattccgatccgttccctggtttcttaacagtgtatccgactcggacttgttgatcgatcgtcttttttctcgacgtgcgcacgcacgtacacagaccgaatcggattatttgtgggcgagcagtgtctatatatttgctccggtggccgaagcgagcgagccgacaagccacagatcgatctctagctcgatttttcaacgagaacccctcgctgatcgaccgcacgccgcgcgcagtcgtcgtcgtacgtcgtcgtactcgatcgtcttcgacgacggcaatggccgacccgacgccgccgccaccgtgcgccgcgtgcgcgcaccaggggcggcccagctgcccggcgggctgcccgctggcgccctacttcccggccgaccggccggagcgcttcgagtacgctaacctcctctacggcgtggacggcatcctccgccgcctggaggcggccgggccggacccggggacccggcgcgccaccatggcgtccatcgtcttcgtgtcggacgcgagggccgccgaccccgtgcacggcgcctacggcgtgatacggaacctccagcaggagctcgccagcgtcaaggccgagatcgccgccatccggcagaagcagcagcaagcccagccgccgccgccgccggaggacggccactaactaagcctacgcaccgccatccgcatttatatatgcatgctgtggagacggttcaattagattatgtttttcttagtaactcattagattgctgcaatattaattatctgaattcagagtttagctccatgtttcggaaataactaggattagcacccccacacgttgccgtgcagtgggtgcgacggtatttccaaaggatgtcaaattactcctctatttactgtatgtcatatatgattatatttgtatttaaaagtgtcttataataatattattatgttgaagggcgtgtagaaaactttgcacacttctctgtctttatctctatatctaactctacgtgtggcgtttcggttcagaccagaagttccagattcagaccggaagtttcagattatttacttccctgcaaagtatgaatttcaaggaacgcctattcacctcctagatctatatctatatctatatctataataactaatataaatattcggatttttccggtcgtcgcatctcttttcgtccgtattttcgtccgtccgtcgtatttcaatctcaatcccaatccgactatgttagcgatggaaaaattgcaaaaaaaaaaaaaacaattcatcacagattcacaccaacggattctcaatcccacccacggattcgcagccaattcatcacagattaaaatccacaagaaaggagaaaaacgaaaagacgaaaaaccgcaaaaaagggcgccgccgctgggaaaccaggccaccaccacctcccctggatccaggacgccggatctgggataccgagccgccgccgcctgccaccgtcgagccctcccgcggccccatggcaagggagaggaggcgaggggcggagaggcgctgccgcccgttgccacccgcggaaggagagctccgggctcaagacgtcgactggagaggaggaggtgcggggtcgcaggtagagggagaaggagagaggaggcggagagaaagagtcgccggaggcggagaggcggagagaacgagagagaggagttgaggagcggcgggttggtcgcggctgggttggtgcggtgtggggatggatacggattaaacactgtgggccgcctccgttttttttttttgttgatttttctgggatagattcgcctcttgcgggcacgtatcactgttgccaccgcaaacgctaaaacaaaaatgttcgatttttagtctattagattgactttgagattcgtgttcatggaacataaaaaataaaaaaaaagctacgcacgatacaagaacgattttgctatatctcactcgaaagattttttcttatctctcactcgattttctcactcaaatttacagtgcattttattgtaagttacagtgtaatttatgaaacttaccctgtaacttttgtaagttacactgtaatttttgaatcttcgcatgtaaattttaaattttgtattggatttagtctttttcttgaggatatggtaatttagtgtccataatgtgtttcttaattgctttttgctttttattatatctatcggattttaatccaaagattaaaaatctgtgtgatacgatcataaaaatctttcgaaagatgtataggtactcccatacaagaatcgaccccgggaccttcgatctgggcccaactacttaaagaaagtttatttgctcagttgggataaaattagtttttctctctcaataattttaagcatctttctattttctattttcagaaatagcattagtaccattttaattatttattactgcttaataatttaattccaactaaattgaattaactaaaaatttgatttttctcatgatatggatttatttttcgactaaaaatataattatttatttgtcatgatataaatttagactaaaattaaataatattaatatgaaaatttctaaactataagagtgctcatttttttattactttactaagttaataacattaattttttccgttgcaacgcactattgaataataatttattatgagctactatatttctctctatcatttgagactttttttaacgagcaaaagtaccaaagcagtgtgaaaataacttcgcttaaaaacaaatatttttagttcaatacaccgtagcaaagcacgggcattttgctagtaatactaagatcctttcaacgcgtattgtctccttagcatcaataatactagaggctggggcgcgccaatggcgcgccgcctgtagacaggtcgatggaaagatgcgatgcacacgttctcttaactaagaaaagctaaaaagcatatggtaaaaagaaacaacaaatagtaccatagtagctgtagtataacaagccagctgtttgtacataaagtggttaattgttcactcagcttatggataacaaaaggagctgaggacaatgataagcagttataggtcacgtgcttacagagcaagtgaagttagatagaccgcaagcaaaggataatagagaattatagtagttgttccagtgtagataatagcagcgactactgaagatgcaggtaactttcacagagcatctatggtgagcgtgaggtgacttgtcctaaaaagtggaagatgcagattgtgtaagttgatgctgttggctgctgcaaagctaaccaccctgatgttaagttgttgagggtcgacctgcaatctgcactctaatgtttgctgtcttgcctcgaaccaagttcacaatgtatttctttgaaaactcggtcgcaaagtactgaaaaagaaaagtgacatttatatgctcagtatgggtataagaagatggaaatgttgtgtcaaaaattaccactctgtcctgttccatgaatgttctgttcatacgcacgacatagaacttgtttgattcttctagaaaatctgcaatctctttgatgtaactcttcaattcagctgtgagcttaatctggtggcagaaggaggtgtctgctaggttttcttttgttactgcctgctagtaaaaaatgacagaaaatgattacatatgaatagaaacatagatagaaagatttaaatcacttgtccagcatgtgcaattttgcaggaggcaatatagcacagtgttttttagccaatgtaagttggaggagtatctggctgatttaattgtatatcttctattacccggcgaaaacagaatagacatgttaatgggtagtgtaagttgaaaaaatgtgatgaggcaaactttgtacctgttccattcctcagaaatggaacgcttttgctaggagatgcatggtcaaatgtgcttgctctggttaattgacctgatggatcaaggggccttttgttcgctgatgagctgttggatggggtcttcactggacatctaataaggccttgtctgttcagtatcataacacacgctttagactgtgatggcatccagaaaagaatcgtttctccagtttctaatccagttgcctctacaaattatttccatcatgtcgtcatgtacagtgtgctagctacttccttgattttgatctttatcttcaagccatgggaagtttttaacttcagattatctccacgctgcatcttatatgctgtcgcaagtgtgattggcacaggatgtagaaagaaaatatcatatccgcactggtgctaacagcatattgtacatagaaagttttgtttgactttgagcttaccaagtagctttgatttgttgcattcagcctcattgatgcgaaaactgcggaagacatgattgtggctacaatatatatacacatgtagttagatgtatttgataaataaaaaaagttatgagaggctcagctagttattagagtttttattataatttttttattttcaaacagggtgagtattttgggatatgtagaaatgcaatgaagtatgtgatctataacttgatgtatgtaagtatttatgtgatgtaaatcttagttgtagctggaaagatatatatggtaagaacataatgtgctgggttaagtggctatactacggtaagatataagataattatgatgcaagaataggactaaatagctgtgaaaaagcttaataatttacagttgatgtaagtatttttttcagtatagtagctaaaggatttatgtgaaagagtattaattatttattgtaatttcgtgtaatggtattgttctaatgtattgaaaaagggaaatttttatattagaaatattaggaactgaatccgatattagcaagtcatgacacaaatataaaatataaagaattgaaaggggctaaagtacgagtatacatgtttcaataatgggcaagctaaaaagtataacatttatatctgaactgaaataatgattagtgagagaatatgtaatagaataggtgtatatttaggatgccaaatctacatagttaaatgatacaatcaattagtctacccctataataaaatggttatagaaaggtttttctgggtcagctaatatcaaagagggtttgtaggttagatcacttaagcataatcactgattagggctgtcaacagtacttagggttaatggtagatctatgatagtttgattgacatagaaaaagacaggaaattttatccccccgcgtcgcccacgcgcaggcgacacgggggtgaaccctaccgccgccgccgccgcccccctctcccccctccccctacctcgctgccgccggagctcaccgccggcaaagccggctggtgagctaggatggcggcggcggggccttctccgcggcggcgctccctcttcggcgtgatggaggtggtgttcgccggcgtcggtacgccggtgagaggtggcggcgaggtctcccggctaggcggcggcagatctggcgtcgccgtcgccggatctggcaagccctccgattttcggcggtggaggaggctgctgcgacgtgtgggcggcgacggctcgcgcagcggcgcgtgggcggagtcggtgctggcggcggccgctggctccggtggtcgaaggccagcgctgacggtggccgccgtctccggtggtcggcaaggtcggggctggccggggtctccatcccgccactactctcttcctcctccctctccacaaccaccctcttcttcccccccctcccctcattcccttattctctcttgtgatgtccctctcctctctgtgccgtcggcacaagcgaagcagaagtggaggtttccttcctcccttcctctcgccatcgctgctaccagttgatctctgctgccagttgtccaattgctctgctgctcgccccagcgctcctctctctctgcgctggtggtatcttggaggtggttgccgtagtcgtgaggttttgtcccgcgaaaccaggagttcctcgccggagacatggttgacaccgaggtcctgggttcccctgactccaactctcagctcctcttcaggccggccaggtctcctcccctccgtgatgcttctcccttctgttggccgtcttccagacctggccgtggagtctttcggtggttgaggagaagtgttcgtccttgaaggtggtccagtccgtctgaagtcagggctcttatgcctcgccagtgcttcatgtgccctgtgactatgtggacctatcttagtgccgagtttggagcggtgtgtttttcctcttcggtgctgagcttttgtgttaaggcggagtcgaagctgctgcatcgggtcagccgatgagctaggcaacgacaactcttaacacttttgctttggcttcttggaggtcctacaccttttgagggagtcctaggcgaaagccctgtctggtcttccaggatcggcgacatcgacgcctgcgggtgccgtttcctccttggaggtgttgtcttgtggactctttctccctttgggtgaaaacccagtccagttatgggcgggcgtgggcagcggcttctgtcgttgttcacctccttggaggcttcgtcttgaaggtcttgctcctctctcggttacttctgtggttcatagttttgtcacgggttttttttgtgtcttctgtgtaaggttttgccggttttcccttagcaaaccgtgcagttgtatggttttctggcccggtttcccttataaacagggtcaactctcttcttctaatatatccggtagatctcctaccgtctactgtttcaaaaagatagtttgattgacttgaggaagggtgtgacgctcgatgatctaaaaacatatattcggtatagagaaaatggggaatgaaaagaatagaaagagagcgaaatagtgtggtgatagtaaaggcatgtggtttggagatgagatctctaaaccctgcgaagtgagagtagcaagcgggggaagaaggatcgatggagcagcggtcaccgtcgatggcgttcctcgttggcgtcgcttttgtggctaaattcgtacacttgccctttacttggggctgcaaaccaagattgtctgcttgcagaagaattagtgaataaatccatatacacaaactatgtagaatacaccttcagatttcaagtgcattttgagaagaatcacacaattaatccatgtatatatgtgtaatcttattaaaagaggcaagaagcaggctgcttggactgccaatgattgtagtctgagcataggcagtaagaaaacatcaatttaatgggactgtaggtagcaagtaatacaccacaaattacatattaactgaaacctcggttatgttatggccaaactgaaaacataatacagcggctagaagtaagagtagaattgagtggaaaatttacccatatcatgaaatccaagggatgtacgcaaattgtctctctctgaattgatactaacaaaaaggtgtcaaaacagggaagaagcccatgagtaccagagcacttagtaagcccaattacaccaacatcgcaatgatctccaactgtccaaggctgaaaaagaaaagatatcacattatatgttaaaaaccaccaccatcaccaccacaaacaagtgagaactgtgtgccttgaaaaggaaaattacaacattacttgattaccaatagtcaggaaaaaaatatgtatttcaagggagagaaacactaacaacgtccatgaccaacaaaagcccatacattctgtgtaacttgataagctcaagcaatggagcaaagtcaccatccatgctgaacatactgcattttatcaacaagaagatcatctgagttggttacgctagccattgataccaaaataagtgatttttgaatgaagaaatttacttggaaatataacttgtctatgtgcgaaaaaaagaatattttccattgattaatgggacctgctagtgtaatcacaaacatagtttataactaaatcaattagtgcttaacattatgacatgtatgttacgactgggaagtgaaaaaaatacccatggatttttttttaagtcttacacttactggaggatgcgaagcaagcagagtttaatctcaatgacctccgattgtccaaggctgaaaaagataagagattacattatatggtataaaaacccctaagagcacaattcacattttcaggttaatcaagctaagccattaaatgaagcaaaaccaagcatcagcgcgcacctataacataaacacagatatacctcaaggatgcccgttgggataaaaatttggacgggtaaaacatcacaaaggagatcaaatggcagctacaattaggattgccaataaattaatactcacatgggaaatgagcaatgaaactacacccgcagtgatccagttgagcaccgtgaaattatttaggttacatgcagatgaaactgcagagcatgaaaacaaaaaatgaaaattaaatagcatatacaacatctgtaggaagttcaaaatatcatataacagcaaagaatcagctatagtacatgcagccaaagaagcaagctatagaaggggcatgatttaaaataatggtgttagtattagtacctaatggcacaacggttatcatgtaagtaaatcaatattcctgtcatgcttctgcttgcctctcacctgcaacctttctcaattgcttgtggaggattgaacttgtaacatgtactggtagccaagctgaataccagatcagagaacattttgtattaacaaatctgatgcatgaacattaactaatcaaaactgattgaatggctgaacatatatcgagaagggaatataacatcacatagcgtacggagataaataaaaacaactatgtaagcagcaatcaccaaatggcacatggaccagctgatatatcagtggagcatagaaaggaaagataagtggcacaaaggaaaaagtatattactatgaccacatctgagatgggtaacgtaaggaaagataagtataatgtaaaggcatccctttcccttttcctttccctttcctatgcattctctcaaatatccaatctaaaatcaaaaattgcaatccaagaacaagagaaaacagagattggcaggtcctagctcactcagctcttatttgcagtgtgcttctctacttagcagcttagacagaggcatgcccattatttgcatctgagtgctgtggttgtggaactccttacctcagtgccggttggcgggcgctgctagcctacacctcatcagtacagaaaaacaaaaacaaaatcaactccccacaacattacaaattgatgcgattatattacttcattttgccttcacttattagatcaccgaacatcagtttattgggaatccgtacctgcaaacattgccaaaaccactcaatacaacaggaaaacagtaggtaatgtcagtgctacaaatactatcacgtcattaacctgacaatacaactgaccattctcgatgatacatactgagcaatgaaacatgcagtaaaaatgtggaaccaccaactgttataaagtagtaatatctagagcattagcatgtagattagtatgactaatcactaacgagaacgatcaaacaacaatacacctgcgtgcaacaattgcaatcacaggctcgcagttaccacatgggcaacaaacacaatcgtaaattatcagcatcagtctatcactaacaccactaacaataacaaccactcaccaagaccatgccagagtggtcgcagaatgaggaaggtgaggccggcgtgggcgcggtggagagcgacccagccgcagaggcgcacgcagcggccggcatcaccggcgccgagctcgtcacacagctcgtccctcgtaggccactgcagcggctgcagcctctcgagcttcgcctcggccgcggggtcacggtgttggtggccgctagggttcggagcggagacggtgagcacgaggcctacgtggtggaggtggtggtggagagcagaaggaggcggaggaggtgcgaggcgggcagcctagggttgagcggctttaggcgggagaggaaggagagcggcgaggcgcagagaagagaggaagccattagattggacttggagacggtgggaaagcgagtagacgaagagaagggggcctgggttttcgaggaggaagacgagatggcatcggatccggcggccttgaggtcatggccatcagatccggccactccgatggcagcgagcgggtagaccagcaagttgaagacggcggttgtcagactcgtaagaagaatggaggaaatttcagaaagttcagagtttcagttaactgaagatgcaaaggagggagaaaacgtttcatcctgggtaatgaagatctaagagatgagacaaagccacgtgttcgagagagggatccgacggtgttaacgtcatgagaagccgctgtagctatcaaagcttgtcgttttgctctttacattcactgtaataattttagctgctgtaaacttacttaagctggcttttgctgtgggaagaagataagaagaatcacaatttctatttgtcttaggagtagctaacttagaaccctaggagatagtcttgcggcggccacccaaatcctaccaaaattcacaaatcgctactctgtttctccatttctggttcagggttctgacagaggtatcagagcacgagcgaatccttggctcttggatctctctggtgaaggttggtggaaggcggcggtgagatccaccgtaaaattcctgagctaggagggattcaatccggaggcgagtggtgcttcagatcggacagcaagggttgggttgccaccttcgtggtgtgcacctgtaaaatctccggcgcttctgatttgaggttggcggcggtagatccgactgcaggggtaataggggaggaatcttgaattctgaacctaacctgcaggggcgaaatggtgaccaagacgcgctcaaacgatgagattgtgggactggaggagatgaatgagtttcgctcagatgtggcatctctgaagaaggaagtagtagagcttaagggcttgaggtcataggtgaaggagatcaaggaccttctgctggagttgtgcaaacagaaggggaacgagggacaggagaatcctgtgggagatgctgcaacaaaagagaagagcacgggagaagcaggacccagtcgatctgtgcaggtaaccacgcctagtttgggagttcagttctctattgaaccaaatactatgagcctatctgcacctatgggtcaagaagctagaccacaggggggagtcagtagtgttcagacagatttggggcaggtgactactgtattatcaaaacctccaccattcataccatttgccccatttccaaaccagagggtacctttcttaaactcagctccttttcaaactcaaacaacagttgggggaagagtgcccaattcaaattttcaaacacaagggacagccactagctcaggcactgggcaacaaggggttcacatattagatcatagcagacctggtggtatggtttatcaaggagaaaatcaacattatgctgaagctgtaatcaagggacctcggttggaaataccactgttcacaggagaagatcccattgactggttgaagcaatgtgagaaattctacgagattactgggacaccatatgatcaatgggtcaatctggcaattgcacatctgcagggaagagcaatgaagtggtttagaggagtaggtattccttggcagttgattccttggccacaatggtgtcacatggtgagcactcgtttttcggctgcaaatgagcatgaggcagtggaactattccagaatgttaagcagtatggttcaactgtggaacaatatatagataaatttgaggagtatgtggatctagtcaggagggaccatccttacttacaggaacagtatctgaatagctgcttcattggtgggcttagaggggatatcaagcatgatgtgtgtgggcaaaaaccacaaggtctgttggagtcctattggtatgcaaagaactatgagaaggcagctaatgcaaggaaggtggcactgaatttcagcagaaacagaaatcagaacaccaatttcaacaatcctggcaggaacacaaataatagaccacaaaggggtgatggtgagaagaaagaagacagaaaatgctggttttgtaaggaaccatggtttcctagacaccaatgcaaggtgaagcaagctatcaatgctttactggtagagaatgaaccttgtactgaagaggaggaggatgaatcaaaagagaaggaacaagaggagctggccactgaccaaatagaggcacctaagcaggagggagcacatgaggagttaatgagtgtgtcatttagtgcagcttctggcacaactcggcctgatactttttcagtcctaatcatgatcaatgggaaacaagcagttggtctaattgatagtgggagtactgggactttcatgacccatgagtttgcagttaagtgcaagtgtcctatagcaacctcgactattaagaaggtgatagtagcaggaggaggagaattgaaatctaatcttgtagtcccagaagtggcatataaaattcaaggggtgaaatttgttaatgctttcagcttgatcaccttgaagggatatgatgtaatcttgggggcagactggatttttcggcatagtccaattactttggatctcaaacagagggaactgtctatcaccaaggaaggtaagctagttgaatttcaggatttcactaaacctgggaaacatttcttaattgatggtcataaaatggagaagctgataaaaaaaggagctgtggggtgtgtgttacaagtgaatgcgatgactgaagaagagaggaaggaggaggctgcagtgccagcagatgttcaggaagttttatcacagttcccaggagtgatgaaggagccaaaaggcttacctccaagaagagcttgtgaccatgtgataaacttgaaacctgggtcagaacctcccaaccagagaccctatagagtgccacattaccaaaaggaggccatggagaacatggtatcagatctgatccagtcgaaggagattaggttcagttacagcccttatgcctgtccagctgtaatggttagaaaaagggatggatcttggagaatgtgtgtagactaccgacagctgaatgccctaacagtgaagaacaagtttcctatgccaattatagatgacttgttggatgagttacatggggctagaatattttctaagctggacttaaggtcgggatatcatcagattagaatggctgaggaagatattcctaaaactgccttcaaaacacacatgggtcactatgagtaccaagtaatgccatttgggttaagtaatgcacctgccacttttcagtcactatgaaccaagttctagcaccttttttaagaaagtttgttcttgtgttttttgatgacatcttgatttatagcaaaacaagggaggaacatatcaagcatatcaaggcagtattgcaagtcctggagaagaaccagttggtggtacggctaagaagtgtgcttttggtctgagcagtgtggcttactt

SEQ ID NO: 23793 - DNA, 6209 bp, Oryza sativa
tggtgcaggtgtttatggataatattcacaaactgcatgggatgccgatagctattgtgacagatagggacagagtttttactagcacattctttcaagaagtgttcaaatctcaaaaggtccaattgaggtttagcacagcttaccatccccagacagatgggcaaactgagagggtgaaccagtgtttagaatcttacttaaggtgcatgacatttcaaaaccacaaaattggtgctcttggatagctttagcagaatggtggtataacacaacataccacacagcaatacaaatgactccattcaaggccctttatggatacagtccacctcaaatcagtgaattttctgtcccatgtgatgtatctcaagaagcaagggtaaccctggaagagaaagaggctatagttcagaaactcaaagcaagcatggaagatgcacaaagaaggatgaagtattatgctgataggaatcgaacagagagaaagctggaggtgggagatatggtatatctgaaactacaaccctatagacaaaatgcttttgggatcagaggatcattaaagttaagaggcaaatactatgggccattcaaggtgctagagaaggtaggtgctgtagcttatagattgcagttacctgaagaagctgctctacatccggtcttccatgtgagccaacttaaaaagcacctgggtactcatgctgtaccaatgccaaatttaccggcagtgggaccagatggtcaaatcaaaacagagccagtagcagtgctgcaaaggagaatgattccaaggaacaatgttgctgtcactcaatggctaattctgtggagcaatttaactccggctgaagcaacctgggaggatgcttcttatattcagaaagtgtttccaaattttcaaccttgaggacaaggttgggcttaaggggggagtaatgtcagactcgtaagaagaatggaggaaatttcagaaagttcagagtttcagttaactgaagatgcaaaggagggagaaaacgtttcatcctgggtaatgaagatctaagagatgagacaaagccacgtgttcgagagagggatccgacggtgttaacgtcatgagaagtcgctgtagctatcaaagcttgtcgttttgctctttacattcactgtaataattttagctgctgtaaacttacttaagctggcttttgctgtgggaagaagataagaagaatcacaatttctatttgtcttaggagtagctaacttagaaccctaggagatagtcttgcggcggccacccaaatcctaccaaaattcacaaatcgctactctgtttctccatttctggttcagggttctgacagcggtgaagtcgacggcaggctgaggatggcgacgagggcggcgaggccagtagcccctgccatatggatgtcgtctgcctaagccaccgccgatgtgtgccaccacgaagcaccgccttcgcctccccctcgctccgtccccatcgcctcgcgccaccaccgcccactcgcgccgccgctaccactcgcgctgccaccgccgccccctcaaaccctagccgccgccagcctctcccacgccgccatcgagcgccgccgcctccgcctccccctcgtgacatccccgtcgccgtgccccgccaccacccccgccaacgctgccgcctccacctccgcctcgtatcaccgcggaggccgtgcccggtgacggcgacggcgttccgcgaggggaaggcgctcggcaacggcggaggcggcgacggcgacggcgtgagacagaggcggaggcggcgctcggcgacggctccgtgagaggcagggtgagacgagagggaggaggggactggcggcggcggctagggtttgtgggagggggagtggtctagtgcacgtagttttgcaaaaaagcccctcggttttcactttttagagcgcggtcctaaatcacgatttttctctccttcgcatggaatatccgtttttctgaaggacctccacgtaaagtaacacctcatggatactgtttgtgagggacctcgatcgaattacgcacaaagaggagggtttttttcgcaaaatcgccacccctgcactgtagctatccgacgtggacacgccgagcagccgcccagcccgccacacttaatagtttgggggtaattgtgttcttgtccctatttacaactgcaattgtgattttacccttgtatttttaactctgtgattttaccctcactattttgaactgaagctcaggtatgccctgttccgttaggaggacttaatggtgttaactgacaggtaaaaggacatctatgcccttgcagatttggcttgtgaggactttgtgttttggctgtgtttcacgattacagtagaaaacggaggtatgaacttgccctgcatgcttaattattttaacaacgaaatccaactttgtaactacacaagaaatacgattctccagcatatgtttaaaaaaaatcaagggatttattaattaagaaacactatggactgaggtatgaattcaatgcctcaatgcctgacgtatgaacttgccctgcatgtttaatcattttaacaacctaagggatttatgaatatgcaaacaagaaacactactctcatctctttctttcaacaacagaatagctttgttggtcctgtccagtttaggaaccaaccaatagtccaaggcagtaagaaaaataaaaactaaagggggagtgacaaagaagaaaaagtaaaagacaataaaactcaaatgttcctctcctcctctccttgctgttcttctcctccttgtcaccatcatgcctcaggcgagctcctcgcggccatgctaatggtggcaaggcagcctagctagctacgcatatgcagcagtacgtatgtactcgatcatctgctgtgcagtggttcgggcactatagccgaggccgatgccgacgagcccagtgaccaccacggcggacggcgacgggctagctcagcttgacatcgccatttcgcgccggcccagcctgcttcaccccgcgctcctcgctcttctcgcttgcccgcgtgtgccgccaccgctcgcgagggttaggaatcggggacggaggtcggaatggggtatggggatcgggaggagtcagcagtggcttaggttgaaaggtttgggatagagatgtctttttacattttgcaagtcaatttcttattttcttaaactcatttaatctgagtccacctaacagacgtttaaaccaggggcaaacagaccattcaacatcaaaaagtgagggcaaaatcacaaagtttaaaaagtaagggtaaaatcacaattgcaaataaaagtaggggcaagaatacaattgccctaatagtttctaattgttagtgtcttcaatgaggctgtacaagaacctgagcacgggtgaaatgtgtaggatccttggtaaattttgttctaggttcgctgctgaccacggctggctcatgcatgcatgctgttgtcatcttgtagcgcatctagccatgtatcagtgactctagtttgattgttttgacgaagatcattttagtacctgccgtctatttgattattgtacggtaaacagttatcaaggcttcatggctatgccatttagctttgttaaacaataccagatagctcataattaattaagataaccaagactaagaaaaaaaacagagaacaaaggctacaaaattataaatactcaggtagatgataattaagagaaccagagctacaataccagatagtacaatttttatattggaagctaagctacaaagctaaaagttacattcacagacactatacattcataaatgatgtaccagttaatgtcatactccctccgtctcaaaagagccaacttaggtaccaatgagacattacatagtacaacaaatctagacatgtcccatctgtacttaggttggcttttttttttgggacgaagagagtattttcgagcctgaaaaacaacgactagcatgcataatgtgcagctttcagaacaggtagtttgtgatgccatcccatcactagcactagcacaaactgagagcagacatcaacaaaaacaccaggcattacagctaaagttccaggaacaaaagtacaagtttaaagctctaatgttcagcaggcactttcagcgcttgaagtatgtttcttgttgatctccctcctgtattcttcagatgttgctcccttctcttccagctgatcattgctccaggctcctggaattcagccttcctctgtttcacttttcctccaatttctgcaaaggtaaccgggatttaataccatgtaaagtataatagacaaggttagttggattttaaggcatttttctgcttaaaacaggctgcatttcggttttccagatcagtgccattattcccatcatcctcttgtcaagtttgtcaatgtctctatgaatcaacagcttcaataggacatttgcaatggcatgtgaaactggtttctcagtttaaatatgagtaatctcatatctcatccagtaaccttgcaattctgcttacagcttcatgaactctcttcctccatgttatcttcactatctattaactgaagtggtaccttttcttttacgtaaaactgatgtggtaccaatcatgcaaaataagaatctgaagaatgcaaatgatagcgcaagaataagaggtgaaaactatgaacaatatagagtagcaggatcttataatatactcactaaaaacagataagatgtatatatactgctccaaacaaaatggcataggagaacaaggttcaggaatcgggagatgaattagcttaaaaacttggtagcttcaaccgcacattatttacttaaagttaaagaagtgatcatgaaaagaatcaggtagtaatccgtagtttttttgttttttttttggtctaccacaataaaaatcaactaattggaagcaacagttagcataacgtatatgcatcaaatttctaacatgaattcacaagaacttgtactaaattactagaacaacattatgttgagtgagtaggcaggaaagtttttcaatacaatagacagcaagaaaaagcgcaagaatcttgcaagaactgaaacccaacagcttcgcctcacagatcaatcattcaatccccaaatataacatccgagaacaatttcaaatcaaccgaatcgagggcacacaatcccacgagaagcatgcacagcagggcagggagagaaggagatcgaagagattgaggggagcgaccaactcacaagttgacgacgagcgacggggaaggtggcaccggtgaagggaggaggacacaggggaggtggcaccagcgactgatgggcggcgagcggaggaagcggttgtccggccacgggagcggacggaggcatcgtgttgtgtccacagctcggcgctaccgagctcgccgccgtgcagcaccagcccgcgatcgccaccatcttcctcccgaatccaagccccagcagccaccccatcctcctcccgcacactcctccttcggtccttccatcgtggccgcggcggcggggagacattttctcaaacagctcgtgggcaagccagccgccgcccgccggccttgcacaacttcctccgcaagtcgcatcccaccggggggtgtggggcccacaaaatctcagggccggacatggagcaaatggtcccaggtgacgtggtccccacgtaactaaccgactgccagatcagatcgaacacgcaagccaagcggccaacgccacgtaggccggcgacggcgagagctcgagctctgccgctgtatatattcgctcgctctcgtgtcgccgcagcgagcaagccgacgccgccctcgcctcgccattcccgtaccacaagtcttggtcgacctcaacgcaatggccgacccgtcgcgatccaccagcagcggggcggcgaagaagccgtcgccgaggaatcctcggtgcgccgcatgcaagtttctccggcgtgcttgctcgccggaggagtgccggttggcgccccacttcccggccagccagccggagcgcttgcagagcgtggagcgcgtcttcggcatgaggaaagtgctggagctggctcacaaggccgggccggaatacctcgacgacatcctcagctccatcgtctacgagg

SEQ ID NO: 23794 - DNA, 23247 bp, Oryza sativa
gggaggagagggacgatctcatggcggctatcgtctacgaggcggatgcttgggccagggacccccggtacggcgtcgccggcgtcgtgcggagcctaacgaacgagctcgcccgcgtccgcctcgacgaaatcgccttccacctcctcggcaccgacgagacctacgacggctacaaggaggaggacgcgctcgccgtcgaccccgtgagcggcgcccaagcgggcatcggggtgctcggtggctcgggcgcggacctccaagagaataccggcatcctcctcggcgccgacgagccaggcccaggcgagctcgccgtcgacccaatcaaagacgtcttcgacatcgacaggttactcgccgtcgacgatgacttgtcctccgggacccagccctgataccaccgccggcgacaattaatggaaggtacgtcctgtccgatatccatcaaaatgctttcgttcctcgtaatcatcatgctttggtgaattcttgataacctagtcccttcgattagaaatcatgcataaacacgactagtgaatattcttgtaaaacatttgatctacaccgaaattccccttagttgttgatgatgtgaacttcttgcaagacgataaaataatcaagtccgtgatgggaaattattgtaaaccgaaatttttgcttctagaacagttcggccctccttttgattgtactgctagagatcatctcttcctctgggagaagcaaaatactgaagcttttccttttcatgttcagaagttgcaaaaaaggctcatgtgcaacagaacagtaaacttccttgagcattgaggagataagtagataacatatagtgctatatatcagtcataggcatcggaatatcacaggaattgatagacagtgtgttccttgcaaactacagcatgttcaacacttatttacttatttggtgaacagaaaattggacccacaatgaggtgcctcaccagttaccagcaagtttgctattgaacttaaatgtcgctgccaatttgaatcaatagggcgtattgaattatgttttacaagttctagttttatgcacacatgtttgatcccttccaacagtgttacaatcatcagccagcaggcgatcatctggttggcactgagaaacagcattttaactaaagataatttatttgaaagagggtcttgaaaaggaagtaagaaatgccaattttgtaatgaagaagaagcaatagatcacttgttctttaaatgccaattagctcggtttgtgtggagtgtaatgaactgtgtttttgcctgtggcattccaaatggaatgagggatgccctgggagaatggatgaaacaatttaataggacttaaaactggggggccagggggaatgggcttgcctttttttgggcaatatgaaaatgcagaaataaagcttgttttgaaaatctgctaccaagagacccgttgacattttttttttcagattactcactgtatatcatcatggggaatgttgcagagcaaggaggacgaagcagaaaaggcaggtagaaatgaggtgtatggactgcagcatggatggtgtttgagaagaaggatacaatggtcaagatgcagaatgggtttttgtagcctggaatgtgatactgccatgaccatgctgctatcttccatgaaagatgcagaaagtgttcttttgtcgcctggaatgtgatattggggctcgagaaaatggatatttggctacgttcaaaactgggtttcgctattatgccatcctcaaaacgtgattcgataaaatactatttccgagcacgtattactcgccaaagtgccatttttgctgttttattcatttccaaaacgaatttcactcggctgtggggtgatgagacgaaaatgccctgttgacaggtgggaccccgggcttgttatccccttgcagcgagctcaatctttatactgtacagcaatgaatggaaacgaagaattgtcgtcggcgcgccgcacggtggcctttcggtagaaccacttccctaccaccgaccccatcataaacaacatcgacattgccacgatgtctcatcccgcgtcgtcaccgtcacagccagcttcttcaccgccgctgccggcttcttcacgtagatctcatctccccctcccccacccgcctcttctctccctcctgcagagaaagaagtgtccgcaaacgtccccagcagccgccgcctccgcccccttgagctccttccatctacgtcgtcgccgtcgctgccctccttgagccccatcgccgtggacctcccaccaccgccgccgcctcctacggacgcgacggtgattgccgccaccaaccacctgctccagatcacgcgagcctcgcgaccgaagagctccgggcgcaacggtaacccgccggtgagggagctcgaggagggaggagggattgccaggagggaaagggatgaagcgtcaccatccgtggagataaagaggagggtgggacccactgacatgtgggccctagtaatttgatgttttgtttgactgacgtgtgggacccacatttaaaaaaaaatcaattgcactcctagtccacgtcactaccacgcaggacaaagacgaagtcagactagtcacatagacgccacgtcatccaaaccgccttaaaactttatgtgcactggttttgtaagttgggggatgccttgtatccggttttgcgcatcagggatgaaaatcaaactggacgacaaattgagggacctaaagttcagactggcgataaattgagggacctaaagtgaacttattccgagtaaaaatgggtggacattttatattcaagaaataataataataccagcaaactttgcagcgaagttgcataaacacaaacacataggaacaattatctctgtaattcgcagatccatcatattgtcacctgttctaataacttaacagtataaagtattcacattgataagactggcattcgtatttttcctcggctacattgcagagacagtattgtatatctaacatcacgatttttttgctgcgcccagcagaatttacagtaacaaatcttcaatcctacaaactcctggcttgcattacctgagagtgttcgtttcctatatttaagctctgttccaggagcttatgctattcatagtacagacttctatcgaagtgggtaattgatatacagatattcagacgttataaacacgttccactattctaaggacagattgtattcttctcatgcctctagtgttccacgaactgcatcggctccacaaggtatgggcagtcatcaacccaaccacaaggccttccgacgaactcctcgacatcgaaggagccaatcccagccttttcttcctgctccattccagtttcaggtaaggcgtccagctcttcccagacatcatcacacatattctcaatattctggaaattgcacattggagtggtctccactttcccaactgtgccacagccagtgctccctggagaaacatcagcttccatcacagatgcagcttccatacctttgttcaatggcgaatcagcatgctgttcttcgttttccatcagccgttgtcttttcgcggcgcctcttaggccattcttattcacatagttgagtagaacctgctgcacgaaagccgggttggtgagtaccttggcaaagaagccgatggtctgctgttgccttctctcgatgttgcggaccatctcctccatggcaatgagctgagatttacaggcgttgtactgctgcttaagcatgatgacctcagctctgagggctgcacggtctctcttcaagctcacaacctcaccaggagcctcaggctgtccaaaaacaacacttgctttatttcttagttgtgaatccacgagaggcttggaaacacgcctcctcttgatgtttttcagcaaatgcttctgaccagctaagaaggcttcatttgcaaactcccaccgatctggagtgacctttcggaacccctgcatagcaacaacaggtagaggccggtaagtttttctagaagcagctgcagggaaccaaacccagtctagaaagtcagcagtatttagggattgaaaactgtcaatggtaggtatacgcatattaacaaaagaatcagtctatggttttagtctatcagagattaaactagcaatttcacttctgtgttctaccgttgaaccacaggaccagcattacccagaagctagaaggttcagttgcctgatatgaaatgtctatttacagcaagaaaagtatatagataatatcaaaacagcaagaatggtggtgccattagcaataaacacaaacaggccaaataaccgagaacacactgctagataagctcattgacaagaacaaggtaactgttctgtacttctgtagctcattgaatcagataagctcatgtatgtacaaaagcacggagctccacatcatcaaaaaagacaaaagaaaaagtgggggagcatagttcacctagatcatgttaccatcacctttcccttttaactattaaaggtatggacaggtcatgaggtattaggtctttcagagtggtggaaaaagacttcaagatttcgagtacgacatacgagctacctggacacttgtaatgcccacaagaaggaatattatccactttaagtattttagggatcagtatcttggattgcaacgtgaacagacagaacataggtcatatccagtgacagtggagcagatgaaatccaatccaagtgcatcatcacaaaggggctaaaaaccaagacaaacatttgtcccgtagtacagatggatgcaagtaactagcatgactttgcatcgtacaatacaagtataccaccactgaacattcagcatcctacaaaaacatggctgaggatttcagtttcttggtaagacaaaatttctggtatgcaccatcctaaactagaggtggaacaaaattgtatatacaagggatggttctataccatttgcagtccaatattaaccaatttaggcatgatttttaaattctggtcaaacttctagaattctcctgctattatcaccaattttgacaaaacaggatattgtatatgcgagcgcattcgtggacacgaacaaaccacagcataggacagtaccagttcatacatgatacgattcttgattagtacggaaacgcagcaaggatttcccacgaatttggtatcactccttttcaaatttcattctcataatcagttatcttgttcgatcaactaacaactattgtctcaccagcatcaacgattcaatttacacgggaaacagaagcacacgagaccgatcagcggttcacagaaagaacaccacccacaccacaagcagcagatcgggcgattgggatacgtacgtaggtgttgagctggcgaacgaaggaggagaagttggcgtgcttgaagaagcgcgggagcacgccggcggcgagcgcgtgcgggtcccacaccacgaaggaggcccccgagccgccgggcccccacgacaccaccgcgtcggtggccgcgtccgccaccatctcgtacgtcttcgccacgaacggcgccggccccgcctccccgagcccctccatcggccgcggcggcggcggcaccacccccagatcacccccgccccacccctcccccgcctcgggcttcacctcccgcttcaccggcgccgccgccgccattcccccctcccctcctcctccggagaagcggcgggtggtcggcctggggatgagtagtcggcagagggaggaggaggaggaggaggacgccatgtgggaattgggatgcgcggcgcggcgagcgctaggtgtttggggtttaagcatttgacacgctcttcgcctccgctataataatagtagagaaagccgttggttaaccccacggggggaaagcggtggcaatgcatggctaacacgagggcacggattgccacctgactcaccaccctcccctcctgctgccgcttgtgtgcactactagcaagtgttttccacgttcacactagattcattaacatcaatattaatgtgaaaaatgtttacattgtaaaagggagggagtagaaaacttctctagataatgagtgtgacttaataccacatccgtcccaaaataagtgtaatcgtgagtatccgtgtcctacgtttgatcgtccgttttatttgaaaaatttataaaaaaaattaaaaacaattagtcgcacataaaatactattcatatttatcatctaataacaataaaaatattaatcataatttttttaaaaaataaaacgaacggttaaactttagatataaatagtgtaaaactgtggacggagggagtagtttatacacatactcctttcgtcccaaagtaagtgcagttttgtatgattcatctccaatgtttgaccgttcgttttattcgaagaatttttatgattactgcttttattgttattagatgataaaacatgaatagtactttatatgtgactaatttttttaaaatttttcgtaaattttttaaataagacggacggtcaaatattggatatggatttttacggctgtacttattttggtagagatgtagtatatattgatttgaaagaagcatgatgttggcagttttaagaagatgatggtacggactacggagaggttgccagttttaagaagaatataagtgtttgtgtctcgtctacaagaacgtgcataaatataatggtttggtagagggactggtaaactgtagaaatgcttttaaataccgatatgtctttttgtaatataaaaattcaaccgaacggtttcgatcagcccgggtagctaatattgagattagcataatggctatcacgtacggagtagctcatatggctatcgtaatgtggccaatggcatgattttcaactttgagggccttttcactttgatgtcattttcaaccttaccaagttttgataaagttaccaaaaaagtggttacatttagtttactgccaaattttagtaactatataagaaatcctgccaaaattttggcaagttaccaattttggtgccaaaatttaataagtttttttttttttgcatcaaagtgaacaggccctgatactttgagctacaaccgatgagctgtggaaaattgaatgaagttgcatacgatgaaaaactttaaaatcaacttaaaattaggtcctaaaattatggctgataaactaacaagatgatgagagataatataagagaaatagaaacatctagtcataagaagaatgaatagaaaaaagaagagagaactatggtattgtcttacacatcttgaagatgttttcatggctaggccaaaaaccatttaaattttgcgaaagggcctgtagcctagtggttacaagagcctcactagcacctgaggtcctgggttcgactctccatgggagcgaattttccaggatttaacggcgtcgtgctttcagtggtaggcgacgtacccgtcgacagcgagacgcctgtggtgacttcgtcaatctctctagaatttgccggcccagtcttcgaagatgctcataggggtagggtttacgtgcgtgtgttcataggggtgagacgcctgtggtgacttcgtcaatctctctagaatttgccggcccagtcttcgaagatgctcataggggtagggtttacgtgcgtgtgttcataggggtgagtgcgcatgcgttgtgagtgtctgcgttgtactgtgtaattctaaaaaaaaaccatttaaattttcaatgagttttagacccctttgaaacacataattagcaaaatagagaaacagaaaaaaaaatgaagaaaatttacataaatgtaagtgcaaatagaagattatgaaaaaaaacaataattatcatttggataaacccagaaaaaacacaagaacgggtcgagagagataaactcttctaagaggttaaaactcttactaattttcttcaaaatctctaagaccattcattccatacaaatttaaaagaaattgataagattcaattaattgattcgaagttctttatagaaatattttatatagaattaaaatcctctaaattttctacagatggggctgcccatgattatactatccctccaaagttggtgcacaaaacaacaaaataaatctagctgacacgtgcgagctcacgactagtccgtctagctgacacctgcttgactgctttattatctcgagtgcagcacagtatctccggcaagtcatccgcggcaggcacacacacactggtatcgcctccggagcatccacgtacacaaggctacagccacgtcgcacaagggtaggggagccaacgaggcacagagccaaacaacaacctgccatgcgccgcgcaggcagcgactccatccccggttagtcatcaaacccaagtattttttctatattttttcaatggtttttttgaagcggcggggtacgtgtagaatttcctgacgaattcatcggcaacaggagtccgcagcttgcatttttcttctcatcttctgcttgtcattcaccagtctgaaaataaaataatcctggttggatacgcagggaacaagagcacccaacaagcaaagctcagcatggcgtccagatgagagatcatgattagtgttcacgaataaactactagcaaaagaatggttgaaatggattcaaggacagaaggcagtggttaggagagccaagaagcgcacacagacggctgtttgaagttgaaccctgccagctgcgattgtgcagatgttggatgtgtaaaaatttggccaatcagtccaattgcctagtttatttcgtaaagataattcggtacatggcactactgcttctgctgcagctgtccctccacagtgagggcggtaaagggtgcagaaactgtgagctcttagatgttcacgaaatggatgatgtgaaggtgcagaagagctatgggtttttcgttacactgaaattctgtgcctgcccttggcaatcctgcgcgcaatcaccttacgcccacctttggttgattttctattgatgaaaaagaaattaatggaatatcaatgcactgaacacaagcacctgaaccacaattatgttccagaaaataccaacaaaactaacactggtggtatgattggattttggtattcaaaaataattttcccataacaatgcagtacaaaagagaatgatattaacttgaaaaacatagcatcttttgcaggggccttagcacaagcaaaacaacggaaagttcaatcagattagtagatatcaataccgtgtaagaaacccatgggttcttttccgcttgatggtactgggctgataagttctttttggaagtagctccaggggttcattagcaacaggatcctttcctaagaagagcaaaaggaataagaaacaaattagaaaccatggagccagtctgattgatgtaaataaccatttcgccctagctcaccagatcacaatcatactcctagaagctaacttactagccattttagtagcattcatgtaacaaataagacaaaacttgagcagcagtacaacaaacaatattatatgccaccacgcagataaacccagattgcaaaatatgagttcttccctatttctcaaaatatatatggccagaatttagatttgaagtaattaaaccacaacatcataagttgagttggttgtattacggttatgtatgctaactttgagttggttggttgatgggtaactgtgaaatgttctgcatatgatgaagaactaggtcccgatcggtgatgtcctcataagcatatctctggttgctattcaagctaagaaattgcatccaactattcatgagattgaaaatagcatatactgtattacaattattgcatgattccatgcataatatggtgatcattaagtaaaatctgaaggtaattcgccaaaccacaatatgaccaatatcactatttgaaactgcaagtcatcttttattattttcataaagctgttggtcaagacctggtccatgttatagattaacaataaaaagagaacaacagacagtagtacattctatgattcacatgtgcaaaacataacaaaattgcatatcgatgacaactccttcacaattgcatgatatacaacaaaaagggaaacaatagacatcttctcaaatcataataactccaagcaataaaatagttgccaataccaaatgctacaaagaattaggctgcccacgcaccaaatcagccaaaccaagggacattaactaaagtagaattcctaaaccactctcacagcattgagcaaatgaaccaaatttcataaacattcacactggatcgagcgcacgaagcatgatatgaacatattatcccaattcattcgtgcacactccgcaaggcctcaaccatagtacattctatgattcacatgtacaaaacagaacacatgtggaccagatcgaacaatcacacaacttatcatatcaatgacaacttcttcccaattgcatgatataaaacaaaaggggaagcagtagacatcttctcagcttataataattccaatcaataaaacagttgccaagacctaatgccacagttaagcagtaaaaggactgcagagaattaggctgcccacacaccaaatcaaccaagggacattaaccaatgtaaaattcctaaaccactctcacagcatcgagcaaatgaaccaaatttcccaaacattctcaccggatcaggcgcacgaaccatgccattaacatattatcccaattcattcctgcaagctcctccaagcctcaaccatagctaataatctaagcacaccaacacgactgaaaccaaacagagcaagcatttctgtcgaaatcagataccggcttcaactcattatgtaatgtcctgcactatatgcatgaaatggcatggtaacgattctttccctccttatacatcccccgttcaccattgatccaacaaaaaggataaagctaacgcacgatccgaatactcaaacaatgcagcggccatcctaacaagggaggagaggaccgtaccgtcttcgatgatgaaccggagcgaggggaggccgcaggggaaggagatctctcctgggagcgagctcagcctcgccaccgcctgcgcctcgtaggcctccaccgtcgtctccggccgcggctgcggcggcggcggcggggggacgagcggctggatcctggagagcagcgacggcggaggcagccccgcgcgaaggggagacggggacgcgaggaggcggccgaggagggaggagcccgcccgcgctagggttttcgccgacgacattgccgaggacctgagaaaccctagctttccgccccactttctgctcgagctaatggtgaactggtctcgggccaaatgggcctaattgactgtgtggagtggagcccactttagctagctaggcccaaataagaaaacaagcccagccaatagcagtggcctaactgtgtgacttttttttttctaaagaaaacggtaaatttatcgggatgacattagtactccctccggtgccaaataatagtcgctttagattaagaaacacagtaaaaaaaactaagaaaataaaatagtcttttttcttaaaaaacatagtcgctcacagcgtgcgggtacaacctgtccttaagcactgaaaggacctttatatcgcctagaggggggtgaatagacgtttataaaaattatcacaacttcatagcatattggaatgatgagaattttatatttaaatcggaacttccggtatgtgattcgaagttccgatctcaacagaaaagttaggcggataacggaataaaacactagctatgaacttgtacctcaaacaaacaaaatgtgtatgaatcaaaatgtgacaaataaggtatctaagtaagatataaggtcaccaactaaatcaattaagcatgcaagtacatcgggtaaaaataagctcaagcacaatatgagagaatgcaagaatgtgcaaaccaagagaagagacacgtgatttatttcccgaagttttccgttgaggagctacaagggccgggtctatttcaaccatttcctcacgaggtagcacaaatgtactccttggtttcactcttgattttttctcttgcggaggcgaaattgaagccttcacaaactttccgtagcacaccacaaccttggatgctcaccggcgatgcctaaccgtctaggagaccttagtccccaaaagtaacaaacacaatcgaagatttgcttgctatgaactcgagtgctcaaagtatagagtgaagctcactagctctcaacttctcaatctctcaatccaactctctccccttctcaaattcctcttacaaagaggcaccacaaaggtaggaaatgtggatgtctatttggctttggatgtgtctaatactccccaagaacaacagccactcaagggaggggtggaggagtttatataccgagcctctcaaaaactagccattggaggcaaagactggaattttcggaacttccgaaaatttacagaagctaaactcggtttcgcagccattttcggaacttccgataatttttcggaatttccgaaaagcacaaagtaaaataaccataactttttgctcgggagtcccattttgatgatcttagactctatggaaagctcactcagaggactacccaactcaaccaaaaacaagatctaaaatcacttaaaggataggttaaagtttagatttctctcaaggtagcactatgataggtcactttgatcatcgagacatacacaaacacatcaacgttgcatccctcttgatagtacgggattcctatactcaaatttaaatagtaggagaattgtactaatggaaatgctttctttccatcttcctttcattgttttaagggacgccaacgccaaaaccgtttcaccatatattcttcaaatgattgatgtggttacttgtagcttcaaatggtctcgcacggtccatcatgacaaagccgtcactcgcccttcaccaccggattcagttcttcggcgccaagccccttgcttgcccttcaccgcgcatggttcatcacgaccaagcattgcttgtccttccccgtcttgccatagtagccactttatatcccacatcttcaatatctccattttgtcattcttggtattattaggtgtaatgataccatttgagtatcaacacctttgtaatccttgggaactatttctctcattcaactcaataaaattattagtctcaatgattcggttgtcaacttccacatattgaccaaccgatcgcatatataaaatgagatgaataagtgatgagtatttgatgagtattaatcaacaccacaagtgtgatatactcaaatataaagatctcaattaaatgaaagtgaataacttggatcaagtgcatgcataactaaggtatagaatttgctccccctaaatgtatgcatacggaatgattgtgtgaagcaagagtatgcataaatagagatgaaatattgggatcttatcctataaaaaaatagaaggcgtttatcgaatatagatattagaataaaagcataccttcatcatctccacgtcctcaacgtaaataaactaaacaagcgataaaactcaaacaaaacattagtctcacatgcatatgtcaaccacatgaaaatgttatatatgaatatatcaatatgtgcatggagagaaagagtgatacatatagctcgatctccatgcatttaatccttgtgatttggatccaccatcaatgaacgtttatatctcaactcatatgaagtttgggaatcagctctcacaaatttcactttcatatccacatgagactaagcaaagaaatgcttataaaaacattagtctcatataattggatttgtcattaatcaccaaaaccaaattaatggtacttaagctttctagcaccttcgaaagactgggccaacatatcttgagattgataaagccaccaggacgtcttgttgtcgatgagaatcaatgaaagaataagcatggctctatttacttattctgcattgaaaaaaattgaaagagtcggataagtactcccccgtcccaataacaaagttcttttaatgttctaatataatttaaatattatttgataaaatagtgttattggattgacatttcaaattattttcctgtggttatgattttattgctataaagataataagtatatgagaaatttaaaatcaaatattaattttagaaaccgtaaccccaccttaaagatggaaaggatcctaaaaatcgtaaaataacctctgtttagcgaagagttagatgtctgaaacgacttatatttggtataggatgaaataaagtacgtgtagcgaccacttatcagaaaaatactattaaaaaacctatgggtttgagcccataaaggcaccgaaacttttcatatatgaaagaatgttatataaggaggagaggggcgttcatactgtacatttggtgctacaggaatgaatgagaagagagtctcactccatgtctccacttttataaatattatgcaacccatctgtactacggatgtgctccatccgtttaacaatgtaagactttctagcactgcccacatacatatagatgctaatgaatctaaacacatacatgaagtcttacattgtaaaacagaggaagtaatacaggggttgcgtaataaatacttcgtcaacggtaattttcgtgctagtgacatgctaggtcagcgctagaatatataaatcaattcatcgatgaacaaagcataaaaattagtactctacaaattaacgagagttgtgcatggtgaaaatagcatattccagttgctacgagggaatcaaattaacgttaatccgatataggttttccggattaataatcggtctaaatgcaacacaaaagagagaagaaatcacggagctaagctaagattatccactcgtgcccgtacgcgctcctcgtatacgcatcctactatacccaaattgaaccttcgctaattacgtgcagctaccgaacaaccatgacgattacagcttgtctgcttcaagtaatcaactcgcatttacttctgagatacagattgaatttgaaaaatatgccacatttttagtgacacatcgacgctgttcttccatttgttcgatcgatccatccatactgattaaattagtatcaggaaattgatcactgtagactaggaagcaaaagatgtcagcatcaatccggggtgcttagattcagggctgtaaagttttagcgaatcacatcgcgtactatatagggtgtcgtatgggttgtgcgggcactaataaaaaaaaactaattacagaatataaaccacgagacaaatttattaagtctaattaatctgttattagcaaatatttactgtaacaccacattgtcaaatcatgtagcaattaggcttaaaagattcgtctcgcaaattagtcgcaatttgtataattagttaagtttttagcatatatttattactttatgcatgtgttcaaatgtccgatgtgatagggtgtaaaatttttgtgtgggactaaacagggcctccaattctcgatgacacacatgccatcgatggctcgctaaatttctgattttgattttgatgcccgcagcaagaaccgacataaacgtgttcatcctccgattggccgcgagagacgagcaatgatgatggcagcgggagagcttcatcatcttcttcctcttcctcgtgttcgttaaatccattggaattgatgtttttgcaggtcttaatctctcgctactggctaattaaaagcgtcgtgagctgtctgccggctcctccttctctcatcccctcatctgctcctgcttaattatctcgatttaaggcgccggccgttcctatcgctcttaattttcagatgtttctgtcaatcaggaatagtcttttttttttgttttctgataataggggagatctttggagcacgagttgtttggctatgaaatctgcagcaaaaatgtacatttttcctgtcattttcagtgtttttagaggtgctgtttctgaataacaaaccagaattccatcaaactgcgcagacaaattcatatagcggtgtatgtttctgaaaatgggggcaataatttgtccgggtttatcatttctggcatctgaatgatccaaggttgtatctgaacatgaatttttttcatgaagtgacaggataagataatttagtcacatcaaactctcaagatacacgtgaggtatatccgtatatgtgaagactggttcaattgtctgtgctgctgcaagaagcaaaagaaagtgtacaagataggtcaaggggactccttgtgtaacacttcagattcaactaacatattttttactaaaatacttaagatataatctgcatggcatgtgttcacctttctttggtgcaacaacctctctctgataaacatgattagttgtgctggttgagtcaaaacacaggatgacatatctacaacaatatcagaaattaaacagaaaccaattagttttggtctcatgttgtcgagtcaataaagaaacgaaatgttcagctctgcaagttattagccagggaaaaatatcaagaaattagaggctaaatggttgctggttgaggccttgagggtaacctgttgactagcttaaattgtagcaacaactaaacagctccataaaaggaggagcactttttttcctctgcatatctcctctcttgtcttcttctcttctctcatctgctctcatcatctccattgcaacttctctctccatttgctgctcatatcaacttatcaaagggaggtaggtaagatatgcatatgccccacatgctcacatgcttgtgtttcttgtcttgtttcttttttacttttgtttttgttgtgttaccctgaaagtttagtggaatgaatgagtttttagctgggtcggttgaatgatgagtttgttagggtgttgtttgccatgagttaagggcatatgtgttgttcttggtcacctgattagattagaccatgttttttcttcatttgcaatagtttcggcacatttggttgggattcctccctcaaaatttcagtaactaggaagaaattggcctgagttatgaatcagtagaaaccatgttgcaaaaccatgtgtggtccatttttctctctctctctcttagtccaaacaacacgtgaactagtatgaattgaagaaatttctgggttttgtgtagtttttcagatgaaggagcttggcagtgctgaagttagcatgaactgcattacatggctgttctgaatatgatccaggcagttctaagaaataaagaaattaatcttaggcaataaaattgataactagatttgatagatggtgcgataggtcttggcgattgcaacaacaatatatcaagagtcaatacaaatatacaatcatctctttgattttgtgaatctgattctggtggattgcttacattttctccctttctacatgaactgttgtagtgcaagaggaagaacaaaacaagatgtttttccagagaaagaattcaaagaaagtgaaggactccaatggatcgtcgtcgaagaaggacaaagatagccgcgggaagaacattttcgacagtgccaagggaggacttggtgcccttacaggaactctccagacagcaaagaatggttagccattccattcatttttagcaacaaaaaaactactttacaggaatgctatttatgttgaaacaagcctgttcgtccttttgagttcaagtattagccatgataggaagtatctgacattaatagcatgtaagagttttgacagcaataaggaaatacgaatgatttgggtttgaacttcgaatgcttgaccgtcgaattatgatttgtgcatgttggtgtattaacagatgcctggatagtacgattgcttgattaccaactcaatacgctgatattttgttggcacacgtcctgagacagacatgcaaatgcccttaaaaagtgtcaaacacaggaaaatagaacagctaatattactattttttatagtgggtaatatgctacacacctacacaagaaaaattctgatactcacatgaacatgtaataattaatcaaagtagagagaatgcactacttaatcagagatgaagttttttttctttttctgtttcagaattgaaatgaaaaggagttcgtgccttgcatatttcttcacattagctgttcaaagtcctaatggacagcagatcatatgttgtactttcaatattgtcatgagtccctgacctttgaaatcgatcggtagatgccggagagaaggctgaaaaccttcaagatgatgtgaagacaaccatcggagcaatcttgcgcagaggatctggtgttcttgagaaagccaaagagattggaggccattcagaggccagccagtccaaggaactaggtaaattacagcactacacccaattcagagtgacttcttctcaatgaaattcttcccattatctataataaaaaaattaaagtgacttcagagtcctgcatcttacaaaattgtattcgagaggtgttctagattgatttcttttctttgttttgcatggagaaatagaaaaagaatgagttgttggcgtggttctaactttcaacttccagttggaccctgcacaataattcataaaagttagagtaaatttcacttcgggccaccttttgttacctatgtttcactttggaccaccctttaaacaatattttcactttggactgggtaaacttacctttatttcactttggaccacccaactctcttctcaagcatatgaatgatcttgattacgccgtctcctactcgtcaatgaactgccacagctatatgtaagactatttcttcgacatattacaagttggatgtagatggataaaagagtgagggtggtccaatgtgaaacaaaggtaaaaatacccggtccaaagtgaaaacattggtcctaaggtggtccaaagcgaaacatcggtaataaaaggtggcccaaagtaaaattaactctaaaagttaattacagactgaaaccaatttctaagttcaacaaaaaaataatacattgggtacttgaaagtacttggcactgaaaagattagctcccaaaaaaaaataattctacagtaagatttacactgtaccgtaaaatataaagtggaaaaatgacagattgatgcttttgttctacaaattaggatgtggtagtcccctaaaaaaattgaaacgtgataaataccactagatcatggatggagctacctaatctttgcatcaacatacaacttcccttattaggtgagatatccttttcagatatgtatgcccccttggtaggaaatccgcaaaccatgtaattagccaaaaaaaaagaagaaggagaagacataacagatggttcttttagaaggtagtagttccactgatcatttgattcagatcatgagaatcagtaggtaacacattttcaatagaaaatgactgaaaagttttggttcaaatagataaaccacgggaaacaccaaaggaacacaggctggttgttctccaatgataccatgatgaattttgcagcaaaacccagacgcttaaatctgagaaaatgcagaggttaacatggaaaatgactaacaaccaaaattatgagaaaaattgactaagttctaataatcacatgtaggattactatttggagtgtccagagaccaaattatggtttgcatttgagtattccatagcttgcaagaacttcatttttgcaggattgcagttccctagcttcagaagaataggtcacctagcctataggattacttagctttacttcaaagtaaaagctacttttgtgcacaatgattatctgggatgttgggcatgtgtggttgaggaagtagtacctgataccattttccagctttgcttttgtccataaagagagctgttcatacaaaagaatcacaacaaattcactacacatctcatacccaaaagatcattgctagctaaatacaggaaatatatttttattttaaattcctaagagacaattacagctcaagcaacatgttcttgtgtccttggttggcctccatgtgacagatgattaggttgaccttagtacaaccaaaccctcaactcagctcaactattccaatttccaaccaagaaaccagaaaacaaaatcctaaatagcacaggatccaactattattcctcatgctcttctcttaggttctcttaggatcaagtaaaacaaataaagattcagagaaaataaaataataacaataaaaaaatcatcaccctttatggtatttgattgacccagttggagcaatgagccaatgacactctgtcaaaactacatcgtgcaagccacactgcaaaatcatcctcgaccaaccacaatcaatgcctgcaatttgccggtgtcaatttagctgtcactctccagcaactgccctaccatgtatgatgctcctgtattctgtctgtatatatatatcatacagcaccattagccttttttaatccagatcaaggggctccattagtgcacctatacagagacccgaaaccaacagctcagaatttctcagtcttctcgttcacattgaaagcttgaagctttcagtcttctcttctgcagctctgcttagcttcccctgattatcccaaagcttcagttccatccaatcagcagctttgaactggtaaatgactgtctttctctttgcttcgattgatccaagacgtaagatgagatatttttgttcttgcaagctttgttttcctttttcttttacttcgctttgactgcatgattgtaaggggattggactctcctgcttatatttgggaagcatagagtgctttcctttcaattttatttgtgactgggtggttctcaccctggtttgtgttgattaatgatgattgcttgattggggttcgctgctacagtaaatcgggttttgctagaggatttggaagaacataggacgagtgtgattcttgatcactccactttgttgttgattatagttcttgtctgaatttcttgtcatataagttctgcaggaattttgttctatccagtcacttcttaattcagttcttgtttacctccttactatccatgaattctcatacccagttagaatttatatatgttgtttctgaatttatatatgcaaacattgtgctttgcagtttcttgatagcataacacgaggccaatcgatacgccatgttttctatgctcctgaaaattgcaatcagaaacaagcgtcatttgtatcagtagtaacatgcttattgtcatcttagcagatgcaattgacaaacctgaaggatcttttgtgatgttcctgacattaaaatgctaaggataggcttttctgttactcttctgactacatagcattccctgataagaactcttgttgaattttcacagagcaaggaagtgaagaacaaggaaagaaagatatggaagccttaaccaaagtcatggacaaggtcaaggaagtgaagagtaacccagaagtggtggagaagctggacaaggtcaaggaagacatcagcagccttgctcatgctttacatctgggaaaacatggtaaatctttcttttgagatgtcttatttcctaggataggataatcatatttctgacaactatatggttgcatgataagtaggcatttcattatttacgcgtattcccgaaaaaggaagcacatctcattgtcacaaatagaactatagaagcacttgcattgtgtatagtccgaacatccaaaacctgaatattaacttttcttacatcttttcccataattttacacatgatcaaaagataaggaacatgaatctgaggagaaggcaaaggaaggtgagactgcgaaaagggccgacgagggcgcctctgccagcaagtctgaagattcaggtgtggtagtacaagctgtggaagagattcaggccgttgtcacagctgtgcagcagcagctgcacacagaaggagctgcagctgaaactcccaatgaggctgctgctgctgaaacttcagcagaaggagagaagcctgaagaatcaaagagagatgtagagaaggatgatccgtcgaagcggctcgacttcaagggcttctttgccatgatatttgagaggtgctgcaaccctgggaacaagaagaaagattaagcttggaagaaaatgatgtggattttttttgtttttttgtttttgtgtgtgtgttcttggagactgaagaatgatgtgcatgggattgtgggatggtgtacagtttgcagtttgtgtgttttcttcagagttaattgtctgcttttggtgttttatccttttatgtgttgatggatgtatgtcaaagagtactttgtgaaattcttgttagccttgtgagcttgatcttacttatgtgaatgaaagaatttatttatttattttaaaaaagggcttcctgtgcttagaacaaaaatgcaattcctttggttagaatgatggtctgaattgaagctgtggattaacaaaacactgaaccatttccttatttattactcctctaaatgatgtgtagattgtgtgattgaatttcagtggcaactagtttacgccctgttccttttttacattatcatgggcgcacttcccaggtttcatttgtaacctcaaatattatcacaaaatcagataaatctatcatccattcatctattcagacaagaactggaagtgccaaagagaaaatcaaccaaatgaagctccagaggctgattaaatttaagagccacatggtgtttaccctttcatatttcatgatctctgcttccaaaatattacttacaaatagttgatgtattaagtagaaaatactgaaaagggatctctaattatggttaatactagtatatgtacaacccatgcagggtactctcagttgcaatatttgatcaaattgtataatacaggtagcacattc

SEQ ID NO: 23795 - DNA, 1013 bp, Oryza sativa
attcctgcagcccccttacagtggaacagtaaggagtcaagggtatactaacaaagtggaaagttctacctgtcaatagtagcttccaagttttaaatgtgaacagctctggaactgttcttagaatcagagagcaattatagtgttttgaacactaaggaagtaaggatttctgatcagatactcagacctcaaacaaaagggcttcaaattgaggttatgtacgttactgagtttctggaatgttatccaagcaaacagtactacgaaaagaaacggtcatcgggttgaagaattaagcaccttatttcttgtttgcagagcaaattgataatttggggattctctgaatcgctgggattaaggaagctgaagttggagcacaaccattcaaacattagcattaatggcacactaaataatcaaaataaaaaaaatgatcttcaaatagaattcaaatgaatgcatactcattaaactcggttttattaaggaaaccatggccatctgcatccgaagcattgaaatgctcctctttccaccatgggaaccccagcgaattaacctctcctgcaaatcattaattaaaacacttactccaaattgtctcatggattcgcttccagccttattgaactcgttttgaactcctggacagataaaaaaaccaaaacaaaaattgccacattaccactcgattcgttgtgctgagcccggaagtccccgtaggagacaaccccgtcgccattcttgtcgtagagctccatctcccgagcggagcggtggagctggtcggctctggactgctcgaggttccacctggtgagctcgtcgagggaggcgaagccgtcgcgcggggcgaggtcgatcttggggaagagcgcgcggatgcggtcgccgaggttgaaccgctcgtcgtcgttgatgaagtcctcgtcctccctgaggaactcctcccattccctcatgtgctcgtccgcctcccctccgccgccgtcgccgtgcaggatgcg

SEQ ID NO: 23796 - DNA, 8677 bp, Oryza sativa
ccgtgtatttagagcttgtcttaacaaattacaattggagatagacattctcaaccagataatatcatatccctccaggttgctaaataagatttgcaaataggagattagatgacaaccaacaaagctgctgctatagtttcatggttgctgctcagtgctcacacacatgacagctgcattttaatacaaggtagaacttgccactttgcaagtaatcctgaattcctgatgtatgacacctaacagaattaagggtggtaaagggcccaacattttagcctagaaaattgggctgtgaaaggacccatgggccaagcccattaccacccgtaaacataatgctcactctgttccatattattagtcattttgggtttgttctaagtaaaacttcttcaagtttaatcaagcttatagaaaaatgcagcaacattttcagcacaaaacaaatatacttaaaagtatattcgatggtggatttaatgaaactagtttggtgttgtagatgttatgcttttctataaacttggtcaaacttgaagaaattgacttaggacaaactcaaaacgtcttataatatgaaaaggagggaataaaaaactgaaggaactaaaatttaacatgatcatgtttatgtagatgatataacacttcaaaatgaagtggttaatttggttcattgaacaagtgaatgctggcatcaaggcctttaatattattgttaataataataacactcgatccaagtggagagacgttccgaaagcattgctttaaggtcaagaaaaggcccagaaagccagctatcgctttagtgaatagtgacctgccacgaccatggggcatacacagcaaggggcctttctttgcgtgatcccaggtttgagccctggttggcagcctcatacctggaggtcttaccattgtgctatgagcatgttctcctcaaggccttcaataaagctatttatcgttggtcagggctcatgtaaatccttatagcatttattcttttcttgagttgtcccatatcataaaattggataatctcttgtgtgtctgttagaatgaactaatcaatcaattattactaacagaataaccctgctcacaaataaagctcaactcttgctccgcatcatagtactacaatggccttttgattaacaagtgaacaaagcagggaaatagtgggtttgggtgggataagctggtagggtctattcctagttggttagtcctaggatgggcctaggacaagattaagttgacctggactgcacttggttcaacaggtcaagttagttttggcttaggtcattgctcagatggacttgctttggttcctggctgtgtgattaaacatttatctctagatcgttacctagtggtagtaaatacacatttgtaatttaatcctttctagaaagcaattgatcttatacttttgtaatatcatattcttttaagcaaccatgttagatattggtacccattattcttggccttgaagtgttagcaaagttaagtctaatgtttttgtagctttaaaatctgcttcctccttcatatttcatttgaagaaaaaaatcatggcacgttaaccatattttcactatcttaaattcattgcaatgaacatgctaggttctagtaaactattaattagagaatctattcctcttcaagccagggctactccaagtaacactcctgggcaaggcatgttgctatggacttccaaacgcacataaatatattttgccttttctgtaaagttggcaatattatatcactatatgtttcgtggaaggaacagattcctatcattatttccttatttgtgtggattgtaggataacaccgcagttccttgagctgacattttaaattccttacatatcgtgccatacccagacagagagacaaggatggtgatggaaagctaaactttgaagaatattttcatgggctacatgaccatatacatggttatgattacgagaacgcagatatttcccatattgggaacaatacagtagctaaggagcggttttccaaacttgacaaagacagtgatgggtatggaagtggagctttaattaatgacttcctctgatataattatttactgaagtattttcattttatatttttaagataaactctttgcctatgtaggtttatttcagagcacgaactagaacctgttcttgataagctccatctttcagaacgttattatgctagacaacaagctgcccatgctatttcagaggtttgattctcattgttttcctggaatttctacattttttctattgttctttgatatcttgaaatctattttccctttgtcatgcatgtctacagctttctatagttttcctgaacatagcagtagatgaacttttagtctttaataggtttgacatgtcctgatttgatattgtcaaaacctaatacaggctgtaactatctaatctcagtatagtgggacataagaataccctattaaataggtgtataagttgcccgtccaccgcaaatcatttgcttttcattttatagtatcatccagaattcaataaatctagttttttatgcatagaaaaaatcacagataatctgagatttttttttattttgagccttcttatttaaaatttcaaaaacaacctattttgaaaaatacaccttttgtcacacgtggagggcaaatgttgctactccatgaatagtggagatatataaggtactgtaccgactcttttcatgccatatcaaccctgatttaccacatcagtatgactctatgagcggcatgaccaaatctttgccacaccaaggtttttaacccatgcttcagcattgtgctgccacactaatgagaatgaagaagctaaaggtttagatatgtaaataatgtttcggtagagttcaattgtcaaatatattaaaaagttaaaaaaaaactcgataatctgtcgtggttcctgtttgcacaaggttgtccaaaagtttgcctgtgaaaaatctcaatgtattatgtgctttcctctgatgcatgatgtgtctcttgttccccgaggatgacatgttcaattggctaatccaaaaattgcaggctgacaaagatcatgatggaagactaactttggatgagatgattgagaacccgtatgcattttatggcagcgtcttccttagcgacgacgaagactattttcatgatgaattccgctgaggtgtctgcaggtgacttgcatgcatctgatgcacaccataccgaaaattgttttgcagctagtattcattcaaatattctgtccacagattgttggtgttgcaagtatggtttgcggatcgatccaagatgctttcaccatcagactgaatgatctaggagctgctaaccacacaaaaagagaacttcagctgtttggtaccctagagttctttctatcaggtactcaggtggagcaccaagctggctaatgccagcgatattaggttacatacatgccaacttgcctgcctttatttagggtgagccgctaacctgacctgacatatgttgtgtattatctcatcagttttgtaaaatgcaatggatggagtctaggagagcaatcatagtagaatggacatgaccagaccagtgagctaattgtgcctttcttctttctttttttctgaagtgtgagctaaattatgccttccttgttgaaacataatgactggattgctgatggcgctccgaccgacagttttcctcggcgcatgagtgcgtcgtggacgtggaatgatggaattattgtagttgcgtcgatcacatggaaatgcattattcgggacagtctacccaacgtgtcgtgtcatgtcatgtccatcgtgtcgtgccatgtagtactaaggtcctgatcgatggcatatatgacatgctccgattccaggtgttcttgctcgaagtgttgggttcttttttgcataaatcgaattagagcattcctctggagacaccaaactaacacaagggattaagttaaagcaacctttgtattattaccattattgggttgcttgtgaaagctttaaactcagttgaaaggcacgtactcgtgcgtgtttgtgttggtcagtaggtgtggtgtgtgtagatgcgttttctatgtagcttgtagctgtgaattcttttggagtacttatatgacatccgacatttttttgtcgaaaaactttaaatgcatagttagaatgtaattgcatacttataatttgtatgtaactactataagatcaacaaaaacctggttgctggctaacgcaattttcgttcacccaagaggttgcgggctctcactctccagccggcatagcgatgtatagtggcggacccaggataaaaatatagctatggcgaagacaaacgagttgattcaaagcattttggccctatttagatcccacaccaaaatttttcaccctgtcacatcgaacgtttgaacacctgcacgatgtattaaatatagactaaaaaaataactaattgcacagattgcgtctaatttgcgagatgaatcttttaagcctaattgctccatgatttaacaatgtggtgctacggtaaatatttgctaatgacggattaattaggcttaataaattcgtctcgtggtttactgatggattctgtaattagtttttttattaatacctgagcatcccatgcgacaccctatataacacctgatatgacacgccaaaagtttacaccccggaatctgaacacccccttcattccaatcaaagaaaaaacgtaaaaatgcccacattgcagtcacgaaatacctcattgaagcgatggttcatctgggaagctgggggtgggggtattcgcgaagaaggttagctatcgcatgcgccacagcatgccaaagtggtaggtccgctcctggcgatgataaaaaaacacctctgggaagttgggggtgggggtattcgcgaagaaggttagctatggcatgcgccacagcatgtcatagtggtagttccacccatggcgatgtaaaaagaattgttcattcccttgcatgaatctccacgcgatctaacagtccacaaactgaatgttttgggaaaaaaatgtcaacagttttttagcacatcttctttaaaattaaattacactttgccatattaaagtttcacttcaaaccaccttaaaagtatctattttactttggactaggtattttcaacaaaaagttaaactttaaaccgatgaccaatatatcaatgagactaaccatctctggtgtccgtgtctcacttatatatgggccacttggacataaggtacaaagtgcaacactggcaacaatacgtagctactagtcccaagtgaaaaaatatttatgtagctagtccaaagtgaaagaaaaaacatttcaagagtggtacttcctccgtttcacaatgtaagtcattctagcattttccacattcatattaatgttaatgaatctagacatatacgtttcacaatgtaagtcattctatcattatccacattcatattgatgtaaatatgtctagattcattaacatcaatatgaatgtggaaaatgctagaatgacttacattgtaaaatggagggaggaaaaagtaaaactttagcaagaatatatatcccctaaatcataatttactctcttttcttacatcattgtgcactatttcttatgtattttggtatcagttttatgttttggaactaattactacccccgtttcaggttataagactttctagcactgtccatattcatatagatgttaatgaatctaggcacacatacatatatgtctagattcattaacatatatatgaatgtggataatgttagaaggtcttataatataaaacggaggaagtagttattaagtatatacattaaaggtttgttgtttgacaatgaaagtttcatcggatcttatctaaagtgtcaaatatttacgacctgagggaaaagagagagtaaggatctactctctccatttcacaatgtaagactttctagcattgcccacgttaataaagatatgaatgaatctaaatatttatatgaatatgggtaatgctagaaagtcttacattttgaaacggaggaagtagctagtttaattcgtttcgatcgagcttcaacattcgtaggggagagacgtacacacgaccggttccggcgatgacgacgctggcgtgcacatggagcgaagggcaaggcgtacgtacgtacgtgcgagaccggaccatacatatgcccacatgtgatgctagtcttaccccagctggctctcaccatgcagagctgctgccctgcagcttgcttgcttgctcttctctatcatcaaacagacacttggccaagtgtgaggtcaagtgtgtgtgcatgcagcactgtcaatgctgacacatagccgtacgtattttagtggctttctgaaggcattttactagtatatccgacttttagggtcagctgatactattgttcatgtatagtgtcttcaacaggactcaaccaattaatatcccttctcttcttttcgagagaattaatatgcccccctcccaacatacttcctccgtttcacaatgtaattcattttagtatttctcacatttatattgatgttaatgaatctataccacatttatattatgtctatatgtctaaatgcacggtgtaattttggctcagctttgtggcccagctgttgatgcacggggtaatcaatataaatgtggtatagattcattaacatcaatataaatgtgggaaatgctaaaatgaactacatcgtgaaacggagggagtacctctctttctctctcgctctattcacaagtgtattataaaataaagtgtaaacctagagtagctagtactcttttaattgtgtcgtgtaccacttagatccataatcttgtgaatcatatatttggagccgtaatcttgacttaatatatcatggtacatagggctaaaaactaaagcacgactgactggctacgacccctgacatggcaatccaccgtggcttcacatttgcaataagtcacctccatgctccctcgtgtggctatcaaactgaagaaaaggaaatgatcctatatttataatatctgctaacctaatgttttgatcgtatacatgagaatacaatatacaacatacttttcataatctagtcacggtggacgaatttattcatcatctgcctcgcataacatattacagcaggtgttcatttagcctaaaggtccctctgcgttagcaacatacgggtgcatcttaggatatgcttgtagacaaatatgtaagacacctccacaaataattttctgtagcgtgcactccaaatttaagaaataaaaaagttgtaataaagaaaacgatcgacattaattcatctttcaatgatatgtgtaactacatacgttaggattgagatcaaatacagttccactagggaccgcaagataacgattgcacaagatctaatcttggctatctatcttttctatggagggtttagatttaaagctacagtaaaaaccttttttttttcaacgatatctcgaatgatttaatcattggatttaaactggacatcctagtgtgattgcttaacttgcagtcgcactggctagagctgggactgcaggtgaaccggccggatcccatgcattgggttggggttggtcccaaagtcccaagtcccaaccgtccggcaaatgcatgcatgtacaacagtgcaactagccaagcacagtacgtcccacgtgtgcggcagcatgcatgcatatgcttatgcatgtgtgatcaataatgttttccattggccctggagctcagtacgatgtatacacgcgtatttatctcatgtcacagctgaagaatgcatctatactctccggttcgtaacttctttaattaatcttggatatgtaaccgaaatccgaatcaagaaataaagatgcatatctttactcccggttatctctaaagatgatagcgccacgtggctgacgatgtcatctttagtctttttttattgttttttatatattgatttctaaccaaactcaacaataaaatcatcaacattcacataaacatcacaaaattgtccacatccacattcataattcatatcacaaatttacatattaaaagacatcataaatcaacaaattcatagataaatcaacaaaatctaacaactaaatcaaccggggctggctcctgcacaggccgccgcccgctgcacgtaggcctgagcaggctgccccctcctccaggctgctgctgctgcaagaaaaagaaaaggagaggataagagagaggaaagagagagtcgagagaggagaaaagagaggaggaagttaaaaaatgaggatgaaatgtttgtgatccagaaggagaggataaatgcgagggattatatatgaagcattgaattttaatcctggttgataataccaatactaaccagggctaaagataataaggggctggacgttttttgaacctgtaggactaaaaatgatctttagtcctgattgataacactaaccgggactaaagattataaaagtgacgttgg

SEQ ID NO: 23797 - DNA, 7769 bp, Oryza sativa
  unsure (1)..(7769): unsure at all n locations
actccatctgtgtgaagcatgcagcgctgtcagctatagctagtagtagtaccatactaccattatgttttacgttcgtttgcttgctcgtgcatgcgacttgtgcacaacgtacgtactccactgaactgatcaacacacacctcagccgttctgcgcgcaggactactatatactgcgtgcatgtcagaggagcgcgttgtccagatcacatgcaagcgaaagtcgtcctccttctgcccccctcctcccggatcaggctcctttaccttcaaatacatttaactttatcacttatatatggacccgatgaaccctgaacctatctgtcagtaacaaaggtatggtgtctgtgaaggaagaggatctcaatcccctcctcccaccacgcatttacctgggtaacatatacgtaatcattatccaacaatctaatatgttatcctcgatcacacttataggctagatatctttatttatatatatgggtttgatcagtggtatatatgttactagctactccctccgtcccaaaatataagcaattttggactctgacatggtctccgaaatgttactttgactaataatatatataaaagtaagatgttttaaataaaaagagttacatattatgatagtttgtttaataataaatctagtaacatgaattttacatgattgattttttttctattaatagtcaaaattaaaaatgttttgactttactatgctaaaaatatttatattttgggatgaaggaaatagttattagtagaataggtgggggtcttttttttttcttgaatcgttaatttgggcatttcatactataattaatagaaaaaaaattatagttttgctacattattcttgctcggacatatagtctttgaaaatgcacagtgaaaaacattcacttccagcaaaatatgtgcgaagtcacctatatatgaatatattacgtatatatatgcaatatgccagtacatttacagcaggaatttggcgggacgaaggatttaccaccagtccggtagtaactgcacaagcatgcgtgcagtacatactgtacatggtctgttgccgacacgcccgggaatatcctggacatgttcctgcagtcaccgcgtgcacgtacgcttgcgtgtgtgtaccatatccccgctgggcggctggctagctctcctcccttcccctccccattccatcccacccccactactgtccctaggccggcgctcctcaccacgtttcttagaaagctaccgtgatatccacggtcactctatcggtatcctctactgtaacaattgtattatatcgggagacagtctgcatcactatgggtagcgcgggtggcggagtggccgactaggtttgtcctcattggtcatcgccatgaaaaatgaggagtcgaggttacacgggatagtgttgacggcagtggatgagtccattgattcggatgggggcggaagtttgatctgtttttaggcggttacaagatggtgtggagagagaaacgtcaaatttggaagtagcgatgacgtatctactagagcccatttttctccttcggtatgctattttcaagattgcgtgtgtgacagatgagctattgggaatgctcttatgtaaacgtagatgcaagccatgctttaagtgcgcatacatgtgtacctcttctatatacactaaagggaattagcattcatgataacgagtcataacccacatttatgatggctattggttactccctccgtctcaaaaaaaaaagcaaaccctgggtttccgtgtccaattttgactgtccgtcttatatgatttttttataattcatatttttattattgttagatgataaaatatgattaatattttatgcgtgacttgtctttttaatttttttcataaatttttcaaataagacggattgtcaaatgttggacacggaaaccagggtttgtctttttttagactgagggagtacataacagatcaatggtcaccgatgagaatacctcattcctatgacaagtcaacacccattaatgatgatagacaattgtgacgagtagtaattagcacacttcacatatgagtgcaccaccctgtcagatattagactgacctcaaacaagttgaagtagtgaatcatcatacatgtagaaaatcaacccaaaacatcttcattatcagcatcaagatgaccaattctatagtagtgatactactacctcagttttcaaatacatataagcttgtttaactttcaaacatactgtttgaccatttatttttattgaaaacactatgtaaatgttatttattttactatgacattattattattaaaggtattttatatacgatatatgttttacatttgtattttttcaataataggaatagtcaaatatatatatatttggaaacagataagggagtagtaattgtccaatttgcagctaattggcacgtgtgcatatatacgcatgatattggtaggatcgctaaatcacatcgctacaaatggggcctctatgcttaattatgggagtagatatagtactggctagctatagtaacagtggttggtaggtagctttgatatgtacgtataggacacacgacagacatttctcatcagtggaaaacagattatagtggggatgttggagaaccttctgcttaattattatgtacccattatgtcccttttcttttgtttaattctggatattttctgtggatatatccttatgttttttttttgttttcttgtgcagatctatatataatgccaaacaaataacaaagggttatatatatcaaacaattaatatatatgagttgagacgagattatggttccaaatggcaaataacatttcaggcttattcgctttgttcccaaattaaccttaccaaattttaacaatgttaatttttggtgttgccaaattttggtaaagttagatatatttagtttgatgcatcctaaaatttaatagcgtttttattagaggaaagttctgcaattgggtaagatcatgtttaggttgtcaccgtactgaaatttgataacaccaaatttttggtatgataggaagtgacaatggtgaatatgctcttcttttttccaaataatatttctcttaacaaccatatcatatatgcttggatatggttgtgacatcctggcccaattaggatgagacatgtgtggcccgtgagagttgtatgtgcatatttagtaccaccttgctactttagaaagggtgaaaccaatttataaggtattttccttccaaccgtatcactcccgggttaaccgttttatatgaaacgaggataaaaatgtaagtggggtggtatgcgtaagtgagccagccctgggctggctacgcggttctggagggagggctgttatgcagttgcacgtatggatatagtgccgggttctggagggagggctgttatgcagttgcacgtatggatatagtgtcggcactgtgtgtacagatgtgcactaagagggggcttgttcctgtaataccccgagttttgaatttctagagggagggctgttacaaacgctattatagccgagttttttatttccctcgcagttgcgtatggatatagtgccgactggagggagggctgttacaaacgctattatagcccgagttttgaatttctagagggagggctgttacaaacgctattatagccgagttttttatttccctcgcagttgcgtatggatatagtgccgactggagggagggctgttacaaacgctattatagccgaccctcgcagttgcgtatggatatagtgccggcactgtatgtacatacgtgcgctaagagggggcttgttcctgtaataccccgagttttgaattagtgtatttcaggaaatattaaaacaaatgcgcaaaagttcaacttttaaaccattgttggaataggcaatgaggaaatgtggatgcgtatagctcgtcgagtagtgcgaagtacactataagtttgcagtaatcagagtccaaacaaagttccgttgattgaatcgtaataccccgagttttgaattagtgtatttcaggaaatattaaaacaaatgcgcaaaagagttttgaattattgtatttcaggaaatattaaaacnagtgtgcaaaagttcaacctttaaaccattgttggaataggcaataaggaaacgtggatgcgtatagctcgttgagtagtacgaagtagactataagtttgcagtaatcagagtccaaacgaagtttcgtcgattgaatcgacgtggaccgtttgatctcctttctagtctctttatatacctacagataaaaaaaagaaaagaaaagttctagtctctttatatacctacatataaaaaaaagaaaataaaatggaaaaaaaaaggagagatcgagagcctctacaaccctagccgccaccgctactgcgcccttgtcgccgctgctattatccctgtcgccgccaccacagccgtggccggccatcgtcatccgtcgccaccggtgatccctttctgtttttttccttcccggtgagctcttgctgctgtcgacctgatctgttcctgctgtgtgctttggtccctgctgctactactaacgttcattgctactgctgctgctactgggtggtatgccactgttgcttctacaacgatcagaggggagaaggttcagagggcagaggaagaaggaggattaaagaagaaaaagagaaagagaagcaaagttggggattttctgggattccacaaattcacctcaaatttgattttctcctctataagggtaactcctcttaatccatggaagttcaattttcacgtgggaatcgattcgattgccggttgggtgtatttagttgttgtttatgggctaaaaatagtattttccaatctggtattaaaccattgtgattcaggttagttgtcctaaataaagtttgtagtcatcgtcgatatctttctaacggtgctggtttcactcgattctgataagaaacaaccaaaaaagtactgctgaccaggtccggaaaccaggacaacaattcattttcctttatatgggacttacataggcttaatctgatttttcacccacatgaaagttgtagagaattttgtttagatgtctaaagtgatatcggttgctactttttgttaggcgctttgtgaaatatgtatataacattgtataggtagtataggtagttttatgtaggtaccgtcccggttgacagataaattttggttttgatctttcatgatgttttgtacatgtatagatagtctcaaggattcctcaatagaggttttacttgtagctttactccacaggtgtggagagatctggtgtggagggggtttcgtcgggttgccgtcgaggttaaaggcaagtgtatgacgaacaaattatgtgtttcttggattgtttgctccacctatttattttcaatatatttctatgttatatgtgattgcatatgttcagattattgttcatgatatttatatttcaggtttatcttatgttcacaatgacgttattcttgtttcaatattctggattctggttctggttaaataactcaatttccatgcttgccatggatgtgcaatttagtttcaatttgcttttttgtttctagtttcaattattcatgttccatgtgagtcatggatatgctatctggttttatattcatgttcctataggtaattgttgatcaagcttactcggctttgccggcaaatgctaggatgtattcacagttgtccaggatgggaactactatttcaattcatgtctgttcgggatgggaactattaattttctttaacatggtgtttgaaaccgtgtttcttttcaaagaaagaaagttttatgttcaggctttattgccaatgatgtgtatatgtgttttctagttccatattgtacttgctaagtatttatgtactcactcttgtgtttatttggttttaagtacacattgagatcagtatgtatgggcggaaagtagcacccttatatacacatctatctacacactatcaaattatattgcttaggtccataatgacacttaaactatatcctggttttgtcttgtaatattcatttggatatctattagtttctttctatggattatatgaatagatagcactgtgggaataatattattattagtttatcttataactgcctatcatggatgtccgtatctataggagagactctgccgaaatttctaataattttaggagttagtagttttgagtgtattttggtgtggcactctgggtacgtggttacctagggtgttacaatggttgccattcttattcccataatcccgtctccattttggtaccctctaaaaacagttcagaataagagtattgttagataaaaaaaagtgaatattagggaagaaattaatatcaaataaatagaagaggtgtggctttgaacccagaccaattagcccatcaccttgtggagctagccggaaaacccctgggtgtttcttgagagtattgttagggatgagttgttaaaagattaattagtataagaaattagtacgtgtagaaacttttccttcttttaaatgggtaccgctagtagctatagcttccatttgatgtacgtagctattttttttttagaaaaaggcaaagcccatctttcattcaaagctataagagttcagaatacaaaagtaacataagataatcggctgggaaacaaccagctaggcgaacataagcatcatggctgctggctcagcccaaaaacaagccagggaaaattaccaaacatctggaaagctccctaccaagactaccaaacccagcaaagcaaatcacgaagtcacggcgctactacacttttcaggcatttgagcttgctatccttctgatgctggcaagtagtaagtcccgcgaggtatccaaagagcttcgagtcttcactagtgctagttttctccgctggagatgaaaagagacagctttgtaaggcaaatgggttgcattagagatcagtttattattaaacacccaatcatttctaatgagccaaatggcccaggcccctgctgcaaaaagagaaagtagaatcctattttcatcgcaactttgcatcttaagcttatcaaggagctcccctcttgttctgggtataccagcccacccaaacgcatctctaaagcaacaccacatgaacttcgaaattgggcaattaaacataaagtgattgacatcctccaactctccacatagtttacaataaggactgcccttccatttcatcttttttagttgggaagccgcttgaattctccctctcaacatgagccaaaagaagatttttattttcaagggtatgggagttctccacaaatcttgcataatgacatctctaacacccccaaaggctagctctctgtatagagattttgttttatagataccatatttggtcaacttccaacacatagtatcattatctgagttcagctgaatctcatccaataaagtatgtaaatcattccattctgtcatctctcttccccctaaattcctccttatgttaattgtccactctcaattaggacacatctggtaaacagtctttttcgtatcggcacaaatgctatagatgatagggaattgagtttttaaaggcacatctccca

SEQ ID NO: 23798 - DNA, 4049 bp, Oryza sativa
cctagctctaattgagtccattttctggtgcacactctcaggcataagatagactcccatcatatacaaagggatactactcacacaggaattaatcaatattgctttcccaccataggataggtgtccacatttccaagtggccaatcttttctctatcttattgggaggtatactaaaatcagcaactgtcaatctatcaatcgcaattggaataccaaggtatgtaatagagttctgtaaatttggtacgtttagccatttccttttaaaaccaaatcatccatgcatgctaaggcacatatctttttgaaacgtatatctgataagtaaaatattagaggcggacttttggacgtcatttaatttcatttctctaatcaattatatttaaggaggatttatttcaaatcgttatctgataattaacatgcatgtgccatgtacgttacttcccacataaatccaaattcatatttgtctcttcaaaaacatatacagtataaattaattcgatttttcttgcgcggcttgtgaataacttctctgaaatggctagctctctccctctcctacatgtgtgacctgttgtacgatatgacaaaacatatttatcacgctttattaattagcgatatatatgccggccgcgcgacgcatccaacagtgcacgagtgtggtacgaattaacgtacgtacgtacatgtagctcgtgtccgtaggcagggcaggcacgtactttcacgccacagagcttacacgtgctccctccgtaaaaaaaataataaaaaaaagacaacccctgggtttcttattttaaaaaattataaaaaaaaattaaaaagacaagtcaagtattaattatattttattatctaacaacaataaaaatactaattataaaaaaattttatataagacggagagtcaaacattggacacgaaaatccagggtttgtctttttttggacggagggagtacgcgttataaattcatcgtggacgttgcgtacttgctagaccaccggtcaaacatcacacctactactccctccgttccaaaatatctataaaagtaagatgtttttattctgatacggtcttcgagatgctactttaaccaacaatatttataaaagtaagatgttttaaataaaaagagttacatattatgatagtttatttaataataaatctagtaacatcaattttacatgattgatctttttttattttttttttgttattaatggtcaaagttaaaaatgtttgacttgtcactatgctaaaatgcttatattttaggacggatggagtagtaactaaaattgtcaaccaaaatgctctgcggaactcaattaataaataagtatttttttttcttttgtctatgaacaggaaaataatgaaagagattataacattttatcatgagagctagacgtataaaattagatatggcaaaaatacaaagtgagtgtagttaattgattagatatgtttcttgttgtgacctgttcaagtcttagaattggcatagtgctcatatttatggttaatcatcatttaaattgtagccaatgtatccttggcaacgagacatttatggtgactttcttaatattaagatatgttggctcagtcacatgtgactttgtcaattttaagatatgctagctcagtgtttcagatatgttataggggtaattagattgcgaatagacaaggccaaatcacgaaatcctattaaaagggcatccactcttaaagagaagaagaccaatagcaaattaatcctccgcctcgcaaatcctattaaaagcatactagcctattaaaggcatactagcgtaatgcttaatattgatgggtacgtatataagatttgaaccctagtagattctcgagaagaggaggctcgaacccagaccgaagacgttttattaatattacttatttataaaaatcattggcaccaagcttttttttttccagaatttaattatcatgtcctcgaagtggtgcggtcagagcaatatatcttaattattggaaaaagttttacctttagggcgggtttagtccccaactttttcttcaaacttttaatttttcatcacattaaaactttccatcatatcgttccaatttcaatgaaagttccaattttagcgttaactaaatacacccttaatctaaggtttggaatgtcaagctagctaggtccaatatattttaatttgctgcagagagcatgcattacgctatatatatgctcgttgtcatgtctttgtcacggcctaacatgcatatacattaattaggacgcctgtgtgaaggtctttgttttcgcgaaacaacagtataagcactgtggataaggaacaatgagttaatatagctcgtgcacgatcgtccctattaattggagaaggttaagtatacatcagttgatcctttttgttttgacgttctgtcgtacgttgacccaattggatatttggatcgatagagctactctatctgggttaataatactcgttttttaacaagagcacggtctatataaaaagtaactttgaccaatattttttattataatatgtataaaagtgttaataaatatatgattttattaaaatattttttaagactaatctatatatgtagtcaccatatttgaaagaaaaatattttaaaaataatttataatcaaatattctaaagtgtgataccatatttgtctaaaacgataagtattatcagctctgagggcggagggagaatatatattagtataaaaattagatctagtatatgcatgatcatccctttgtctttgcatatactagatcgcatctcttgactagtggtaaatttatttcccctgtactttggattatcaaggtactacctccattttaaaatgtaggcaaaatttgatacgagacacccaaaaatcgtgtaattggctgtgagacaccgcaaaatcgtgacgctgtttatggacactacgaaagttgtgaaattggttgtaggacactggaggcaatattttataatttccgagacaaaagaggtcagagaaatttctaaaagacctgattgcccctaggcgccgtagcttgtaaacccaactgggtctagtcgtcgtgtccatctcccccacccgatttccttattcctccccaatccctaaccctagttgatagtggcgacagcgccggcgccgacggcggcagatacgacgctggcaatggcggtgacggcggcgacctcaatggtgcaagcctggtcgaagcagatgcagcaaagctccatgtcgctcacctgtgcccaaatgatcaacacattttgcgaattcacaggagtttgctgttcttctcagacttgacctgtcattttgctgaattgcccatactctgccactgaaccctacatcagcagagcccatggtgtggccatccccacttaagttcatcggtgagcttgaaccagaagctaaggctctcctggaagcagctctgatggaagccaacagggagagggagaagaaaatcctgaatggcacaaagtactccctgccatcccctttgcctggtgatgacagtgccgatgacgatgcatgctcagaggtatttgagtgctgaacaatttcagtgttatcggttggattgggctcccataaacacattgtgtaatttagttttctgtgttgatcatttgggcacaggtgagcgacatggaactctgctgcatctgcttcgaccagacttgcaccattgaggttgtcgtcgtcgcccgccgtcctcaccgccagcgccggcgccgaattcgacgccgccgccaccgtcgactagggttagagattggggaggaatgggaagtcgggtgggggagatggacatgatgctgacttggtctggtctacaagctgcagcgtccaggggcaatatggtcttttagtaatttctctgacctcttttgtctcggaaattaaaaaatattggctctggtgtcctacagccaatttcacaactttcgtagtg

SEQ ID NO: 23799 - DNA, 5968 bp, Oryza sativa
gtgtcctgtagcaaattttgcctaaaatgtatgatgttgttagcttttcacacaatgtttagccattcatcttactaaataatttatataaatatcatttatttcattatgacttattttatcatcaaataaaatataaccttaaacttatacttttacgtatttatactaaatttttaataaaataaatggtcaaacgttatgcgaaagtcaataactttatacattttttgaaacggagtgagcatttttcatcaaagaagactatatatagcttcggcattcatcaccatttaccaaatgaaattgtgtgcacccaagtcagtccaatcttcttatttacttgtaaccattgtctgaccatcaatttttaacatgaccattaacagtttgtaatatgttaatttattattaataaaagttgtatggttgtatttacgggacaacacacattgctaatatggcaccctactttttaagtacacatcaatattcttttcaaaaaaggataacagtcaaagctaaaatataaatagtagccagtgaaaatatttgaaaccatataggagtacttcctccgcactcgtaaagaaagtcgtttagaacaattttgaagtcaaaccttggaaatataaatcatgaataactcttaatttattgagtttgaaaatgtaaaaattatatgaatagatttgtcttgaaaaatactttcataaaaatatacatatatcacttttcaataaatatttttatagaaacaagaagttaaaattatgttttggagaccgtgtcgctgtgctaaacgatttcctttacgagtacggagggagtatgcagctaggtgcatagggaggtcattaggtcaataacaatagattgaattgaactccgggccacctttttattgatatggtttcactttggacccatcttaatccaatatttttaatttgaactagctaactttatctttcttatgatttagagttttagatcaccccatacgatttctctaacaccctaatgacctcaagtggcatatcggctctgacacactggcgaactcccccacccatctgcagcatgcaataccttcgctagaggagaacacaaacatgtctagataacacggtggaggtggtacaaagtgcaacaaatgaaaagatagctggttcaaagtaaaatattggattaagagcggtctaaattgaaacgtattttgataataaaagataggcaaaagtacaatttacacataataatagtatgtgtaacataggagttggtcaatttttatactatgtgaatgatgagcatgtgttaagcttttccattctctgtatttggttgtgttcttctctatacttttctaatctcacctctctcgtttttcacgcgcacactttcgaaactactaaatggtatttaaaaaaatctataaaaaatgtttaaaaaagcatattaatctatcttttcttaaaaaaatagattaaatttcagaaaactataactaaagtgacaaaattatcagtttgctgcaacattagcaacatgtttcagtttgctacaacaatatcatggtaaattatcacaaaactgcaacttttatgttatatgctgctacagttgtcacctatatgtactgtagcagcatataacgtaaaagttacagttttgtgataatccacgttattattgtagcaaactgaaacatgtcgctaatgttgtagcaaactgaaacatgtcgctattgttgtagttttctgaaatttactctaaaaaataatagttaattaatcaggcgctaatgagttgctccgttttacatgcctcagggattagttcccagctgcaagagccgaacgcacagcatacactactagaaaaacaatttttcatggtgttaccctataattttcgctagcggccatacgcaaaaaccgccagcaaaaatataacaaggggtgggggttacggaccgctagcgaaaaccgattttcgttggtgggaatgctaagaggtccaccataaaaaaacaactctattttttgaggcggacttcttaagtgtccgctagaaaatcgcattttcgctggcggtaggtaaagaggaccgctgaaaaaaaaattgaggcgaatatataaacccactgcacctagcccacctaccgcccccacctcagtttattcgcctctcccttctccctcgcggtctctccttctccctctcactcctccaccaccgccggctgccatagccgccaccgcctctccgctatgagctcgaggccgaatccggcagtcgtgatgacgggggtggccagatccaccgccacgtcgacgagggaggctagagccaccgccaccatgacggggaaggtcggatccgccgccgcgacgacgacatgaccgctgctaggccgcgggagggccgtagtgggctccctccctgcacaaggcgacgagatcagcggtgtcgagatccatgtgacggtgctcgatcttgagctctcccccctctctaccggtgagatcgagctgccgccaccgctgtcggctcggatctagccttgttctcgccgaatctggatggggacgacgaccttgacagtggtggtgggttgcggttgcggcggggttcggcaaccgcgacggagtgcagcgatgacctcggcggcggcagcagcgggttgcagttgtggtagcagcggcgacgggtgcggtggccgttgcagagtgcagcgacaaccttcaggcaatgaattttttttttgtattttttgtgatttgtgaatggtctagaatgtttgtgaatgaatctgttgaatggattatgagatttgtgatgaatttgtgatttgtgaatggattagggtggcaaaggattttggatttggggtgggggattttggggtatgggattttggatctggggtgagggattttggatctactggtgtgattttcactagcggttctctttagatagccatcagtgaaaatatattttcgcaagcggctaattcccgcttgtgaaaatactctattttcactggccattgcttgttggcggctacactcactactagaaaaatgatttttcatggcgttggtctatgattttcgctggcagaaaaatgccaaaaccgccagcaaaattgtaacgagggggggtaaggggcaacgaccaccagcgaaaatagatctttgctggcggccgcgttataccagtcgccagcgaagatatgtctattttcgctagcggtcacttatgtgcaccgctagcgaagatggataattttcgctggcgattgtgttatacagaccgatagggataatacaattattttttctggcggccaacttaagcaaccgccagcgaaaggtagatgaaccaccatcgatctattaatatgaccacacggcccaccgccagtccaccacctacccgccccctctctccagctcccctccctcccttctctccctcgcgtctctcctccctctcttctccaccgccgtcggctgctctcctctactctatcctcctcccaccccacagtcggcggcggcgttttcggcgtggcgacgacgacaacgcgaggcaagcgcgcggcggtgacggtaggcgggcgggcgacggcagcgagaggcggcgtggcgagctcaggcgcggcggtggcagcggctctctggtgcgggcgcggcggcgctcgggacggacggcggctcgcggggtggccgggtctgccgccgctgggccgcggggtggccggatccgccgccgcctggccacggggtggccggatccgccgccgtcgaccgtgctcccacggctagggctagatttgattttttttttctttttctttttgcatgttgttccagatgatgtgtaaatcatgtttgatctgtgtaaatgatgtttgatctgtgctgatgatgattttgtatttcatgtttgaatttggaaatgagcagcgaatctagaggtggatttgaaattaatgaatcaatgggtggctgcatgggtattttcactggcggctgggcagctgcgcaccggttttttttgttccccaaatcctttttcgatggcggctgatataactcagccggccgtcctaagccaacgccagtgaaaatagatttttgctggcgattggcttaagatgaccgctagcaaaaatctatttttgctggcggtcaataaccgctagcgaagattttgatcttcactggcctttgttttgtggcggctgtaaattccgccagcaaaaatctaaaatggccgccacgaaaaatggttttcgtagtagtgactagccgccagcaaaaatatgaaatggccgctagggaaaagctttttttaagtagtgctgcactctttcggaaacaatattcatgttcttcgttcacttcaaactcgaaagccatatagcattccttaggtgcatgcatcccccattgtacctaaactgctctcatatactccctccgtcccaaaatatagctatttctagcacagtgtcttgtcctaaaatgaagctatttcttcacctacctcctcctctcaaccaatcacaaccattcttcttcacatactttctcttttcaaccaatcgcacactttctccaatcattctcacctactttcttaatactcgtgccaacctcataaatggcttcattttgagacggaggaagtaagatcataatatcctacaagccaaagtggccagagagcaaacggggccaggttaacaggcggttctttgtcgcatccctgctgcggagaatatgttgtttcacccttcaaaacacacacacacacacttggaagaggagtgcaaacggtcagtgacaaagcagtcgctgccgcctgcagggagcaatcgtctcaggctgtgtgagatcacctggcttgtcttctccgtgccggctgctgagatcactagcttggctcgtcctcttctccacgcctcacatcttcttcccgtcctgatgttaactaccggttttaggattgtccaatgtgacaaacatcatacgtggattgatgaaatagttgttgttttaggctagcataggttaaggtttgagaaagaaaaaccccatattaaatgcctatggttgaaaatggtggaagaaaagtgagtagaatgaggagaaatttaagtggaaagtgattgatgagagaagtagtagttgtaacaactattttgggataaattatgaatccccatgtggataactattttaaaacgaagagagtttatatagtagtagaaagtggggttaagattaatttcgcttacgatacatgcgccatagtagcaatgctttctaggatgaggagatctaagcatagattatttttacagataacctagctgattacacagataaattaaatattttaaaaaataaacataatattagcttaaacaagtggtctagggataaattaaatattttaaaaaatagggtgacagttactcctccatcctaaaatataagggattttaaatggatgtgacatatcctggagcttgtccagatttatcatactaagatgtattaaatccatctaaaatcacttatattttaggacggagggagtacatgcttattattataagccccaagagattcattaggagcttatcatattaatttaccaataataatatgtatatatacatgcaaacattttcttgttgtctcaagaaaaagatgtgcataatttatagtaggatttaatgacatgcatgcttatatctttctattcctcgttcttagatggaccctcctatttaccaaaaactaatttgagcttcaacgtattaacaattaaaaaaaggtgtaagttcgtcatattttttagagaaatctcacgtacgtcacccttgtatatgatatctatacaccaataaattcttttgattggtatctatcatagctgttaa

SEQ ID NO: 23800 - DNA, 2183 bp, Oryza sativa
ttcttatagaaattaccaagaataatccggaatttatattaaattctccaattctaccactattattaatctattattaaattctaattattttaaattttctaaacttgcctaatctcctctaatttctatttatttttttcttttctttttctctcctcttttctctcttttcttttctttttccttctctttctctcttttcttttctttttccttctctttctctcttttcttttctttttccttctggttctttccctcccggtttctcaccttccttctttcttctttctctccctcggcttctcccttcttctctttctcggctctctctctacccggcggcacggtgataaacaagggggaggggcagcggctcaccgacaccggcggcagcgacgacggcggtggtgacaacggcgcacggcgtggcacactggggcggtggcgcggaggcacgaaagcggcggcacgacagcacgagggcggcggcgcggcggcacggcggcggtggtgcgtggagaaggggagagggagaggaggagggaatggagtggggtggagaagggggaaggggccggggtttttataggggagagagggggaaaagggagagaaggaggggcaggggtgaaacgatggaggcgcggggcgcgaggcggtgaggagacgggcgcgcggcgacgggacgggcgacgcgatggcgcgtggctcggggcggcgacgcgatgggcgggcgacgcgacgggcggcgacgcgacgggcagtgacggggcgtgtgggcgcgcggtgcgactggatggcggcgcggcgcggcagtggttaattgtctgcgcgcatcggctctgggcgcgaggcacgcgcggcatgggagatgggacgggcgtgcggcgaggcaagggcgcggggcgcgaggcgacgacgcgacggtgatgacgatggcgcgcggggctcaaggcggcgacggtgacggcggtggcgcgcggcgctggccgacggcgcgtggcggcaggcggcgctggcgcgtcggcgcaggctcgggcggctaggggcagaggtgggagaggagggggaaggctagggaccgcatcgaacacctacgccataatgaacagtgtattttcctatttatcccgattttagtttatttcccatataaatttgattctataatttctaaatcttgcataaatgaagtttactcaatatttgttttatctcaactaatgaattcatcctagattaatattgctcatattttatttgtataatttatttgaatttttaattagggttaattcttattccatcgcatttaaatttaattgatacgaatatgatcgtgataatattttatttattcctatccacacctaatctttattttaaattgaatttattttaccaatttacttctagggtttattcctaattaaatattctttactcacgattaatgaacttcgaaatcaaatccaaataaaataggcgaataagatcggcatgatgcaattaatttaaaagttttcgaaggtccgtatttttagagttttgcttttattggtcaaattttcagggtgttacaaacctaccccccttaaataaatctcgtcccaagatttcttaccagttttcgaatagatgcgggtattccgtcctcaagaattcttcgctttccaaggtggcttcatcctcagtgtgattactccattgtaccttgtacatatgccacactttgctcctagccctcttttggcttcatccaatatccggaccgggtgttctggatacgtaagatcattgctaatgtgaatctcttccagcggagcttgttcttccggcactcgtaagcatttctttaattgagacacatagaagactgggtgcacatcagcgatattctctggtagctgtaactggtatgcaacttctcctcgtctagccgtgatttgaaaaggtcccacatatcttggcgctagttttcctttgatcttgaaccttttcgttcccctcatcggagaaacctttagataaacgtaatctccttccttaaactccaggttttttcttcgggtgtccgcgtaactcttctgtggtgattgtgccacttttagacggtctcgaatcaggtgaaccttttcttcggcttctttgataatgtcaggtccaaataccgcccg

SEQ ID NO: 23801 - DNA, 6554 bp, Oryza sativa
  unsure (1)..(6554): unsure at all n locations
caaacatctctcccagtctttgctaaaatccaatgcacaagctctcaacatgtcctccagaacctggttggttctctctgtctagccatctgtttgtgggtgataagctgtgcttaacgcagggtaacttcctagggcttcatgtactttttcccagaaatgcgaggtaaactgtgtgcctcgatcagatataatcctcttaggtccaccatgaagacatactatcttggtcatgtataactcggctagcttggcactgctataatttgtcttagcggggatgaatctcgccgtcnnnnnnnnnnnnnnnnnnnnnnnntgttgcggtcttgggcaatccaacaataaaatccatacctatctcatcccatttccattcgggaatcctaagggattgtagcaaacctgccggtctttggtgctcagccttcaccttctggcacacgtcacagagtgctacgtactctgccacatctctcttcatgtagggccaccagtatccttccttcagatcctggtacatcttgttacttccggggtgcaatgaatatgccaattcgtgagcttcctttaggattaatcctctcagcccaccctgttcgggtacataaatcctctttttataccataggacatccttctcgtcggtagaaaattcctttgcaaatcctgcagctagacgttccttcacctctcggatttcctcgttgtccttctggacctcttctatttgggttctcaaaagaggttgaatgtccaaggtgtttatctgtccatgaggtactatatgtaggtttagttaggccatttcctccttaagctcaggagccattccttccgtcctcaaatgattgcaatggctcttccgactcaaagcgtcggccaccacgtttgccttgccggggtgatagtgaacctccaagtcataatccttgattaattccaaccatcgcctttgcctcaagttgagatctgactgggtgaaaatatacttcagactcttgtggtcagtgtagatatcgcaatgatttccaatcagataatgtctccaaatctttagcgcatgaaccacagctgcaagttctaggtcatgggtagggtagtttttctcatgtggtcgcaattgtcgcgatgcataggccacaacctttccgtcctgcgtcagtactcctcctagtccttgccttgatgcatcacaatatataacaaagtctttcctgatgtcagcaagaactaaaataggcgcagaggtcaacttttctttgagctgctcaaagctttcctgacactgttctgaccacacaaacttcttttccttcttgagtagttgtgtcattggtcgggctatcttagagaatccttgaatgaaccttcggtagtatccggccaaacctagaaaactccgaatctcagtcacagatttgggtgccttccattccgtaacggcctcaactttagcaggatccactgctactccaccggctgagattacgtggcctagaaaagcgacttcttttatccagaactcacatttactaaactttgcatataatttatgcttccgaagttcctcgagtaccaatcgcaagtgttccgcatgttcttcctcatctttggagtaaattaaaatatcatcgatgaatactaccacaaatttgtccaagtaatccatgaacactttgttcatgagattcataaagtatgccggggcattggttaaaccaaacgacattacggtgaacacatacaatccatatcttgttgagaacgcggttttgggtatatccctagtcctaattttcaattggtggtatcctgatcgaaggtcaatcttagagaacaccttaggtcctttgagttgatcaaaaagatcatcaatccgtggtagtggatacttgtttttgatagttacttcgttcagtgagcggtagtccacacacattttcatgctaccatctttcttcttgacgaatagcactggggctccccaaggtgacgaaccggggcgtacaaatcccttttcttgcaactctctgatttgctttttaagttcctccaactcattgactggcatccgataaggtctcttggatatgggagcagtactgggtatcagatcaataatgaactctatgtcacgatctggtggcatcctaggtaaatcttctggaaacacatcgggaaatcgttgcactacaggcattcctttcaggggtagcatggtaaatatgcctccggcacgttcggttagtctaggatcttgatccatagttgctctcatatccgatccccagggtgtggtcagggtaacttccctacgtctacagtcgattacccctctgttctttgttaaccaatccataatcaatatgacatctagggtctggggtatcaaaaccataaggttggagggaaacaccacatccctaagatgaataggtacgtctatgcaagcatgactcacaattatctcgcccccaggtgagtgtactatcataggttttctaagtcccactagggttaagttgtgcttttgactagccttcaaagatatgaatgaatgcgatgcaccagaatcgaagaggactttaaccgggacagaattgatagagaacatacccattagtacgccctgatcttcctgggcctcttcagctcgaacatggttcacttgtccgcgtccaaatccgatagtggtcctattagtttgcggagtcttgaatagacctcgtccggcagcaggggtagtagttccacgaacagtcattgcattagcaccagtacggacaggagttttgcgtggatgagggcagttgttggtgtagtgcccatactccccgcaattgaagcagtccacattcttcttggctccaggggcagccagagttggcgtaggggtgcggttctaaatcgcaaccagcctgttgaaattgctaggtgcggcggggcggttggtcgccacaatagggggtttccacccagacgaagtggctcccttgagtcgctgaagcaatccctgaggtgggcgattcatagcaagcctcctcttgcggttgtgctctacagtcctttgatcgttctccagcctaacgaccttgttgattaggctctggaaactctcatgatcttgcccaatcataggtccacgcaactcatcattcagcccttctatgaacttgtcgatcttttcttcttcatctgcgaggtctccaattgcatagcgggcaacctgagtgaatcggttcagatattcctgcaccgttgtgttcccttgtcgcagccttctaaactcgttcttcttcatacgcattaccgcagcaggcacgaagttctcgtggaatgctgcagtgaactcttcccaagtgggttctccagcatcctcttcccgagcttccttgtaagtatcccaccaatcaccagcgggtccctccagttggtttactacgaagatcactttgtcggcttcgcgtacccggacaagggtcagtttcttctctatgatacgtagccaatcttctgcctccataggctcgtctgccatagcgaacgtgggtggcttggtcctcataaactctccaaagctcgatcctccgcggttgctttggttgtttgcaatggcttgcagaagttgggtttgagtagccataactccggccagggtggttaggtcaggtgtctgagtttcttcattgatggttgacgcccgacgtcggctggccatctgtgtaggccgataaagtaagtatcctaattttctaactagctcttatggttttatcccattaagggaattgttttgatgtgaactttgttttgcaagcatggtggaataaactcatttataacacaatagcaataatatcataaataacatcacagaggtccacaaatagtacataaatcatgatgcaattgactgcacacatacgcagtccaaataaggttcgtccaaaagatacatcaactaaccatcaagctactcgtcaatctaggtaagaaaaagggggtgtgtgtgtctcgcatactatccaaaaaccatctgaagcgagatcgaagctgcaataatcctccagtctagtcatccaaccatccgcaggatcctggggcaggtagagggtagtcgctggcacgggcaaacctgagtccccacggctcggaaatagtggcctctggatctggcttgggcttcttgcccgagggtcgggtgctcttgcaggcagtgctaagggtgcgagggcctcggaggaacgtgatgcagggaacgggggtctcatcctatgaaggatcagtgatgtctggctcgatctctggcttggtatcggtcccctctatctcagagtcgacctagatcggagtctccaaactggaacccagctgcggagaaggtgtagagatcagtggagtgtgcacaatctccggcgcaggtggctgtgtcactgtcgggtccaccaagtaaggagctgactcaatagccagcataccaacctctcccaaaagagcgtggaatgctggtgggtacggcgaggtgaggaaaaagtagcggtcatgccctactgctgtggaagtagaagcccctgtggtgctgaccgtggctgctcaaagctgctcctccagctggctgacgtgctcctgactctctctcagctgctcctcaagtgtatccatcatcccgcggcgatcgttgtactgggcagataactgctggaactagtcgccgtggacctggagctgtgccttcagtgagtctatctcactgccccaagcctggtgctcctcttccagctgaagctgctgcgctgtgaggtcagtcacctcggtctctaactctcccacacgcctctgctggtcgtcgatctctaacaaagcctcctcgtaaaagtcgtctactgcctcagcccatcgtgacaatcgggtcactatcgggttgtagcagcaaggtgtgtcctgaactgtgcagaaggagttgctctcctctcgaaacgggtggtgagcaaactcagtactcgccaactcagctaggtggatagagctaagtcggaggaaggcctcccgtgctgcgtcctgcatcgcggtctccagtaagtcgcgacggtggcgtgtcgggaagctgtagtctaactccgaaggaactcgcgtgtgaacctcgacccgaacctcctaaacagatccacactgtctcactcggtagatcggaaatctggggtatcgcagacgcctcatcagccggtgtagctcaatgacgtatccctctaagcggggtacgcccatctcccaggtagcgggtgaatcctaatctgccatctaattttaagaaaaacccaaggtcagctgagagtaaatcttgtttagtgaagaaaatagttaagattaagatgaaaatcgtaccgagttttgtaaacatagtgtttttatttttgaaagtattattaaatgggaatttctcccttggccaacttagaaaaggggtggggcgcctttttggtcttttcctacagtcgtatggctctgataccagctttgtggacccccgtttttataacaggaatcaatcatgtaaatagtaccatttccctggaacaagtagtctggtacacacgaattcatagctgaaataccaagtgcacatacacgagtgtctagtacgaattattacatcataagcccgcaggcatagtcttaaatcatcggaccgagcggtccggaatacattccaaaaacagaagtaggtaaggcagcggagtcaaggcagcggcacgccattgccacaggcaacgaccgtaactaagacctactgagcgccatcgtcttcatcaccctcctggtagtaagcgtagggatcctccgaagcttcatctccgacctctgattaagtttgtatattgcaagggtgagtaccaaccgtactcagcaagccaccacagcaacaatgtatatgacaggggtatttaaaggatggctatggttcttttgcgcaaagcaagttttgtaattcttttcacaagcctaagacctagcacagactgatcaaattttagtagtagtgttcatattaaacaatgacggtattgtccactatccattgtgatcccaaggatagcttcccgccattgagtcgtcatggttttctgaggacgtccacattcccgcctctcaggaagtggctccatcaatatagaaatcatcatgcaatatcccatcccacacaagttaagaatttagagtctagccaagtgtaatacatgtcccggtgctcaataaccgcgagcacggctattcaaatagattaggtttactcacactgtagtggatgtacactttacccgcactccgcgactgcccaacacatgagcctcgtcccaacacatgagacgcgtcacggcaaagcttttcggtaacctcgcattggcagtacccgctccatgaactttacatcctcatgcactctaggcgtacatggtttctagcagtgagagcagttctggcgcacccgggaagggaagactcacacatgcattaagttataattatgtttaaattctctgggctgcaggaat

SEQ ID NO: 23802 - DNA, 1730 bp, Oryza sativa
cattatacaacaaaaatttaaaagaactagtgtcctgcaacaatgaagatcattttcgtctttgctctccttgctattgctgcatgcagcgccacagcgcagtttgatgttttaggtcaaaatattaggcaatatcaggtgcagtcgcctctcctgctacagcaacaggtgcttagcctatataatgagttcgtaaggcagcagtatagcattgcggcaagccccttcttgcaatcagctgtgtttcaactgagaaacaaccaagtcttgcaacagctcaggctggtggcgcaacaatctcactaccaggacattaacgttgtccaggccatagcgcagcagctacacctccagcagtttggcgatctctacattgaccggaatctggctcaagcgcaagcactgttggcttttaacttgccatctacatatggtatctaccctaggtactatagtgcaccgggtagtattaccacccttggcggtgtcttgtactgaattttcacaatattgtagttcggaagtgaaaatataagctcaggtatcatcgtatgtgacatgtgaaacttgaggtgatataaatagaaataaaattatctttcatatttaaatagcttgcctctataaggatatatcctagtgcattgtcgtagctaattaccatgattggtactccacaatttttctgtgcgcttaaatttgattcgaagctacttcgtattttagatataaatggagtgtataaaggatgtccatcattttattccaataagaacaaacacaaaaaacatatgacaaatactaaatccaccacaacaaaatcgtataccatacagaccacgtaaagatgcagcaatcaactttgattctccatccactactaaaacaagcgtatatcaaaggccgcatatgcaacatcattgtgaatatgacaagccaatgtcatgcaaacacgtaacttaatgcaactatgttgtgtcaagcgacatcaagacgggttttcaaaattttaaactttggtacattaacaagtttcatatatagatattaattttaattgaaaatcatctagttgtccatcattcttgacaaaaggaagtgtataataaattcttgagttgagctctcgctcaatttgcatcatggaacaacaacgtaggcataattatttctgtacagaagcaaaacatgcagcggcaacaatgggggtgaaaaccggaaagacggatttgtgatgttctttggtttattctgtcactgtagagtgactataaagaaaatgcacccttcttccaaattcaaaattatgagatgtcgtacttaaggaatgctccaagacattgaggttgttcttgctgacaaactcgttgctttgagtagtttattctagcattgaaagtagatagtctcactgtaaacaaaatggataataaacctcatgtttcagcaaaattataatggtgatctctcgtaaatatctcgaatggtgatattagacttcagtgctaacttaattcttcctacaatcaaatcttcattaccacatcaaagaaacaatacaatgcacctgccgtactataattttgtcattcctgttgaaattttataattcaagatgcatgaggccgcacgaccttaaagttcaacgtggcatgcagtagtgaaataatagcttggtaaacatgataaacatacctagataacagattcaatcctcacgaaacaaacgc

SEQ ID NO: 23803 - DNA, 12480 bp, Oryza sativa
ggatgaatcttgatgggagtccgatggatctcgatgcatggatgtcgatcgcctagcgccgtctattgggtggctgcctgtaccctcgccggcgtacccttccgccgaggcctctgtgtgttccctcatgtgatctatgtatgagtggatggatcgatctcttcttgtggttctacatccatgttcctcctccatgatcaatctgcaaaacgaaagagaaacaaagaaaaggacggagctgtactcgccgccggtgtgctggtgtagatgagaccatgtccgtgtactgcttctctcctcctcattctgcccacagccgccggctggcgcgccgtgtcttctcaccgggcagagggatggctggacgaatgtcgatcgcctggcgccgtctcttggcagagcgcctgttggctgccgccggccgtcagcgcacgcgttggcgtgcccttctgctttgtgttcttgttctacatatgtgtggatggatggatgtgtgttttatgaatgattctccatgccctggctggttagctctcgttggcttttataagcgctgggaaaacttaacggacgggcgcgcatactccggcgccgacgtggctgcacgtgtttgttccgatacctccgggcgacgttgctgcagatcacgctaattcgaatcacctggataagacgaagtttgttggttgggtttatccggcgctagccgcgcacatcagtagcttgcagttgagaaatcccgcgtacgcatgtattctgatacaatcgcatatatacgatgaaaacgcaatgtgtctatgggctgccggcccacgtgcagcttcacatttcaaccgtgtagctagatgttgcttcttaactcatagaaaccacccggtatttctgtacgtatacatgcacgtacggtgaatacatatatagtcacgagcgctcgtttatgagctgctcacatgtcacttaggtctccttgtgcatgcatgcttacgtatagattagctaagcatgtatatatggctgaacacatgtacccatgtatagccatataggaggacatacatatgccagtacgtgcatggctcatgcatcccatgcaattgagcaagctatatacagagtcacatattaatgaatgcgacgatcatagctgctcttttgtttgcttgtcttgataatacaaataatccttggatttataagatcacaaaataccgtcaaacaaatgccccccagcaagtggagtttgcgcaagagaaacgcggtgtgaactcgacttggtgaaccctattttcctaaaattcggctcaattttgcactgctgcctcatcttgattatttaatatagaagggaataaaagaatttagtcccattgaatttagtcccactactaaaacaagcgtatatcaaaggccgcatatgcagcatcattgtgaatatgacaagccaatgtcatgcaaacacatcacttcatgcaactatgttgtttcaagcgacatcaaaacgggttttcaaaattttaaacattggtacattaacaagtttcatatatagatattaatttgaattgaaaatcatctagttgtccatcattcttgacaaaaggaagtgtataataaattcttgagttgagctctcgctcaatttgcatcatggaacaacaacgtaggcataattatttctgtacagaagcaaaacatgcagcggcaacaatgggggtgaaaaccgaaaagacagatttgtgatgttcttttggtttattctgtcactgtagagtgactataaagaaaatgcacccttcttccaaattcaaaattatgtgatgtcgtacttaaggaatgctccaagacattgaggttgttcttgctgacaaactctttgctttgagtagtttattctagcattgaaagtagatagtctcactgcaaacaaaatggataataaacctcatgtttcagcaaaattatattggtgatctctcgtaaatatctcgaatggtgattttaggcttcagcgctaacttaattcttcctacaatcaaatcttcactaccgcatcaacgaaacaataaaatgcacctgccgtactataattttgtcattcctgttgaaattttataattcaagatgcatgaggccgcgcgaccttaaagttcaacgtggcatgcagtagtgaaaaaatagcttagtaaacgtgataaacatccctagataaaagattcaatcctcacgaaacaaacgcataaggtgagcgatgagtcatatcgttatctttcttgcctgctaaccatcatgatggacagaaaagttactttcatgatgacaccaaagcggatttgttggggcacctaatagaacatacatccaaatgacatgactcacttagatcctaataggacatccaagcaaaactaacacactaaagcaaccgatgaggaatcgaaagaaaatccgtgccagcgcatctataaatggacaaactccatgaaaaccctcctcatcgctcgcacaattcaagcattatacaacaaaaatttaaaagaactagtgtcctgcaacaatgaagatcattttcgtctttgctctccttgctattgctgcatgcagcgccactgcgcagtttgatgttttaggtcaaaatattaggcaatatcaggtgcagtcgcctctcctgctacagcaacaggtgcttagcccatataatgagttcgtaaggcagcagtatagcattgcggcaagcaccttcttgcaatcagctgcgtttcaactgagaaacaaccaagtcttgcaacagctcaggctggtggcgcaacaatctcactaccaggacattaacgttgtccaggccatagcgcaccagctacacctccagcagtttggcaatctctacattgaccggaatctggctcaagctcaagcactgttggcttttaacttgccatctacatatggtatctacccttggtcctatagtgcacctggtagcattaccacccttggcggtgtcttgtactgaattttcacaatattgtagttcggaagtgaaaatataagctcaggtatcatcgtatgtgacatgtgaaacttgaggtgatataaatagaaataaaattatctttcatatttaaatagcttgcctctataaggatatatcctagtgcattgtcgtagctaattaccatgattggtactccacaattttactgtgcgcttaaatttgattcgaagctacttcgtattttagatataaatggagtgtataaaggatgtccatcattttattccaataagaacaaacaaaaagcacatatgaaaaatactaaatccaccacaacaaaatcgtataccatacagaccacgtaaagatgcagcaatcaactttgattctccatccacgactaaaacaagcgtatatcaaaggccgcatatgcagcatcattgtgaatatgacaagccaatgtcatggaaacacgttacttcatgcaactatgttgtttcaagcgacatcaagacgggttttcaaaattttaaactttggtacattaacaagtttcatatatagttattaatttcaattgaaaatcatctagtcactactagaaaattgatttttcaagacgttgctctattattttcactggcggaaaaatatgaaaaccgccagcaaacttgtaacgagggggtgaggggcaccgaccgccagcaaaaatgcattttcgctggtggcccatctaatgcggccgccagcgaaaatatgtctatttttgctggcggtcaattaggtgcaccgccagcaaaaatagttaattttcgttggcggtccaatttttcatggcgaccaataaatagaaccgccagtggaaatccaaccaaaagtatctgtcacattaaaacacccacctacccatcctcatcctcttctccacattaaaacaccacacatcccctcctcttcttatccactcctcttctctctcctccctctcctccttcccagcctctccacctgcgacggaggcgacggctctggcggcgacgaccggcgacggcggtggcggctctagaggcgacgaccagcgatggcagcggcggcggctctggcggcgacgaccggcggttccccgcgtcgcccctgccctcccatcccctcctctcccatctgtccgaggggaggaggccgccgccggtggcacaacataggcggcgacggggaggacgtgcagatctgccccggcggtggtgcggggagcacgcagcgcgggaggcggcggctcgtccccggcggcggatggcggcggctcgtccccgtcagcggatggcggcggctcgtccccgtcgacggcggcggctcgtccccggaagcggatggcggcgacaacagcggctcgtccccggcagcggagctgacgacgacgaccgtgaccgtggcgacgacgatgaccgcgacgctgccggcaagcgtgtttttgtgtgttttggttccgtgaccggcagatggcagcggcggtggctcgtcccgatggcttcggcgactagggttctctgtgcttttgtgtgtgttttggtttgtaaggatgtttgttaggttaatctgtgtttgttctgttgatgatgtcaatgttgtatttggattgatgccaatattatgtacatatttgtgatgctctggatttggattgtgtttgaatgatgtttatgtccattttcaaatatggattgttttgaatttggccgagtggggaattttgaatttggggtagggaatttttggcggggtgggttgattttcactggcggttctctttaagcaaccgccagagaaaatgggttttcgcaagcgacactcaactgctagcaaaaatcgtttgtccacttgcgaaaatcgattttcgcaagcggaccgaaaccgttagtgaaaatcgtgtgtccgcttgtgaaaatagattttcgcaagcggaacataaccgccagcgaaaatattagatcttcactggcctttgctttgtggcggctccaaattccgccagcgaaaatctaaaatggccgccacgaaagatggttttcgtagtagtgagttgtccatcattcttgacaaaaggaagtgtataataaattattgagttgagctctcgctcaatttgcatcatggaacaacaacgtacgcataattatttctgtacataagcaaaacatgcagcgccaacaatgggggtgaaaatcggaaagacggatttgtgatgttctttagtttattcagtcactgtagagtgcctataaagaaaatgcacgcttcttccaaattaacaatgggggtgaaaatcggaaagacggatttgtgatgttctttagtttattcagtcactgtagagtgcctataaagaaaatgcacgcttcttccaaattataaattatgagatgtcgtacttaaggaatgctccaagacattgaggttgttcatgttgacaaactcgttgctttgagtagtttattctagcattgaaagtagatagtctcactgcaaacaaaatggataataaacctcatgtttcaaaagtttattccgacaccgaggctgcaaggttggatttggttgagtttgtgattttgattttcttgaggttctggtacttgctatacttctacttgagtgtcaaacttgtgccattctatcctttgttttttgtcaaaatatgtccaaatttctggcaaaattatgtcaaattttgaaacaacattttatccatagtctgtcaaaattgtcatacttgtcagagtttataaaaattgcaagctgcatgtacaaatggaagcaaatacacaattgataaaaaaacagtgtgaaatgtgtaatagtagggaagggtatggatgtctttttgccaaagatttaatatcgtcaacatgtccatccaaaatagttttaaattttagcttcgtttcaaaaataaagggggcaaaaaccataaggactttaactagcaagttctaggaagtaatcatcatcaccgtgtgatagacgaaccggtaatgacgaaatccccattgtttgcgattatcttttgtcatgggtacatatcttatcaccaagacctcctattgtcgctaagatggaccgttagagaatttaatgttgattttatcacgaattcgttacatattaatgaagtcgtcacagggaatcgtcaaaaagcctatatctgttgtagtgcatgcaactagcgagaggacaagctttttgggtatactatgtgatacctcaggatttgttatgagatacatggatgaaaatatgttaaatattatagaaattataaatattaaaatactataaaaaatgatgtgaggatgatcatttaacatacttatatgctaaaccctatgcatcagtacattaaaatacttatgtgaagatcatttaacatacttatatgctaaaccctacgcatcatttaacatcattatatgcttctatctttggcaggacagatatacaagtacagtgatatcgttatttaaatggatgtaattttgtggttcacatggtatatattttactacacatcatcttctaccctataattcaccaactacactcctgtacaatcctcattcatcaaatccgacgatccagaatcatcgaatccaacggctcgagattgtcccacgtctcccctccgtatgcacccctctcccctctctctctctctctctcttgcacaccctcctctcggtcgctcccctcaaccatagccgcctcctcgatccatgccgccgccgcctcgagccacgccaccgccggcgtcaatcatctgcgactccgcgtgaccgcctatgatccaggcaacggagatcctcctcggctcctcgcgccccgacggctgatacactgcggtccgcgcgtcaggcgaagttgggagaggatatcctctgaggggacattggcggcggtgatcctgcacgcttgtacgaatgacttcacagctagaatgactgacgaccacgtccggccaccgtgtacggatgacttcacaccttgaatggatctgctgctgcggtgctgcccaaacaccttgaatagggtgtgtttggtttggggaccaagtgggatgggttagacccatcccagttttttgggatgggatggttccagttgtgtgtttggtttatggtatgaaatggttatagttttttgtttggtagaagggattgaggagggatgggatggacaatttttcacggatgttagggccgtctgctcccagtggctagcttccaggctgccggtgagattagggacgaaggagctcgtcggcgcgagttgaggagctcgtcggcgcgagcggaggaactcgtcggcgcgagcggaggagaggcggaggcgggtcgcggacgagtggcgacggtcgcgaaggtggcggcaggcgcggacgagcggcggcggtcgcggagacgaggcgagcgtggatgagcggcggtggttggtcgcggacgaggcggcggttggtcgcgaaggcggaggtcggacacggacgaggcggcggcggtcgcagaggcggaggtcggacgcggacgaggcggcggcagtcgtggatgtggcatgggcggtcgcggaggtggagggagcaggcggaggaggacagagcggcgccggaggagggagcaagcggaggagggacaggccgcggtcgcggaaaagcagcggccggtcccagaggcgaggcgaggcgcgggcgagcggcggccggtcccggaggcgaggtgaggcgcggacgaacggcggcggtcggtcgcggacaaggcggcggccggtcgcgaaggcgaaggtcggacacggacaaggcggcggcggtcgcggacgagcggcggcggttgcgcggaggaggacggagcggcgctggtggagggagcaggcggaggagggacgagcggctgtggcggcgccgcggcggagccgagcgggaggctgcgggagttgacaccgttctctccgtcgaagtgggatggattggtccggccgattttggtggaccatttcgtcccggatctgagaggaatattcctctccagggaccatcccatcccactcacctctcaaccaaacacccctaaaagtgggttcatcccatccttgcaaccaaacactacctatattgccaggtaacgaatgatttacgcgtcgacattgtccatgtggacatgctgcagtcgaattaatgtagcaacacagagacccagaacagacattgctctgctatatatcctcctgaataggttactgtattagccctttgcactgtacatgcttgtgaaaatgcgcataagcattgtagtaatagatggaattttggtgcacctatcactctgttaagtaatagatggaacttttctgatctgagagttaagttgatttagtttgtgtactttctttctactttggacttttaggcaaaagagaactgtgttaagctgtgtatgtgtcctatatgattttgactgcttattcattcaaaatatccatgttacttgaaacagaaatctgcatgggattagtgatgtttgttgacgtacttctaatattttactctagaaaagtgaagcatacaagaaaatcttactgtttagtaagaattttctgatttgtgctttggtgtatgctgcaatgtaacatatatgcagagagcggaagtcttttattttctctatcacctgatcttttatgttagctacagttctatatatttttttgttggttaggagttgaaagaatgacaacagtgatcgatcatactaggaaatacaaaaatagattaacatggaaacgttgttcatgtgggcatttcattccactgcatgggatggacaactgtttggcctcctctgctgctgttgctatgctgagtttgcgattcatctgctcttggtgcctcaattcctcatgaaccaatttgtctaacaattttgaaatgttgttcaattgatagatcctcctgcaccttcatgtagtatgctcaggacaatttgagattgactactgatcatttttaggaaatagttttgtcattacagatttctgggtagatttgaatatcataaagtgactgtaattactacttgcctaccttttctttgacggataagccaaaacctgatcttggaaaggattcatttagtctttgtgcatccattttcttattatttagtcaatccgcgtcgccaaggaatcatgaccgctgcgagatgaaaattttcattatgtatataagagtagcaaagagaacttggatttgaacgctggtgttatacttctcttgatctggcagttttttatttcttaaaattaatctcattttatatattgtcttttggttgcttaatataaatattaccgtagcgttagtacgggcatgctactagtcagtatataagtaggcttgctatgcctttctaaaataggtacataagttgtttaaaaattacgaagaccccatctcttatagtacctctaattacactggaacttatgcacaccttgaagcaatcttactaactggacacacattcagactagtgtgtttagcagcaagaagttcaagtgcctcccgcatatcaagatccttgtgcaacattccatttggcaacttccaatcgaaatgataaagaaggttagccaaggcaagctctatgttggccagcccaagatttatgccgggacatatcctgcgtctagagccaaatggaagaaactcaaagttattccctttgaattatatattgttggtttcgaacctctctggcatgaattctttggcattctcccaatacttactatccctgcaaattgcccacatattcacaaatattgatgtacccttaggtacatcataacccatgatcttgcttgtctcatggcattttcgagggatcaagaagggcgccgggcaatgtagtctcaaggactcctttatcaccatcttgaaatagctcaattttccaatatcgtcttcagtgatagtgctctttccttgaaaggcttgacgtagcttagcttgtaccttcgccatcactctcagcgacctgatgagctttgccatggtccgggtcagtgttgttgacgatgtatcgctgccacccgcaaaaatgttctgaaatgatatatttttgtaattaattattattcacctgaatttttttatctatttttgcctaaacttgtataataggcatacacatatatgctacacttaactctatttttttcgttactatatactccttccatctatttttgatagtcatatttccaaatctaaaaaataaaatttttgataggcatatttcaatccaacaacctatcaatcttaatgactttctcggatttaatgtgtaactctccattcttccacacaagattgtctgcatgagcatcgagaaatgtaaatattaatgaatcgcttgtttacgaggaatgactagtactatgtttaaatagatgataagtagaattacttatctttggtctgtgtgccaagatgaaatatgactatcaaaagtagatggagggagtatattttcttgtgtaaactttgcttagttcatctcataggaggttttatcccttacttaagactattttttttatctaaaacattatggttttgtatcctaaagatacagaggccaggatgataggatgatagaacttcctgattcttttttaaagaaaaggtttactaatgtttctatatatattttgtagatgtaggttctccgcccatgggcataaccaaggatcgatattgagccagctcggctctgtgcggtttggctcagtaggataataccatacgctttgctgcttaatatatggattaatatatggatgaatacctgttatatattttagaaataataaatgtatatattcaaataatgtgaaaatgatgcagagagtatgatctgacattacttgcatatcaatttctaaacatacaataaaatcataataattattagtggatgatgatgtggtatatttacatgtgatttaaattactttaaataataattgctagtgagtgatgatgtgagacacttatatgattagtttcagtagttagtgcgcattaactttataagtaaaataagacgagctggctcgacacggcacattatccggacaaggcttaagctagtttagctcgcgagttggggggagtagtgggattaagttggctggcgctggagttaagatcgacttggagatggtgaagcagagccgcttggtggcatggagctggagttatatggacattactggcctggcccaccactctgctttaattatctcctgataggctgataccaatgcttgttttcttcgctctattatttgtgccgctaatccatttccctgaattggcctcctgggctgtcttttttatccatatatgcataatataataattactactctctcctttcaaagtccaagtcatatttattttctcaccaagatcaaagatatagttaacccattcatcatacgataaaaccaatgaatatataatcaataagtactaagatgactttttggttttgatcaaaaatttattaattaagttacgtagtgattataaatagaatttagacttttaaaaaaaccaaaaagtaaaatagaaattagatttttggaaggagtgagtacagttacgtgaggcttgcgtaccatcaaaagcacgacgataacttggtttgtaattggaattggcgggccgccttccttctggagcctgagcaggtcgtccagagagcatgacttgctctccaccgccgccgcctgatcgccgccggtgtccgtctccatttggtccttgcgttcctggatgatctgctctatgatgcgctccatcttcttgcggttcgccagcgcgctccgcggccccatcgcgaccatggacgccagcttcgacaacgggaagaggtcggcgatgctgagcccggatgtctggcgtaccatggcgtgcagggcggccaggtactcttcccggtgcctgcaccggctccccacggagcaccggagcacgatgtcgttgatgagcctggctcccatcccggtgaggttcacggcggcacccgatgcggcggcggccgacacgtcgcgcacgagccgcgccacctccacctcgcggacgcgccggaacgagcgcacccgcgccgcggtcaggagctcctgcgtgagcagcttgcgggagctggcgccaccgctcgccgtatggggccggcacgacgtccctgccgccgaagctgaacgcctcggtggcgctggtcaggtggcggtcggcgaacgccaggtcctttctccggaggacctcctgcgcggcctccggcgacgaggcgaccaccgtgggcacctcgccgaaccagatctgcatgacggggccgtgcgccctggccagcttccgcatcacgccgtgcacgctctcgctc

SEQ ID NO: 23804 - DNA, 3838 bp, Oryza sativa
attcctgcagcccacattaatacaacaaaacgtcaaacctgcatccagaaatgaacaatgtaccagacacttctcatagttcaaaataattttttaggcaaaaaattattatttaaagcttgcaagactggtaaatatttattattcttagtaaataatagtaactactccttcctatatggaaaggcaaaaaaaaaaaagatgtaaaggagcttcagcgcatataggggatggatgtaggtacaagagacgggtagagggtttgcttttttattccgttttccaccgctggctgtaggattttgagctgcagccgagatcagctgggttggacagctacggcccaaaatgccacaacaatcagaaccgatcaaccttacatacacctatcaagaattttttatacaactaaatcccattgttgttttgatatggacttcaagaatataaagtatgcccccaataaccacaaactgaacaatgcgctatcagctatggtagtcaggaactagtagtggttccattgacctctaccattggctagatacacaactttgggggtagcctgcagtgtctatagaaggaacattgattactaggaaaacactgtagtgagaacatcttcgatcctgatgcatcctaaccctaacgttcatcggtaaccaggctaataatttgtgcataaagttagatgattattatcagtacatgtaaaaattgaactagctgtttttaatctgacatgaacaggagacagggcattgtgcgtggttggataaatcgacacttttgcacaaccttctgtgcagttctgatcgaccccttatcttcatctgatatatatatatatatatatatatatatatatatatatactatatggcagccttttcttttttactacactattaattgactctcggtatgcaagcagagtactagcatcatcaagcagggtatactggtactcacaggagtaaactccaactttcctgtaagtattttctttgaatatatatgtcatatcttttcaagatgacaagaagggaaaaattagacaaaataatggagaaatggaggaaatttgatggcagtagcatgttcttggaccatggagcaacttaacggtacaaattcgacgattttttttcactccaatgaactaactaacctgacttgccgggaagaaacatttaacttttcacctttttcaccttttcagagatcagtcctctatgtcacagtgctacaataggtccacatatcgaactatccaatatgtaaaccagaaataaatctatcggtccttacaaattctgattcttcaaaggtcacaaaaacaccacaatatatatctagcgagttcgatctatgtcaccactcaccagtgctaggcatagaaaaagggaagcaatttgtagatctaattaacagatcattacaatgctaacaagaaaaagaaagtaattcattaaaacggtgcaagcgatcaatcaactttttcttcaggtccttccttttgcttcaaatacactgcactacgaaatgattaagaaggaaaattacttagcaaattacccgcagaagctcatgaaaggccgtgacatacctgaccactcccaacttgctttagttccaatgcttaagaagggggcatcaaaagaccaaaacaacgctacgaagctggttgatctctcatgacaagcagtttatcgacattaccatcttgcgaagaagacatggtgccatagcattgatacttgagctgcaaaagcttggttcccggtgcctcctacacctaacaggttacaggttcactaaaacagcctacttgattgacctctaggtgtttcttgctgtgtgagagacgtctgagtgtattaaggaaataggatgcctttggttgtaccctccatgttgtccatatatatagaagggtacactttaaggcggaaaagctacaaatatgttgacatttttttttctatatatatatatctttcgatttttggtccattggttttgtcctaagatttgcgctagttgtctagagaaacaaaacacagtgcttacactatagttacatttcaaagatttttttaaaaaacctatcgcctgatttttagatagtactcaatcaaggacctttaattgccttgaatcttcgctttaacatgtataggttgcttttctgggagcattttctcctatgtggccgtaaatgatgtggtttggtggctacactcttgtcattcatacccgttggattgtttaattatgtgaaggctcgatcttggaacaaatcttcattgtagtaccgggcttcattttatattgtcaggaatgcatgctgtggaacatcggcatcaatatatagaattatctgagatgcaaatcactgaaacaatatcagtccgacagcatcaatggttcgcgcgagggtttgacgacttagccaagcgttagcgaagcgtcattctcatagcgaggcgcttcgagttagcgaagcgagtgctaattgggcttcgaggttggctatacgccaaaaaaaactacttttcccggccctggcataaacctagcttctttgaaacaacataggttcacgtaactagctattaaatacgtatatcttttcagtctctaaacaccatcagtgccaacaagctacattcataactttattattaaggcagatgatcgtacgaagcctaaacatcgtaacaaaaaaaaccgtgtttgttatgataaaagatctgatagtagtatttggaaagggatctagcagccaacctatagccagtgaagatggccacacggtgatgttgaagaagaagtctatttttttgggagttaccctattcggaagtcttagacatccgccaagcaattgacgtgatgcatctaactaaggagaaaggaagccattacttgagtcaaaccagctacactctgagcaaggcagagaaggaaagtatgttgaatgctcgaacaacatcaaggtaccgtctagatactctttgaatatgaagggaataataagcatgaaggaaaagaagatcacaaacctaaagtctcatgactgtcacatgtcgatgacaaagctgcttcctgtgatatctcggggtatctttcctgataatgtccggacaataataacaaagcaatgtgcattcctgaatgcaacttcgcagaacattatcgatccagacagattgacaacccttcaaaatgacgtggtgcaatgtctcgttagctttaagatgatcttttcaccatccttcttcaatataatggcgcatcttctatgtcatcttgtcaaagagatcggtattttcggtcctgtatacctacacaaaatgttcactttcgagaggtacatgggcgttctaaagaagtacattcataaccgttctcgtccgcaagcaaccatcgccaagggtatgtaacaaaggaggtcattgagttatgcgtataatttattgaagaccttcgtctaattggggtccccgaatcaagccatgaggggagactacggggaaaggggactcttggaaggaaaacattaatgattgtacaacgatttattctgtaaatcacattttatggttttgcaacaattttcgttggtggctccttacatcgaggagcacttggcagttcttcactccaaaaacataggtatgtccgatgtccagattacacgccatcacattgatatttttcccgcttgattgcgacaacatctcatgagtaacgagacgattgaccaacaactacccttttggcgagggtaccatcttcctcgatctcgacattttaaggatatgagatcgat

SEQ ID NO: 23805 - DNA, 12265 bp, Oryza sativa
attcctgcagcccggaaaatgtgtcacgatatgattcaagataaatggagggggcataagaaattcacttgaaaaaaaaatcaagttgaaatatgatattgactaagcagcattttgatgaacatctctgggagcatcactgatttcagttcttcctccttttataatgttgcaaatccaacaactattttccaacgcaattacaactttttaatgaaaaattagaaaaaaatagatggcatagggatttctcaaatctttacaagcattacctcacaaagcaaagttatctactccagccaaatgacatgtttgaaactgatttattttaatggtctgataacagtgcctatcatcagggcttttgaaactttttacaagagcttagggcacaacacaacattgcaactccataccatccctatacaagtgcagaaacatccaataaacagatcaagaatgttttgaagaaaaccgtccatgagattgggaaagcttggaagcataagctacctgatgctctttgggcatataggatcgtatataagacgcccattggcatgtcatcataccatgtcatctatgggaagacttgccactagcccgttgagctggagcatagggtgcattgggcgatttggacttgtaacatggatttaggacaagctggatgccaccggcagatttagctatcggaaccagaggaatggagagataaagcttatcacaatgccaagatgtacaaggaacaaaccaaaagatggcatgataggagaatgaaatcaaggagtttgaaccaggaaacaaggtcttgatgttcaactcaagggtaaagctcttcgatcgtggaaaactttggagcaaatgactaggaccatataccgtcgtcgacacttcgccacacggagcggtcatgctgcgcgatgatgaaaacaacgttttttaggtaaatggtcactgtttaaaagttttcttagaacccgtagaggggttggggcaggatttagactgttgaattggtagattttaatgcttattttagagaccaacccaaaatagtttcgagtaagatgcgaaggaattttaataagaggtgattaatgagatgagtagaactctaaagtggtcacttatttttggcacaaatcgaaagtggtactaattttgggccggagggagtaattttgattaattaagttgtattgttttgagttattgtgattattgccaaacccatgatttgctatatcatgttccttcgtaacctaggcatagatttaattgtaaaacattgccatagaagtagatagtaccacaaaaccttatatcaacacacttgttttgtctgtcgtcactttggctttatcatgcaagtaatatgtttatcaatatgtatacgatcaaagtcttgaacgattgcgtgtgctttcgggataccatactaatcaaaccctgtatccccaaacatggctcaactagccaagctacgcccgcttggccactaataggtggagttgggcccacttgtcatccccaacgtcatgcaggccatctcagtctttggccaaaaccctagcacagctggccgcccgattcgcctaacaattaacatttttccataaattaattaaggggaatcgatccattgctcttgctcttcaattccaccacttttctcagcacatcaattgcacactatattgaagtgaagaagaggcgtggcatggatgcgccacaacttcttgtctgaaaagggggctatgttagctagatgagaaggcaagatgacaagcctatttggcatatgccactaatcaactgctaatttcccactctttaatgcaataagtaaagtacagaccgacatgtatttttggctggagcaataggatgatagaaaaccaaacatgtctgagatgggctgtccaattggcaggacaaacatacaagtacaatgagcttgttactttataggatgtaatttgattgagcacctgttaacgaccaaatttggtaagatgtgaaccaggttcaacattaggatcgaggcagattcgatgaagagatcgattcgaagaacagagtatgcatcggctgcgaatgtatcggctggagtgtacatcgactgggatggatcggatagaggatagccgatacagccgatggaggtaatgcagccgattacaatgaagacggtttcaaggctgtttctagaattgttcaaagtgcttcatagggattgccacgatggagaaaaagctctcggtttaggcaattgtatttattaattaggatatcttatataatttccttagagatatgtttgggcaaaagtctgccgcaaagacttatggtatcttagagtttgatagagataagtgtagtgtctggcaaggacatattttgtatctcgggtataaatggagcctgaacccatgtaatcaaacaacacacgttcaatacaatctcggcgcatcgccactcttttactttcgtttactttcgacgagttcttgctttcgggttgagctgcatcagttttgatcttcaactagaggtaaagcttgttatgatactctaatcttgtttatgtaattcgtcgagttatcatatatcctatataatctatgacaatattgttatttaaccttcaatcggccaacatctatcattggaaagcaaccgattaggttaaataccaatgttgccttatattatccaccaccctatgaaacattcaacggcttgattgtctagatattttccttcttttcatacttatagctgcatcagttgagtttgatcttataagtcgtgattagaatctcaatctctaacctgcttttggttaccaattagggtagtatcggagtttcagccgatcttacctgatttaactcttttatatctcatatgcttgattgatatgttaaatccgcccttatgttaagatcttgctgcatttaggtatattaagcttcccgtttgatatattttgcttgctttaatatcttaatatagagtgatatcggagtactagccgatacatgctagatctatctgatcggctatgctatgaatgcttataatctccttgttaatatatatttcgatgtaagtgatttatattgtctcggcatggcgaccgatctatcccaatcacttgatttaaatagatatcaacgaaagcattatatactattgatatctacagccgattgaatagatttagtcctttcttgcctatttatgactgacgatcgattcaaatatgacatcggctcaaagataaatgatacatcaccggcgagtggccgatcagctattatttatggatttaaccgctattttgctgtctttatttcttgttgattgctggatcaaatcaactggcacgctcacgaacctaaaggcaagatttttggacctgcactggagttaagcagatctcctaggcctcatgtttttcgcatcaacaacacctaatacatatattattaagcatgagtacataaataagctctctatatgtttccgcttaggcacataagtttttttgtggaatcacgtaaacctaatatctgatagcacatttgttatgttctttttgaagaggcattatttgttacattggcatttatgagcagcttggagcaatgtgagtaactggacatacattcaggctagtgtgtttagcggcaataagtccaggtgcctcccgcatatcaagatccttgtgcaacattccattgggtagcttccagtcaaaatggtagagcaggttagccaatgcaaactccatgttggccagcccaagattaatgccaggacatattctgtgaccagagccaaatggtagaaactcaaagttactccctttgtattctatattgttgttttcgaacctctctggcttaaactcttctgcatcctcccaatacttactatccctgcatattgcccatgcattcacaaatacagatgtacccttgggtacatcataacccatgatcgtgcatgtctcacggcatttgcgaggagccaagagtggtgctggacaatgtagtctcaaggactcctttattaccatcttgagatagctaagttgggcaaggtcatcttcagtgatggtgttctttccttcaaaggcttgacgcacctcggcttgtgccttggccattactctaggggaacgaatgagttctgccatggtccaggtcagtgttgttgacgatgtatcggtgccccccgcaaaaatatcctgcaataatatttttttaaataactatataacatgattatttttcttaattcatttttacataaacttacacaatatggatctacagtacacatagcttaaagataattctatagcccctacccataatcccattttttaagcagacaataataaattggttaagttaattactatcttacagtactgttgtgtatgctttgctcatttgatctcaatagctcatttttttgtactcgtaaacttgtctcatagtcccactgcatgcatgcatacatgttatgcaggacttctttctcttctcttcatgatggttgctctcccgatatgatatccatttaaaaccaattactttgaaagtttcaaatcatttttttctaaattatttatccaattaataatccgatcacaccattttattacttataatttaacatttacaataatatcttacatgattatatttttgacgtaaataattttgtcgacaaaacgggtgttattttaccacatacaaaaaaattgtttcattacttgaagtcaaatatttcaactcacttcataaaatgtttcaaactaatgtaaaatttaaggagtactaactacaacactggcaacaactacttgaacggtgggtcctaactagtgaaacatcaaaggaaataatatatttgcaaggaccacctttgctttgttttgttgaaatatcattatctatactccttataaatgggagtagtagtgatggtgattctaccaccaccccacactaattcccatattttttttaagaaaaaaaaggacatgtgaggttagcaagtgcaacattatgtggtaacaattgaaactactcccatcaactctacttttgtgtggagttaacaaggttcataaacgcaacattatgtggtaactattgaatcatcacatattacttggtgaaacattcatggattaccacgtgcaatatttgcaaatgaactaataaaatataagtaaatactaattgaaacatctaaataagtcagtgtaaaacattaaaaaatatatatgaactattaaagaaaactaaaaaatcacaagaatatatcatctaaaatcttatagtaattaatctacgtgctacaattaattataggatatatagagatgtgtgatgttggcttaccatcaaaagcacaactataacatcatttgtaattggcatcggtgcgccgccttccttctggagcctgagcaggacgtcgagagagcatgacttgctccccgccgccgccgtcacctgatcgccgctcgccatgtccgcttcaatttggtccctccgttcttgaatgatttgctgtatgacgcgctccatcttgttgcgggtctccagcgccctccgtggcgccgtcgcgaccatggacgcgagcttggacgacgggaagaggtcggcgacgctgagcgagaacgtctggcctaccatgtcgtttagcgcagccagatactcatcgctgtacttggaccggctcccgacggagcaccggagcacgatgtcgttgatcagccttgtgatcatctcggtgaggttcacggccgtgccgggcgctgcagcggcggcggccgacacgtcgcgcacgagccgcgccacctcctcctcgcggatgcgctggaacgagcgcacccgcgccgcggtgagcagctcctgcgtgagcagccggcggaggtggcgccaccgctcgccgtacggcgccagcgcgacgtccctgccgccgaagctgaacgcgtcggtgccgctggtcaggtggcggtcggcgaacgccaggtccttgctcctgaggatctcctgcgcggcctccggcgacgaggcgaccacggtgggcacctcgccgaaccagagctgcatgacggggccgtgctcccgggccagcctccgcatgacactgtgcacgctctcgctcgacgacacgaagtggtggatgctgccgatcagcggcagcgtgcttggccccggcggcagcttaagcctcgacggctttgtgtttgtggcacatgaaatcaccggcagcctgtgcctgtggcagactaccccttggcgcgtggcgagaagcaccatgtcgcccatgtctctagctactgtactacgtacgtgctagatagactactgtggtatgtgcagctttactctacagcattggatcgtgctataaatagccgtgtcattgcgttcttaatatctgccactaatgctggccttattctaaatttacggtcaattaatggaggtgtatactaaagggcagcgtggaaatatatactccctcttccatcccataaaaaacaaatatgatataatttaacttttttatttatagtatttgttttataactgagcaattttctattctaatcatccaattagaacacgctctttctccaaattttagcatgtattaatttagttaaatctgtaatttttgagtgaattaaatcaaacaaggattccgtgcacggtatacagatctcggatactcattaccgtgaaatatccagtgaataaatcaaataagtgaaaacccattaaaaacatatttaatgttctccaaattcatgaaagaaattacttgagaatggcataaagcatgaaatatattcattccaaatctcaagtcgaaactaaatttggttataaaatgacaaattttagatgaatagtgttggttaattaccactacaacagaaacacaaaaatacggcactttaggtgccgaaaattatagattagacacctatagtgcacttttcacccaagagcatgccaccgggatgcctttgggggagaatcagcacaaatgtggtgatgtaggtgccggtttttaaaggagctgccacctatgagtcctagctaggagatataggtgttgatttctaataagaactagcacctattaaattgtcattgttggtggattttaattaaaccgacacttatgtggaagaacaaaatcaccgtcccaccggtccgccaattagtcaatctccttcctcccctcatccttatcctctccgcccttcctattctctcccaccccctcatctttatccacactcccctctttgccagcccctttccatgccaaggcaacccttcctcctgactccaacgccctcccccccttcgtttctcaagcggatccatcaactacaacaaccgcagctcctgcgggcagatctagcggcttccgtgggtggatctagtggaggcaacatctcttgcaggtagatccggtggcggctatggctctctcgcatggaggtggcagtggcggcgatatcctcgacatcccaatgaacaacattggtaggcagaattctcttttgtaattagttctcctctacagtgagtgacaacacaacatctccttggagttggtttctgatgaatatttgatgaaactgttaaccgatatttggttgatatttatatgaattgtgctttcggagatgttattggattaatcgatggtggtatagaggtgatggggagcgactcgattcgagccaatgcatcgaggaagttcccaaatcatgccgcttcgtggtgctggttgaggaatccagtacctatatgggagttccagctagcaccaaagtatgtttacatagtgcactattcgcaagaaaattttgtttttattactcacaaataaagttgtgtatgaagttaaaattcggcgtgaatgtatcctgtgcctagtagagttcaccgtatatatcacgaataatttttttatgaatgtacaaaatgttttaggtctgtttttcgatttcatgatttttaccgtttatgtccctagataaatagcatcgtaaataaacaaattatgtactggtatataccacttaattagatagatagaaataagaaaaactagagttcacctggacaaaagcgatgacacttcttgctagacacatcgctttcttggacgtactctgctctttccagtaatggaaaaggcagcgcagggccgcatggcactgatggcagtagtgaccaaggaaccttcattatctcattttcatttctccttaccgagattgactaaaaatttaaactaacgatgagttttttttcttaatctctgtcctgaaaaatactccctccttccactaatataagggattttgatattttgcttgcactgtttgaccactcgtcttattcagaaaaatttgtacaaatataaaaaatgaaaagttatgcttaaagtactatggataataaagtaattcacaaataaaataaataataattttaatatttttttaataatgcgaatggtcaaacaatgcaattaaaatgtcaaaaccccttatattagtggacggagggagtacatatattaaatatataaattacgatttccattgtaaagtgaaatatctatcactaaaaactgttacgaaaacaagcatagaaaagtcgtttatattattcaacgtttcaatagttccgtttggaaaaaatgtaagaggtatagacgtgcagagaaccgctttctttttccaccgcttggagtaataattccaagtcaatcggcgcgtattcggaaaatatattgatggtctagcacgtacgagaaaattgaacgaagttcgagctgtcattttttttccaaacacgggttaaactgcgcggtgaaatatacacgtgtttaagtcatagatttgtcacatgttgtcgtatttacaactaatttatgatctgacatgcgtgctttgtgcaaatggtcatggagaaacaagagagaaccttttcttcttctctccttttagtcagagattatgttggcggcatctgggaatcctgtgagattctaatctcaatttcttccgaatagtggtgctggaagtcttcttcaatgttgcctagcatatttgcctagcaacgttcctttgaagcatggagaagtttgttcatgagagaagtgtgtagaatgaatgatgccctaggcaagttgttttttattggttacaaactttgtaattttttcaggtgctttccttgtaacctttttcttgtaaatatttttctttttaatgaaaatcacactctgagacaaagccctggcagtaattaaataaaaaaactgatcgaaattaaagctaatcgatcctctaatatacgaaaaggttgcatattaaacaaccctataatagtaatactatcttttctttgaaaacatataaaaattcacccccaacacctcccaccaaaatagtgataagtgggataatattcctaaggtggccagattatttatagtgtgcaatagaatatcggtaatgtaacaccctgaaaatttgaccaataaaagcaaaactctaaaaatacggaccttcgaaaacttttaacttaattgcatcatgccgatcttattcgcctattttatttggatttgtttttgaagttcattaatcgtgagtaaagaatagttaattaggaataaaccctaaaagtaaattggtaaaataaatataatctaaaataaagattaggtgtggatagaaataaataaaatattatcacgatcatattcgtatcaattaaatttaaatgcgatggaataagaattaaccctaattaaaaattcaaataaattatataaataaaatatgagtaatattaatttagggtgaattcattagttgagataacacaaatattgagtaaacttcatttatgcaagatttagaaattataaaatcaaatttatatgggaaataaactaaaatcgggataaataggaaaatacactgttcattatagcgtaggtgttcgatgcggtccctagccttccccctcctctcccacctctgcccctagccgccctgagcccgcgccgacgcgccatcgccgcttgccgccgcatgccgtcgccaagcgtcgcgcgccactgccgtcgccgcgttgagccctgcgcgccatcgtcgtcaccgtcgcgtcgtcgcctcgtgccccacgcccctgcctcgccgcacgcccgtcccatctcccatgccgcgcgccgtcggtgagccgctgcccccccgtttgtcgccatgccgccgggtagagagagagccgagagagagaagaagggagaagccgagggagagaaagaagaaagaaggaaggagagaaaccgggagggagagaaagagaaggaaaaagaaaagaaaagagagaaagagaaggaaaaagaaaagaaaagagagaaaagaggagagaaaaagaaaagaaaaaaataaatagaaattagtgggagattagggaagtttagaaaatttaaaataattagaatttaattatagattaattatagtcgtagaattgcaaaatttaatataaattatggattattcttggtaatttctataagaaatcaattcgcggtagtaatttagatgtaattaataactaaacaaatagatgaattcttatagattattatagattatttttgggtaatgtctataagtaatcgattcacggtaaatattcggatttaattactaggaattttagccgtgtattatatttaatcgtttagtcatagactaaattaaatcgtacaatattataagataattttaggattttgtccgatatttagctcgcgatagaaatttctaacctattatatggatataatgctcgggtagattaaattaaaaacttatggtaacaaaatatttgtatccgcaaaaatagtttaggatgtataaatcgaaattgggtttgccctagttcgcgaatagtaaagttaataaaaaaagaatcgactttcgcattcgacttccatttggatttatttggatttttatttgaattctaaccgaattcaaatcaattttcgcacgtaactatagagcccgagggagttgcggatccaagtgatggccaggacccgcaagactttgagcaaggcaagtcatcactattccttgaacatgttcatcctatttgcaaaattattttgtttacaaataaaattacacgcagtgataaacatcctacttgtgattatgccatgccttgattattgtttacccttaaatccttgtaaccatgatttacgtataagtccctaatcaactatgacaaatgcttagaaatgctactctagatttatgcatactcatatttatcaaaagctatatgcttgggcaattacctttgggaaggtaattgagatgcggcatgtggagacatgagcggcacattgccatgatgttgatgacatgatttgtgaaaggagaaataaaattaaacaactgttttcgactggagcggacggaggatttgggtggtatccggaaaaggctagtaccatccccggtcaattaaggaccgagacatgaagttaagcatgaaacgacccccgtacaaccgcacttctcgtatgggtatagacctagcggaatagatagctgagcggaggcagtatccatgcatagtggtttcttgatgtgtgaggcaggggctctacggtggggcagccattggtagaaccttgaggcgggtgtctacagtggtgtcgccatcggtaggactgccatgagagaatttaaacataattataacttaatgcatgtgtgagtcttcccttcccgggtgcgccagaactcctctcactgcaagaaaccgtttacgcctagagtgcatgaggatgtaaagttcatggagcgggtactgccaatgtgaggttatcgaaaagctttgccgtgacgcgtctcatgtgttgggacgaggctcatgtgttgggcagtcgcggagtgctggtaaagtgtacatccactgcagtgtgaataaaccaaatctagtcgaatagccgtgctagcggttattgagcaccgggacgtgtattacacttggctagactctaaattcttaacttgtgtgggatgggatattgcatgatgatttctatattgatggagccacttcttgagaggcgggaatgtggacgtcctcagaaa

SEQ ID NO: 23806 - DNA, 8619 bp, Oryza sativa
gtgtttattttagcccgttagagatgacgaggttgtgacggttcgtaagccccaagcacaggaaaggccattacagataagaaattctgtagtagtgccatatacactggtggagaaaccgtcgtagtcccggttggtatccccctttagtcccggttgtccaaccgggactacgaatcccagtttgtgttaccactggtgggactaaagatcaatctttagtcccggttcgtgttaccaaccgggactaaagatcggtcagccacgtggccggccaaaccatctttagtcccggtttgtgttaccaaccgggacaaaatatcggtacaccatttttttttatttgcatggccctgtttgctgcatggttgattatatatatacatatatacacatacatatgttacaatacatatatatgcataatatataagcatatatatatatatatatatgtgtgtgtgtgtataaatcatatattacacacatatgtataatttaaagcacttaacgttttatgtgcatatatgttaccaaaatatatattaacactaaagtaatgtgtacatatataaatatatatatacatgcatatatagtacaattcatttgctcggtagctatagctacgacatcgacgtcgacattatgtcagaagaggaaggatcgacgttatgaattgtcgatccgtcgtagtagaattcaccatcgggaataaagacttcttcgttgatgaatcccatcagttgttcttgaacagccgtgataaaatccttgtgtaggagattatccctcatgtgaatacactatcattcgaaaaataatgacgtatcaatatatgaaattaataaacaacttaacaaatcgatacgcaatgaaattttgaatagtttatgtatacatacattgagctctcgtgttgtgcatatttggtttgataggtagtgggcatactcgcatacgtagtagccgcataagttagttccctggtcctgctttgcatactacatgagaaacgatgagagatttaatatactctttatattaactgtaattagagattcaattcaatataattttggatcatgcatgtactcactagaaaatgaaacctccgtccaagtttttctatccaagtcccgcggaccaattgacggaaccgatcccaagccctacatatacagttacatgctatgattaattaattattacctgagatcaacataatagcaatagattccccgcgactttggaatagatggcattatattacctgtctatcagtttgaagaccttgtcaaaaatcttctcctctttattcattgagtcgtacacagtgactctgcatgcgtccaagtcaaagaataacaagacccagtggaatctagaatatgcgtgagatgagatatatatatgaaaatgtacatgctatatgtgtgggaatgaaatttgtttgaatgacaataaaaactcactctgtgttgtacggcagtagtatgtacgtcttgaaatgctgctgcgttaggagatggacgagattgtcctctatgtctttctcgtacttgtcgatcatttcggtgttgattttccgagggtcgatgaacccagtatcgtagaccctccaccgtcggccctttgaatctccattctacaacgatgaaaggaaattgttattgcttacatatatgccaggagctaattattgaacgaaacaaatcgaactcaaagatactcacaaaatccaagcgctcagaagagagacgtcgagggcgtccagctagtatagatcgaagagatccttgaaatggatccagagaacatattctccttgcaagaagtcggggtttctgatcctcgctccgaacatctctctacccttggcgctcatttccatgtaccgttcatggaatttgtacatctgtgtcggtagggactgcagctgttcaggtttgacaagcggtttaccgagttcaaacttgtatgccacatccgccttcgggattggtgcgcctcgaatcagctgatccacagttagaccggtgtctaaaatgaattccgttatgccaaaatcttcgccggtcaccaacggctcgacctcttggtttggttgttctccaagctaagggactggtttggacttcttgtgataggctctctgaagtgttcggtcatagtccaatatctgtaacgcctcgttgtttgttgcggacattcccttgaagaagttcttcacgctcgggtcaaaaggtatcttcttttcaggacactgtcacgcccggaatttctatccaaaattccaaacgcttacatgtgtgttaaaccctcgtccaggaatcaaccgaggcacacaataacaaattgataatagagtacaaattaataactacttaatattcgcaaataataaattattacagaggtagatagttcctctcaaagaataacattctatgcagcggaaaaaaaataaaactataacaaactacggaacagctatggcgactccactccacaggcatcttaaccagaacaagcctaatcctccagatcatcaccttcactgagatactcctcttctaatgaatgaatattgcaagaatgagcatatgacatactcaacaagccacacagcaaatatgcaagtgcacaggataacaaaggatggcataatatagctcatttgcagaaacagcatttaacaaatatttaagagaatatttaaacagttgtataattaatcaatattaaataaacaccatacaacacacccatgttgcataggcccaaccacatttgaacaaccaaccccagttgaacaaattaaacctccaaaccaggaattatccattccaaaccaggagtcaaattaattatcacattattaccattaatgagtagtgtgagactaatcacgaaaaacattgctcaactcacccataaccgcgggtacggctattcgaatagtttaaactctgatcagaggtgtaccactgtacccacaagacacaatcccacaacatgttaccatgcgccttagtaccaccacgatacctcggaaaggaactgtgacaataccccttgcacaacacaactcaccacagtgcaccatacctggatcataatcaccccctctacaaccagaggcatggactccccagcgacccccacggacttctcgccgcttctcagtctggcactccataatgaatcatgctatacaaaaggtaaagccgttgcccacgttggcttgtggttggcacgataaatgtttcacaacagtagctcgcgaaccggtcctttattgtcatgagcacaaccatcaaaaccatatgctcacaacccaccttatccaggttttaattatcaattaattaacatcacacgataaatcatcgtgagctaccacttaacgtaaccataattaataataataattatattatataatttatatttaaaccctttagttagctaatgtttctaagcatggctaagcaaacttacatatagcatttagctgaaccaatccaatatataaggttcatgctaattaaattataacccataggaaaataagatcatcttcggccattaattaactggggaaggttcaccacccgatgacattcgaaaacgatgcataattgaaataaaataatagctttaaacgggttcaacatgctcaaagggttgtttgggatctgtgtgacttgccttgggcttccgcaaacgcttcggaaccttcctcaacggaaacgctctcctccggaacgtcggaaactaaagcaattaaacaaaaattaacaaaacagtacaaaaaaagcataaacagtacatgtggatatttttaacatgtagatcttgattttagaaaaatttagcaacttgaaccacctgaaacggatctacggttatttagttatgattttccgaagatttaatctattagaaaaaaaaactggaaaaagaagaagatgatgatgccatgatgacgtcatcaatggccggcccgggttggcgacctcgccggagattggatggtcggctgcgactttggaggacatgtacacgtagaggacgacgagacgaacccgacagtactcaccctcgagccaaacgacgaacgacgacggccggcgacgaagaggacggcggcggcggcttggtcgacggcgacggcggagctccggcggttggctgcgaagggggacgggtggccgagcttccccacggcttggcgcacctaaaggcgatggcggcgagcggcagcgacggcgcaagcggcggcgcggcgcggctgagcggcggccggcgacgacggaggactaggcggcggtggcgcggcggctacggagcacgggaaaggacgggagatggagcaaacgaaagaggaggactagggggtcctatttatagccttggattgaagagatcggactcctcccgcaagaaatcgactcgggaaatcaaaaactcggttttagagataaactcgaaaacgagttcgattcggataaaatacccaacgatttgctccgattcttgagggtaaagatagaggaggatgtggggataaaaacccctcaaaaatccggactaaaagtggagagattggggcggattcggaggcggaaggcggctcggtcggccggctcgggctcggcttgcagccggccggaggttgaaggaggccccgacatgtgggccccacatgtcggcggctcgaggaggagggggcgggcgacgtcggctgggccggcttgggccggttcgcccgcgcgcggagagagaaagatgttgggccaaaaacggcccaacggctttagggaggagttttggaactttttaattaaaataatttgtgaaatgatgtttcatttattaaaaatacttcccttgctcaaacaattcctagaaaaatctagaaaatagaggagcaagtgtagtatttaataaaactttatctagctcatttttttgttgaaaattttcctaaataattagggtttagcttgtaggcttttaaaaaaataatttctaaaaaatgatttaaacaatgcatttttaatttaggcgatttttagggcgtgacagacaccgaggcttgagttacctcttcacttctcctgccacataagcatcaagctcctcttgactgcaatcgtacggtggccccttgtttttggtggcgtcaactctcaccttcttcgttgcccttgtgcgggcaggcggtggagcttggcgagaccttgtcttgggaggtgcaggcggacacggtggaggtggaggagccggaggagatggtgcaggaggacgtggcggaggaaccggaggagatggtgcaggaagagatggcggagccggaggagatggtgcacgagacgccgcttgtcgcctagggaggatgatgtaccgcttgcgccatagtataatggtgtggcttgtgtctcgtagatgcgtctcaccgtctcctcctgggtagtccaactcgaggtcctcgtacgcagcttccactagctcaacttcgaccctcgagtatcctgctggaatcggcctgcagtggtaagtcctggaagggtccgttgggatggccattcccgacgccaccttcacgtgatgagaggttatctattagtaatcaacctaagcagcaacttgcagaatgtacaagtcaaaaatcatcaaactacgagcataccttgattgataagttcttgaagggaatatgcagctcacatggtgtccactgcgtgatctcatcaacggggcaggtggtttcgtcctgggtttgcatggcgtccatgctctgtgatcctacctgccccgttgaggtgcagctgctatgattgcctgatgggctgaccattgcaggaggaatgtacggctggggatcctaggaccaatgtgcggccatacgttcatccaccttccttgccacctcctcttgcatgctgagctcgtagctcaataccctgtactcaagatctgcaatcttcgcctcggtatctctcttgctcctcatccgactcctgtatatgtggatgtcctccttaaatccaatcttccaggggatcacgcctttccctcgtgttcgtcctggatgctcgggagtctgtagggcgagtgacagctcatccttctctctatcgggtcggaatgtgccctgagaagaggctaccactgcgtccgttagttgactggcagcctcgcgtatctgatcgctgaagacaagggagccatcaactaggttaagcgttccaccatgagcatagtaccagaactttgatcgatccgatccggccatttagcggtggccggttcgatacccctctcaatcaaacttgcctccatctcctcccacttcggcattgcgacgctatatcagcctgaccccaagtggtgatggtacttcttggcggcattttctttgtttctagccatcatcgcttgcccttgttgccctgtcttgtaagcaacgaacttgtcccaatgatctcttagctttggaaatacgtcgaagttcggtgttagttccttcaggatgtatttcttgtagagatctcccttgaagctctggaactgttctgccattttcttcagagtccaccgtttcactatgttctccgtacccgcgggtagcgtgaacgtctcgagcattgtggtccacaacatctctttctctgagtccgggacaaagctgtcattatccctgcatgcccatgttctgcgccagtacaccgtgctgacaggcacgttgtccctcacaacccaaccgctgtggcatacaaaattcttggttgcttctgccggggcactaggtcggccgtctttgtccatctcagttatgatgtgccgaccctctatcttcttcgtggcacctcattgtcagtgtgccctcttctgtccggcgaagggatgacttccactagcctcctcctaatagttcccctcctcgttcccctccgcatccctctccacgttcccctcctcgttcaagtactggtttggatcctcattcccctcttcttcgttccagtactggctacttccctctgcgattgtatcgtatagtatatgttcctcatcgcgatcagccatctgtgcatacaaaaaatatttgttaggtctagaggatgtatttgctaaccgtaatattaaaactctactaatcttatattaaatctctaataatcttatattaaaattgtaataatcatatatatatatatatatatatatatatatatatatatatatatatatatatatatatatatatatatatatatatatatgcgctaggtctaacaatcttatattaaatctctaacaatcttatattaaatctctaataatcttatattaaaattgtaataatcatatatgctaagtctaacaatcttatattaaattgctactaatctaatcttaaaattgtaataatcatatatatatgctaagtataacaatcttatattaaatcgctactaatcttatattaaaattgtaataatcatatatatatatatgctaagtctaacaaacttatattaaatcgctataaatcttatattaaaattgtaataatcatatatgctaagtctaacaatcttatattaaatctctaacaatcacttcattacatcacttgcctgcgcgaattccttcgatggctagttaccacttcggcttgagggacgacgacgacatcttctctgcaacattaccaggaaaatgtattagtctaaacgggccaagttacatatataatcatatatgtattaccaggaaaatgtattagtttaaacgtgttcgttctcacacttttagtacaagtgcattcacgttcgtaagcatttcgttcatgttcgtaagcgtttcattcacgttcgtaagcatttcgttcacgctcgttcgcgttcgttaacgtttcgttcacgtccactcgtgtttcgttcacgttcgttaacatctcattcacattcgttcacgttcgttaagcgttcgttcaaggtcgtccacgtatcgttcacattcgttcgggttcgttcgcgttcggtcacgtttcaatcacgttcgttcacgttcggcaatgttgggcgcgcgcggcagtggcgtggtggcgcggcggcggcgtcggggcgccgtgggctggtccagcggcgggcgggcgcggcggcggcgtggcgtcgtggcggcgtggcgagctcgaggcgggggcggcggcgtggtagtggcgacggcaacggcggcggtggcggtcgcgtagaagtcggtcgtcggcggtggcggttgaccgcggtgtggcagtggcgtcggcaacgagctaggcagcggcgatttggagagagagagagatcgagattgagagagagagagagagagagaggtagtggcggctctcacccaagagaggcggcagcggcgtctgcggcggtggcggagagcaccgccaagggacggcgagagaagacgatggcgtcagcgcagggttgccctaggcacggtggcggcgaaggagaagccgagatcgatctcgatggaaaaacatctaagtattggtggagaagacgagggtgtaccgggaatatatataccccagatctttagtcccagttg

SEQ ID NO: 23807 - DNA, 7068 bp, Oryza sativa
tctcaccaaccgggactaaagatcttttcccgctatttccaaattctttttaaacccggttagggttaagaactaggactaaagataatagcagttgtgtcttgaatttcattgcatatgtgtttctaaaatagtaaataatgcattacaattatttaaagtcgaacaattaatgacaaaacctttgaaaattatttgttgtatgtagtagaataagtggataatatataataagcacatgaatgatttaaaattgttaaaaattctaataatcatatataattagcatatgcatgatattaaattgttaaaaattctaattaacatatgtaaatagcacatgcatgattaaaattaatacaaattctaataatcatatataattagcatatcatgatattaaattgttgaaaattctaattaacatatgtaaataccacatgcatgattttaataaaaaaaaatctaataatcatatataattagcagatcatgacattaaattgttgaaaattctataacatatgtaaataccacatgcatgatttaaaattaataaaaaatctaataatcatatataattagcatatcatgataataaattgttgaaaattctaattaacatatgtaaataccacttgcatgatttaaaacttttaaaaattctaataatcatatataactagcatatggatgatttcaatttgacaaaaatttctaataatcatacataatttataaaaaatctaataatcatatataattagcatatcatgataataaattgttgaaaagtctaattaacatatgtaaatacaacgtgcatgatttaaaacttttaaaaattctaataatcatatataactagcctatggatgatttcaatttaactaaaattctaataatcatatataattaataaaaaatctaataattatatataagtagcatatggatgagttcaatttgataaaaattctaataatcatacataattaacatatgccatacaacaactgatttgtatggatattcagtacattcaacatagtttacatcgtgtacacaacaattacgacaatacatcggcggtgacggttgactgcatgtactttctcctcactattgttccttccttgtgattgctacgtgagtaaggagtgtcttcatttgataggaggattctagggtcaatcgtcaccgtgaaagggggttgcgcatcaaactgatcgtaatcctcgtcagtcttttcctctactccgacgatttttctttttcctaggagaaccacgtggcgcttcggctcgttaggccctttgcccttttttcctttgctagacatgtccttgacgtaaaaaacttgcgttacatcattggcaaggacaaaaggttcgtccgagtatccaaccttgttaaggtcaaccgttgtcatcccactgtcatcaatagttacgcctccaccagtcaacctaacccattggcaccgaaacagagggaccttgagatgtccatagtcaagttcccatatgtcctcaatggcaccgtaatatgtgccagttgtaccatcgtgtcccatggcatcgatacgaacaacactattctggtttgtgctcttcatgtcttgggccctcgtgtagaatgcgtacccattgatttcatatctctggaatgtcgcgatcgagccagatggtcccctcgccaggaaggctagttgttggttaatcgtctcgttacccatgagatgttgacgcagccacgtggagaaagtatcaatgtgatgccgtgtaatccatgcatcggacttaccgatgtttctggtgcgaactagagccaagtgctcctcgatgtagggagccaccaatgaagattgttgcagaaccgtgaaatgggctttacgaaataaattgttgtctaccgtcattattgctttccttccgagagtcccctttccccgtagtctcccttcatggcgtgattcaggtaccccgattgggcgaaggtcttcgataaattctatgcagaattcaatgacctcctctgttccataccccttagcgatgcttgcctctggacgagcacggttatgaacatacttcttcagaacgcccatgtacctctcgaaaggaaacatgttgtgtaggtacacaggaccgagaataccgatctctttgacaaggtgacaaagtagatgcgtcattatattgaaaaatgaaggtggaaatatcaactcaaagctgacaagacattgcaccacatcattctacatggcttgtaatctatacggatcgatgaccttctgcgaaattgcgttcatgaaagcacatagctttgttattgttgcccggacattgtctgggaggataccccttattacaactagtaacaggtgtgtcatcaacacgtgatagtcatgagactttagatttgtgaacttcttctccttcgtgcttgttattcgctttatattcgtggagtatccagacggtaccttgatgctctccaaacattcaaacatactttccttctttgccttgctaagagtgtagctggctggactcaagtaatggcttcctttctcctttggttccgggtgaaggtcaccgcgttgttccatatgcttcagatcattaagtgcttccagtgtatctttcgactttccatatacacctaggaagccaagaaggtttacacaaaggttcttagtgaggtgcatcacgtcgattgcgtggcggacgtccaagaattcccaatagggtatgtaacaccctaaaaattcgacgacaaaatctaaactctaaaaatacggaccttcaaaaactttttaaataaagttgcatcatgccgattttgttcgattattttaatgaattttgatttcggagtttataaatcgcgaataatggataattagttaggagtaaaccctaaaaagtaaattgaccaagtaaataattaaagtgcaatttaaaataatatttagtgaggatagaaatgagtaaaatattattacgactatatttgtatcaattaaattgaaaagtgtcggaataagaattaactctaattaaattcaagaaaattatataaaaataaaatatgggttaaattaatcaaggatggacccattggttggaataacacaaatattgagtgaacttcatttgtacaaaattaaggtttatagaatcaattttaaataaataaataggcttaaatcgggtaaatagaaaacggcactattcatcggccgccaggtgttcgacgaggtcccctagcctaaccctgcgccgctgccgcaccgacgccgcgcccgcgccccacgcctcgcgccgcgcaccgccgctaccgccgtcgccttcggccgtcgccgtcgccgctcgcccgtcatgtcgccttgcgccccgtgccgccgctgccgcgctgtcgccgtcgccgtcgcgacccgcctcgcgccgcgcgccaccgctgccgccctgtcaccacccgtcccgtcgcgcgcgcatcccatcacccgccgctgcgccgtgcactgtcgccgtcgccgtcgccgtcgccacgtgccgttgccgtcgccgcctcgagccctacaccgccgtcgccatcgccgtcgcgccgcgccgcgccgtcccatcgccgcgcgtgtcccgtcgccgcacgcgtcgcatcgccgcctcgcgccccgcgctgccgcgccgccgtcgcatcacccccccttcaccgccccctctctctcctctctctcacaccctataaaacccccagccctttttttttcccccacacccatttccccccatctcctccctttttaccacgccaccgccgtagtgccgccgcaccaccgccttcgtgctgccgggccgctgttcccgtgccgccgcgccgccgttcccgtaccccgcaccgccgttccagcgccgccatgccgccactccagcgccgccgtgcgccaccgtcgctgccgccgtcgtcgccgctgccgccgtcggtgagccgccctccgttcccctcgcgtccaccgccgccaccgctcgggtgggagagagagccgagagagagagagagagagggagaggaaaagagagagccgagagagagagggagaggaaaacagaggccggcagagagagagagagagacaaagagaggaaaagaaaaagagaaaaaaaaagaaagaaaaagaaagggagaaaaagaaaaaggaaataaataggaaattagagggagattagggaagtttagaaaatttaaaataattggaattttataggttaattatagtcatagaattgcaaaatttaatatgaattatggattattcttggcaatttctataagaaatcaattcgcggtaataatttagatgtagttaataactaaacaaatagatgaattcttatggattattatagattatttttgggtaatccctataagtaatcaattcacggtagaaatttggatttaattcctagggattttagccgtgtattatatttaatcatctagtcatagactaaattaaatcatataatatttctaggatttcgtccgatattgagctcgcgatagaaatctctaacctattatatggatataatgctcgggtagattaaattaaaaatttatgacagcaaaacatttatacccgcaaaatagtttgaatcgaaattgggtttgccttagttcgcgaataataaagttaaaataaaggaatcgactttcgcattcgactttcatttggatttatttggattttgtttgaattctaatcgaattcaaattgttctttcacacataattatagagaccgagggagccgtggatccaggtgaaggccaagacccgcaagaccttgagcaaggcaagtcatcactattctttgaacatgttgatcctaattgcgaaattgttttgtttacaaataaaattgcatgcaatgataaacatcctacttgtgattatgccatgccttgattattgtttaccccttattccttcgtaaccatatttacgtatgagtccctagtcaactatgataattgcttagaaatgctattctagaatcatgcatactcatatttatcaaaatgctttatgcttgggcaattacctttgggaaggtaattgagatgcggcatgtggagacatgagcgccacattgccatgatattgatgacatgatttgtgaaaggagaaataaaactaaacaactattttttgactggggcggacggaggatttgggtggtatccggaaaaggctagtgccgtccctggtcaattaaggaccgagccatgaagctaagcatgaaacgacccccgtacgaccgcacttctcgtatgggtatagacctagcggagtacatagctgagtggaggcagtatccatgcatagtggtttcttttaggtgtgtgaatcgacaagcagtctactggcggatgccctgtcaggagggccagaggctgacttgcagtctactggcggatgccctgataggagggcctgagattgacttgtagtttgctggcggatgcccgttacggatggccagagactgacttgataagactacgagaaggaacccaaaagaggacagctgaaatggattgggttcaactaccggatgcaatgttaggaatgcatgtgtgagttttccctcccaggagcgccagaactcctctcactgctagaaatcgtatgacgcctagagtgcatgaggatgtaaagttcatggagcgggtactgccaatgcgaggttatcgaaaagctttgccgtgacgcatctcatgtgttgggacaaggctcatgtgttgggcagtcgcggagtgcgggtaaagtgtacatccactgcagtgtgagtaaaccaaatttattcgaatagccgtgctcgcggttaatgagcatcgggacatgtattacacttggctagactctaaattctttaacttgagtgggatggaatattgcatgataatttttgtgctgatggagccacttcctgagaggcgggaatgtggacgtcctcagaaaatcataacgactcaatggcgggaagctatccttgggatcacaacggatggtggacagaaccgtcattgtttaatatgaacaatggtattaaaacttgattagtctttgctaggtcttagacttgtgaaaagaattacaaaacttgctttgcgcaaatgaaccatagccatcctttgaaatcctctgtcatgtgcatcattgctgtggtggcttgctgagtacggttggtactcacccttgtaaatataaaattaatcagaagcgggagatgaagcttcggaggatccctatgcctactaccaggagggagatgaagacgaaggcgcccagaaggtcttagtacggtcgttgcctgtggcaatggcgagccgctgcctaaattctgctgccttacctatttctgcttttggatgtattccggatcgctcggtctgatgatttaagactatgcctacaggcttatgatgtaataattcgtactagacattcgtgtatgtgtatttggtatttcagctatgaattcgtgtgtaccagactacttgatccagggaaatggtactgtttacacgattgattcctgttataaaaacgggggtccacagggtaactcccaaaatatagagttctttttccacatcgccgcgtgaccatcttcactctctataggctggttgccaggcccctttccaaacactactttaagatctttaactatagcaaacattgttttcccattgcgatgtttaggcttcgtacggtggtccgccttatgttaaaagtgattgcctttcttccgtaccaggtggtttgctgcaaggaatcgacgatgacccatgtacacaaccttcctacagtgcttatgatatgtactttatgtttcatccatacagtgagtgtaagccttgaaccccttgttggactgtccggataggttgctaagtgcatgccaactgttgatggttacgaacagcagcgctcgtaggttaaactcctcctgtttgtcctcgtcccacacgggacactttccttcgtcca

SEQ ID NO: 23808 - DNA, 12582 bp, Oryza sativa
aataccacatcaccttagcaggaattctcttcttcgttagctgcccgtcaacttctcctggatcatctcgtctaatcttgtatcgtagtgctttgcaaacagggcatgcttctaggttctcgtactccttaccacgatataggatacaatcattcggacatgcgtgaatcttctgaacttccagtccaagagggcagactatcttcttagcctcgtacgttgtctcgggcaatttgtttccctccggaagaatgttcttgacgagttttaataaatcgccaaatgccttgtcactaacaccattttttgccttccattgcaagaactccagagtggtatccaactttttgtgcccctgctcgcaaccttggtacaacgacgttctgtggtcctctaacatcttgtccaatttatgagcccccttttcactttcgcaatcctacttggcgtcctgcaacatctgaccaagatcatccgcaacgtcgttaccaacagcatccctttcctccccgcccgtttgatttccttcaaatccagcgtagtgagcaaagtctgaaatattgtcgtcttccacttcatcttcttccatttcaacaataatagcttggcatgaaccccgcatcaaacaagtggaaatgaatagtcctggatacagaatactccttctgattcttacacttattgcatggacaacaaataaaacccatttgcctgttagcttcggccactctcaaaaaataatgcacgtcgtcaataagctctttggaccgctagtcagcgtacatccattgccgatccatctacatgacatgaaaaaaaatcgtacacaaataattattcgtacaataatgatagtcatacaataattataaaataattacaaactctttcaacagtcacacaataatgacatatcattattcatacaaaaattatgaaatattacaacaaataattcttatttactatttataaagttttaaactaatattaatgtgttgtacttattttaatttttcattttagtttgttttctattattcaagataaactttcactatattttccttctcaactattttataaaaccttctttagcaaataaactaaatttctatatattcttccttccccacacaaattttctctctcatcaacttacaacaaaattttggagacaaaaaagtgtgtaaaacatagctccaaatgtaatatgacaaaaaaaacattggaggatgaagttgctaaccttttaggcacctccgatttgtatataatcaccaaaataaattcactagaaattttggcattacctcccctcttttttgaagaaattttgaagcttacttaggctggaggagaaagaagacatatatataggggtgggactttagtcccggttggtgttatgaaccggggctaaagatcgccggggtaacaccaaccggaactaaagttacgatctttagtcccggttggtgttaccaaccgggactaaagatcccggggggcctgacaaaccctgacagcatttgaaccgggacaaaagatgatctttagtccatctgcccgttaccctttttaaccgagactaaagatcatctttagtcccggtttttgttgcaaccgggactattgtggaattaggccgaccgacgaaagatggtttctccaccagtgatacgggataatattgctcatgtgtagaacttgcaaagctgcattattataccgactgaaatgaaacatagagaaatgaccgctagtagctactagctagtatcttagagcagttaatacatagaaaatcagctagcaaatacaagtgaataccatattgctataaggctgtgtttgcaggaggcagttaccaacccaaacactgggcacggaaaatagactgatccattaggacgtgattaattaactatttgttaaatttattttcaaaaatagattaatttaatttttttaagcaactttcgtatataaactttttgcaaaaaaacaccgtttaatagtttgaaaagcgtgtgcacggaaaacgaaggagaggggttgggaaaggaggcatccgaacacaccctaagtatgcaaatctaaatatatgttaacagttcttaccatcaaaactgagtctgcttattatttcaaaagataactactccctccgtctcagaatataagcttttcttagagttgtgcacggttattaagaaagtagttagaattactgaaaactgatctttgcccggatggcaaagatcacattagtcccggttcaaaatcccaatggcacattatgatctttcgttccggttggtaaacaccaaccgggactaaagatgatttttaatctcggatctaaatgttgtcaggcccccactatctttagcccgcacgcctcccctcgcccttatctccttggcacaccacacgcactgcacttctccctcccctcctctcctttccctctctgtcggctgaggtgatggcggggtgtccgcggcagcgggtaggaggcgcccgagatgaggcggcgaggggcgggtggtggcagcaccctcccctcagcaggatcctgcaggaggggcggaggcagttggcgcgcggcacatgaggggagagttagcgggcggtggcggcgccctccccttcgctggatccgacgggagggaggaggcaggcagcgagcaacggcagttggtgaatttttgtgaatttatttagatgtttttctgaatttgtgatgtcaatttgatccgtgatgttcattcgatctgttaatctttgatgtcaatttgatctgtgatgttcgttcgatctgtgaatttattatgtcaatttgagtatgttaattcaatctgtgaatttgtgatgttggagagttcatctcaaaagcaatatgcaaataggaaagaaaacaatgaaaaaaaggaaaaaacaccaaccaggactaaagatagatgttttgccctgattatttcaaccggggctaaagatgcccatctttagccctggattaggcgtcccggttgtatatgcggaactaaaggaggctgtgaaccggagctatatattattggccagaggaagtaatttattgcatgatgatcattgtcgaaacaatattttagcaataacaaaagggggtagcgcaggagacctaaaagtggggagataaggatttagacaggttcatgtcctctcgatgagaggtaataccctactcctgtttggggatttgaatttgccaggtgtgtattgatctgacgatctaaggtgctcatatgcccctagaggcctcctgcccaccttatataggatgggggcaggattacaagatagaaacattaaccaatacggcattggtttcctaaatctattatcaaaccaggactttaggccgttccgtaatatacgatgaaacgtaaaacccaagtcatgatccgttacatatttcatagatataagctatcccttatgactagtgctttaatcatcttcgccatggtctcccgagtacgtacttttatcaaatctgaagactgtggagggctgaaaaataattcaatgtaaacttaggtgcatcgactagatgcacctaataggtgtagccccccgactatgtggttagttgaacaaaccaagcatatagtcaaggagtaaataatccaaccaactgaatggtttttgatagttatagtcaaccaagtgacttgatattaatatatagcatatgcggtgtgaatccatgaataatatgatctgagtgatatatcgactgctttgtaaaatatgatgcgtacaacctaaagttgactacatcattgaaaattcacatagcaaaacagctataaagaatcttgtatgttatgaataaagtaatttccaaaacattgtgcacacaccatgcgcacactgctttaacagatgtacttaagtccctgaaagacacatggtttcaccatacctggaaatatagggcatacgtggttcaaaatccgagtaaactaactcataaaggatttaccaaccacctggaaaatgactgaaatatataatcagcctaagccataatattggtcaataaaaatgcacacttacatggcaaaaaacaacgacatttgtcacaccctaaaaatttaaaatatataaattgttgtttaaatggaattgttagaatttattttaaaagcctagaagagaagatctaattttaattaataaattccaatataaaatggggccagataaaatttcattaaatactttgcttaattctataattcctagatttttctgggatttatttgagctaaggaagtatttttaataaatggaattgcatttaagaaataatttaaattgaaaaaggttttaaaaagtctcttttggctttgggccgaaaatcggcccaaaaccgctctctctctcctcggcccagtccggcccagtccgcagccgcgcgcgcgcgttcggtcgctgacaggtgggtcccgcttgtcggatccatcgtcttcgtcgcgccgccgccgcccgaaaccctagccgagcgccgccgccgtctccttccaaaattcggtcgatcctttccttctctggccgaattgatagaggggaaacaatctccgggatctcctctaccttttcccctttggaaacatcggctaaatcggcttggaaagtgtttgcttcgaggtcaaatcggatcggcttttctctctccgagcccgatctttccttctcgtcgccagtcgccgtgggccttcgccgccgcctcctagcccctttaaaagcttccccggtgtctcctctacccgccgccaccctcgccttcgcctcttgtcgtcggaaacgccctagcgccgtgtgccctagcgccgccgtcgccgccgtcgctccagccgtgcaccgccgtcgttcccgtcatcgccgtcgctcgggaagaccgccgtcgtggtcgccaagtcaccgccgtcctcgtccgccccttcgccgccgccgaagaccgccggagcaccgtcgccgccgtcgacccgatcttttccggcgcttcctcctcgtcgccgtcgccatccgttggtcttccgccgctcctttggtcaccggtgagttcgccgcgtcgcgctctacccgttggtgccctccgttcgtgccgaagcgccgccgttcgccggcgagtgtgcgccgtccgagccgccgagccgccgccgccggtggtgacgtcatcgccgacgtcatcgtggccgtctgccgtgagccgccgtggatccgatcgatctcggccgtccgttttggatcaagtcgatctcggccgtccgttcgcgtgaaccgccgccgtgcgcccggtccaccgcaaaccctagcccgctgacgcaataatcctcctttttcttttcaaaaataattcattattgcgtcataattcaattaaaatcaatttaagtgttttaatccgatttaatcttcaaaaattcataactaattcatcttagctccgatttagttggttcaagtctctaaatttttctaaaattgagatctacatgttaaaaatatccacatgtactgttcatgcttgtttatgtgctgttttggtgtttttgctcttttctgtttagattccgtcgttttctcccggagaagaatttgaagagttccaaggccagcaaggcaagtcacacagatcccaaacaaccctttgagcatgttgatcctatttaaagctattgtttctattcaactattgcatttattttcgaatgtcattgggtggaattaacctattgtttgttatagcccttttgttcttgattactttattccttgataccttgggttattataacttgactagttgagctttatattggttcaactagatattagatataattgcttagccctgcttagaaacattagctcactattgggataacttatgactcactgttatttaataatggcttaatgatagttcacgatggtcaatcgtgattggttaattaattaatgtgccaactaaaaactgataatggtgggttgtgagcacatggttttgttggtcgtgctcatgacaattaaggaccggttcacgagtttcggttgtgaaacattaaccgtgccagccacaagccagcatgggcaacgtctttatcttttgtatagcatggttcattgcggggcaccagactgagaagtggcggagataagcccacgggggacgctggggagtcaatgccttgtttataagagggtgattatgatccaggaatggtgcgctgcggtggattgtgttatgcaaggggtattgtcacaactcctttccgaggtaccgtggtggtattgaggcacatggtgacatgatgtggggttgtgtcttgtgggtacagtggtacacctctgatcagagtaaaactattcgaatagccgtgcccgcggttatgggcgggtcgaacaatgtcttttgtgattagtctcacccttctcaccatagtaaatgatgctttaactggtaataatttgattagctcctggtttggaatggtatattcctggtttggagatagaactgtgcagccgggatggttgttcacaatggttgggcctatgcaacagggtatgttgtatagcgttggattaatattgtttaattacttaacagttttattaaattctcaaatgtttgctaaatgctgcttttgcaaatgaaaccctactatgccattctttgttatcctgtgcacttgcatatttgctgcgtggcttgctgagtatgtcatatactcaccttgcaatcattcatcagaggaagagttctacagtgaagttgatggtgtggaggattaggtgtagccttggtcaagctgcctgtggagtggagccgtctgcgccgtttatcttattttccgctgcttagatcttcattgattgagaggaactatctacctctgtaatgacattttattcgcttattaattagagtaataattgtactctattatcaatttgttattgtgtgcctcggctgattcctggacgagggttcacacacatgtaagcgtttggaattttggatagaaattccaggcgtgacaagttggtatcagagcctccttgaccctaggttatgccaaatggttacccttagaagccctctaaaagtattggaaaagtagaactgttctcctccctttctcttttaattaaaccaaactaatggcacatgcacttcataattttttttagtggttctcattcaaaaatttattccagtgttattagtactgtacatctattactgtactaatggctcatattccagcaaaagttttacaatgtttttttatttaatcctaatgtaattaaataaatttagcaagttgattttataactttcttttatttcttttgaaacctgttgttcaaaagtacaaaatttgtaacctggtttccaactgtttcaacttatcttgcaagcttggtttactttatttacttacctttttactttgattttctaaactttattcaaattaatcccaaaaacttgtgctattaattggataaatgtcttaactccctcctttcacttgtctttagatgccgcgctacaagcctgagtacttgtttggtgttgagggttttgtccaggagttgcgtacgatgtcctttgtcattggatttgggactgcccctttttatgcccagattcctcatgatcgtcatgaatagaagtgccgagtcaaagtcaccttgaacagtaatagtgaagatattccatcagtgatgttcgaagctggaggaagaaactacatccatgcatgtcaggaggtggcaaggatcaccataggagagctccgtgatcgctatagtgatcagttggccgacactgagtatcgctaccatcctcgccaaccccagggaagtgaccgtggcagttaccttgagactgaaggaattgagaatgatgctaccacgaggcatttggttgagatgctgtgggctatggatgaaagccgtgcggagactgtgttagcggctcaagatcgtgaagaccggaatcgtggtaagatttgcaagttagaagacaaggtggatcgtttggagaaggaactagctgcgttgaagggagaagcaccgccgcagaaggccaggattcgtcttaccgcaaggaagagagctctatttgtccctcgctatcaattggcgccaaaggtccgtgtggtggagaaagaagttgccccaaccctagcggatcctccggtcattatcataagtgatgatgatgaagaagaagaatccaagcgcacccattccaagattgagtgggtatctacccaagatgatgaagacgagccgaacgagccttcaatcgacctccgatgctcggaagaactagagtgactggttaagtcgttgtcttagatcgttgtgttagtttgcttgttttaagtttggttgtgtgtgcctcgcatgtgatttacatcagtggtgggatgtaagtgcatgcgtttgtttgcttttgagtgttaggaagttggtgagtttagtggtgtgagagtcttcagtttgtaataatgaaactcagttaagatcaataaaagttaaggtaattccctgtcctaagtagtttcccccggtttctcttcttgtgccctgtccatgccagatggtgaacactcgcagcaacgggaatggccccaacaaccccaataacaacaacaatgaagggaacccaacccttgctcaagttcttgctcaacagactcagttaatgaacatgatgatgcagcaacttcagaaccagcagaaccagggaaataactatgcacctccccagaacaagttagcagaatttcttcgtgtaaggccgcctattttctctagtaccactaatcctgtcgaagctggtgattggctgcatgccatagagaagaagttggatttgcttcaatgcactgatcaggagaaggtctcatttgcatcacaccagttacatggccctgcctctgaatggtgggatcacttccgcctgaataggactactgctgaacctatcacttggcttgaattcaccgctgcttttcggaagacgcatataccatcgggagtggtgtctctcaagaagaaggaattcaggtcgctcacccagggatctcgctctgttacggagtatctgcacgagttcaatcgtctggctcgttatgctccggaagatgtgcgcaatgatgaagagcgtcaggagaagttcttggaaggacttaatgatgagctttcttacccactcatgactggagattattctgatttccagaagttagtggataaggctattcgtcaggaagacaagtacaaccgcatggagcagaagaaacgccggattgctcaattcaagacacaacaggggaataatcagaagccgcgtcttactttaggaccccagtccatgccacagggaggtttttcatctgttgttcgtccgcagcgtcagttcttcaacaacaatgctggcaacaacatccgcaatcaagctccacgtcctgttgcagctccagcacagcaacaacctgccaagagggagcaaggcagcaagcccgtggtgtgtttcaactgtggagacccaggacattacactgacaagtgtccgaagccccgacgcgtgaaggttgtccctgcccagagcaactctactgtaccagcatcaaaggcccgtgtcaatcatgtcgctgctgcagaagctcaagatgctccagatgtgatttttggtacgtttcttgttaacttagttcctgcaacagtgcttttcgattctggtgctacacattcattcttatctatgagttttgcgggaaatcatgggatggaagtagaagatcttagacgtcctttaatggttagtaccccaagtaatcaagcactctctctgcaacgtagcccctctgtcagaatagaaattaaaggagtaccatttctggccaatcttatcttgttagaatccaaagaccttgatgtcatcctagggatggactggttagccagacataaaggtgtgatagactgtgccaacagaaaagtaactctcaccagcaatgatggacgagttgtaactgttcatgcattgtcttctgagtctttaaggtcaagactgaaccagataactttggaagagattcctatagtccgggagtatcccgatgtgtttccagatgatttacctggtatgccgcccaaaagggatatagagttcagaatagatttggtacctggaacaactccgatccataagagaccttatagaatggcagccaatgagttggcagaagttaagaggcaagtagacgatttgcttcagaaaggatacatcagaccgagttcatcaccatggggagctccggttatttttgtggaaaagaaagatcatacccagaggatgtgtgtggactatcgtgccctaaatgatgtgactatcaagaataaatatccactacccagaattgatgatttgtttgatcagcttaaaggtgccactgttttctctaagatcgatcttcgatcagggtatcaccagttgagaatcaaagaggaagatatacctaagacagcttttaccactaggtatgggttgttcgaatgtactgttatgtcttttggacttaccaatgcccccactttcttcatgaacttgatgaataaggtgtttatggaatacctagacaagttcgtggtggtctttattgatgatattcttatctactcccgaaccaaagaagagcatgaagaacatcttcgccttgcactagaaaagttacgagaacatcaactgtatgctaagtttagcaagtgtgaattttggttgtctgaagtgaagttccttggtcacgtcatctcagcgggaggagttgccgtcgatcctagtaatgtggaatccgtaaccaactggaaacaaccaaagacagtttcagagattcgcagtttcttaggcctcgcaggatattatcggaggtttatagagaatttttccaagattgctaagcccatgacacgactgcttcagaaagatgtgaagtacaagtggtcggaagaatgtgagcagggttttcaagagttgaagaatcgcttgatatcagctcctattttgattttgtccgatccaaagaagggttttcaagtgtattgcgatgcatccaaacttgggttaggttgtgttctgatgcaagatgagaaggtggttgcctatgcatctcgtcagtgacatccgcatgagaagaactaccctactcatgattttgaattagctgcagtagttcatgcgttgaagatttggcgtcattatcttttcggtactcgtacagaggtgtacaccgatcacaagagtttaaagtatatctttactcagccggatctgaacatgagacaaaggagatggttggaattaattaaggattatgacatgggaattcattatcacccggaaaaggctaatgttgtagcagacgctcttagcagaaaaggctattgcaatgttacggaaggacgacagttgcctttggagttatgcaaggaatttgaaagattaaatttgggaattgtcagtagaggtttcgttgcagccttagaagcgaagcccactctaattgatcaagttagagaagcccaaattaatgatcctgatattcaagaaatcaagaagaatatgagaagaggaaaagctatcggtttcttggaggatgagcaaggaactgtatggttgggcgagagaatctgtgtccccgacaacaaagatttaaaagatgcaattctgaaagaagctcatgatactttatactccattcaccctggtagtactaagatgtactaggatctcaaggaaagattttggtgggcaagtatgaagcgtgaaatcgcagagtacgtagcagtatgtgatgtttgtcagcgagtcaaggcagaacatcagaaacctgccggtttgttgcagcctttgaagattcctgaatggaaatgggaagaaatcggcatggattttatcactggtctacccagaacgtcatcaggccatgactctatttgggtgatagtcgacagacttaccaaagtggcccattttattccgataaaaacaacctattccggaagtcggttggcggaattgtatatggccaggattgtatgtttgcatggcgtccctaagaaaatagtgtctgatcgaggcagtcagtttacttcaaatttttggaagaagcttcaggaagagatgggttctaagctgaactttagtactgcttatcatccgcaaacagatggacaaactgaaagggtgaatcagattttggaagacatgttgagagcttgtgctttagatttcggtggaagttgggataagaatctaccttatgcagaattttcatacaacaacagttatcaatctagtcttcagatggctccttacgaagcactgtatggtcggaagtgccgcactccgcttctgtgggatcaaacgggagaacgtcaggttttcgggacggatatcctaagggaagtagaagaaaaggtgaaaatcattcaagaaagattgcg

SEQ ID NO: 23809 - DNA, 678 bp, Oryza sativa
gacccgatcttttccgccgcttcctcctcgtcgccgtcgccgtccgttggtcttccgccgctcctttggtcaccggtgagttcgccgcgtcgcgctctacccgttggtgccctccgttcgtgccgaagcgccgccgttcgccggcgagtgtgcgccgtccgagccgccgagccgctgccgccggtggtgacgtcatcgccgacgtcatcgtggccgtctgccgtgagccgccgtggaccggatcgatctcggccgtccgttttggatcaagtcgatctcggccgtccgttcgcgtgaaccgccgccgtgcgcccggtccaccgcaaaccctagcccgctaacgcaataatccaccttttccttttcaaaaataattcattattgcgtcataattcaattaaaatcaatttaagtgttttaatccgatttaatcttaaaaaatttataactaattcatcttagctccgatttagttggttcaagtctctaaatttttctaaaattgagatctacatgttaaaaatatccacatgtactgttcattcttgtttatgtgctgttttggtgtttttgctcttttctgtttagattccgtcgtttccggagagtccgttttcgccggagaagaatttgaagagttcccaggccagcaaggcaagtcacacagatcccaaacaa

SEQ ID NO: 23810 - DNA, 5080 bp, Oryza sativa
cttgagaattacagtatctaatttcttggaacaaatttctctaaaaagctacatagctcaattatagcctcacaaacattagcaggcagaactccacgaatagaaagtggaaggtatctgtgtaaaaatacatgacaatcatgacacttcatccctgatattttagcttttgttgcatccacatagtgtgaaatttttgaagagtatccatctggcacttttatttctctaaggaactcacaaaatgctttcttctcagctagtgtcattgtatagcatgcaggacgaaataagaacttcccatcaccagttggaggtgcatgaagttcatgtcgtattttcatgagttccaaatcaaaccgggatttaatattgtcctttgtcttcccatccagatttaacaaggtacccacaatactatcgcaaacattcttttcaatgtgcatgacatctagattatgtcttatcgataacgtactccaatatggcagctggaaaaatatactttttttttcttccaaactccatacaatgtgcttgagcgttttctcttattgttatgtttcccaaatttcacctgaatacataaagtgatgtcaataataatacactactcatattcttatactctataaagtaataacaaataaggcatagaatagcaaatagtataataatttactttcagattgaccagataggatctactatcattctgtacgcaaaattccccgagatctcaatggcagactatcagtgtgtaatgacacaagttgagcgacagtacaatgtaagacgccacaaactgtacaagacctattgcacaacaaaacagtgccctagtcatgttgcgccagaggactggcagtggttgattgataacttatggagtgatgagcagttccaggtacttgtttaattttctttgcaatacaatatgattcataattcattattcttatgagattattatgttttttagaaacggagcaaacaaaattccattaatagatcaaagcaagagatgaaatcacatgttggaacaaagtctatagtgcaaatagcacatgaactggtaagggatattgtcattcacttatatctttaaactatatgtttgacatgtatatatataaattataaggcttcttttgtatgtgatataattgcagagaaatccagtgacaggtgaatggactagtgctatagatgtttggaaggcaacatatttgaagaatggaacatggtctgtttctaatggcgaagaaattctggtaaacaaaaatgtctgttacctacattttactgcatgagtttttttaatatggacttacatattttcttttatttgtttagaacaatctgcagacaacagctgaaacaaactatgaaaggattgcagctgctaaaatcccaatggttgaactctttgcattagtccttggcagaaagccaaaccactcgcgtggagttggtattagtgcaatcaatgagggagctcaagagaggtacaaagttcatgcacaagcagaagctgcccaacagcaagccaatgatgcacatcaacaagctgctgttttgctcgaagaagttcaaaaattgacagtagaaaacttgcaattaaagggcgagttgcagtctcagcgtgaagagttgaattctcagaaaagaaccgtagaggaacaaagtggtcacatggagcgtttcttggaccaggaacttgaggaaagaatgaaagcaatgtgggcacgcatgggtggcactggtggtgcttcatcttcaagtgccccaaacaattaagtaagatttcttacgtcatacatgattactaattcaatctaatggtcattcgattaatgttatttttaaattatatgtaggaatttccaagttgacaaagactggcgtcgtggagttgctacaaagttttgtccatctaggcgagcatcctagagtccgtgtcccaagtttcatttgttgcttaggtgttcagttatcaatttagttatggtcttagttgaaatgctctttgtatgagcactttgttatcattcattaataaaggatagtttcctctagtgtgaggaaccctttttaatttaggtgatatttcaattgagttctgaagtgctctattccaagcatactgtaatcattcatgaataaagaggtgctctgttatgaatgtttaaacttgccattgctctatcgagatttcatcatcagattttgtcattgttcacatgctggatattgtcataaaagacgtgttgtttgtggcaagactttagtcacatatataaaacttgcatctggatatttaattttttagtgataaaagttttccttacagcaataccctttttttctccactgatgcattacttcatatgtgaaaaaggtattgtcacatatacatattagcttggtcactactacatttgtaaagaatgaccagttttcgcaacaaataacacgtcatttcaccacaatatatcttacttcttgtggtttttacttctcaatataaactaatatcttatcacaaaatcccctgtcatatgtgagaaaagttattagcaaaggtatatttgtgatggtgagttatcggtaattagtaatatgtagtgacgggcaaaccaacactaaccgtcgacaatattgtgagaaaaaaattccatcactacacgttcacatatgtgagggcactattgtcactagtatctcctgtaattgtgaccacgataccatctctaatgtactgcttattagttgcgacagtattatcacaaacagagccattatctgtgatgaaaaaaaaatcatcactatgctacttgtgatggcagtagtggtgacaacatagtgacgaccccaaaattcgtcacaagggggtaattgtgatgagaaacagccttttagtgatgaagtttttcatcacaaaagacttgatcccttgtggttgtcctaccaaagatatactccctccgtcccattataagtgtaatggtggttttcaatatccaacgtttgaccgtccatcttatttgaaaaatttataaaataattaaaaagataaagtcacacatcaagtattattttatcatctaataacaataaaaatatcaatcataaaaaaatttttaaataggacggacgatcaaatgttaaatatagaaaaccacaactgtacttataatgggacggagggagtaagtgtgtatttccatggacaacccatctcatacctgttttctttcctatcatacaattcctcactaatacattacctcagatctctaacaggtcatctatgatggcttgaggagactatctcggctctctagtctgatttttcgatgaaggatttgggtgctgctcatcattttttgggcatcactgtcactcgacaacactctgtactgttcctgtctcagcatcagtactgtcgcgtgaaacttgagcgtaccagcactagtacagatccttctatctgtgatggcctctaacatgcctggaaatagcgggccgtcacaaggaagtcatctcaatcgggccaaaaaagtgcccgattgagatatggtcgcatagacatattagatgggcataaaacttaagcccgtcacggatgacacctattaatgacgggctgtagtttaggcccgattaagataacattccatatctcaaacggggctgaagttggggcccatcacagattaccatcatccgtgacgggcacgtagtttaggcccgattgagataacattccatatctcaaacaggccttaagttgggccgtcacagatgaccatcatccgtgacgtgcaccaacttgaggcctgtcacagatgactcatcagtgacggactatatactaatccccggttgacatgacttaatctctatcgggcattaactaaagcccgtcatcgatgagtatttttccattttacatatgaaatgtttatatttgtaagttgaactatagaaaaacaattaacttgcagtataataattcaatttatgagtcaaaataattttacgcgtagtaaatgatatcaaatggaaaagtcatcaacaacaaagttttataactcatcaagatctataacttttattttggtcatttttatttataacattttttgaacagtttgaatttgaatttgaaaatatgacaacttcaaacaacattttcaaatactaaatgatttcaactaaaaaagtaatcaacaacaaagttgaataactcaacaagatctgtatcttttattttggtcatttttctatataacatgttatgaaccatttgaatttaaatttaaaaatatgacaacttcaaacaacattttcaaataataaatgatttcaactgaaaaagttatcaacaacaaagttgaataactcatcatgatctaaaacttttattttggtcatttcttcatctaataaaatgttagtaacattgttcataaattttacatatatatatgtgtcatttcttcatctgataaaatgcgaagaattttgttgttgataattttttcagttgaaatcatttagtatttgaaaatgttatttgaagttgtcatattttcaaattcaaattcaaacggttcaaaaaataatgttatgtagaaaatgatcaaaataaaagttatagatcttgatgagttatataactttattgtggatgactttttcagttgaagtcattcactaacaaaaaattgtattttattttctcaaactttgaatttcaaaattaaaattgtttatatagagtcagatggagaaatgaccaaaataaaaatttcgcacctcgatgagctctacaactttggttttggtgacttttccatttgaaatcatttattaatcctaatttttgtttgaagttgtcaaattttgaaaaaattaaaatttaaattattcaaatgaacttatttgtacaaaggaccgatacaatagttgtagatctcgataagttatacaattttgttgtttatgatttttgatggttgtgtatgtgaatgaatgtatatgaatgagggatggtgtggtgtgacatcctggc

SEQ ID NO: 23811 - DNA, 3809 bp, Oryza sativa
aatgcccatcacagataagggtcatctgtgacgggttatagtttaggcccgattgagataggtcatacgtgacaggctatagtttggctgatcgtctgggtcaaagctatcggtgacgggctttaattatggcccgattgagataggttcatccgtgacgcccgtttgcccgattgagataacttttcacatcagtgacttctagcctgtgacggacgccatgcccgattgagattagggttgccgcccgattgagatgatggtatccgttcttgtatagtatgtctaagactacaagccatgctcttctccagtggataccagtgccgaagtttctacttgtgatacttccactagtatagatccttacatatgtgacgacccctaacatgcttagaattagtgggccgtcacaaggaagtcatcttaatcgggccgaaaaatcgtccgattgagatatgatcgcacatacatgctagatcagcataaaactagagcccgtcacggatgacacttatctgtgacgggccatagtttaggcccgattgaaatatccttcattatctcaatcgggccttaaaagaagcaagtcacagatgatagtcatctgtgacgggcgccaactagaggcccgattgcgataagtttaatgcccgtcacagatgacactcttctttgatgagcttttattaaggccgcgatagagattacttgtatgtccgtcacggttgattgttttagggctgttacagatattggttgcatagtataaatacccccaaccacctagtgtaagtgtatcccactattcactattttggtgggaggccgtagggggccacttttttttctcttttccaagttaaacagaaaattccaaaaagtaatcattgattcagcaatcaagtgagtaatactaatcattaattcagaaatttcatcacttcttactttagcaataccaatcttataagatgtgcctctaattttttttagcaatggatcgaagttggatgtatgcgataactttgaaatttcattttgcggagtacagaaatggcgtgataaattttatgaacgctgtggaggaggataggaaaagaagaaacaatgattacatgtgttgtccatgtgcagattgcaagaatgagaatatgtttgatagtggaggggttgtacacggtcatctgatataaagaggattcatgaagggctatacatgttgggtgaagcatggagagcaagaatcaggaagtggtgcagctacagacaaaagtggtgcgcataatcaggaagatgaagatgagcatgacatatttataccttctccattgggcggtgaaatggttgatgtggatcacgatctggtgcaagacatgttacgtgacgttgagtacccagcccacaatgagagagattgcatgaagttcagcgggttggtcagtaactccgagacgcctctgtatgccggatgcaaagcaaaacacaccaagttgtcagttacattggacctaatgaagctgaaggcaagtagtggatggacaaacaagagttttacagatcttttaggaattttgaaggctatgcttcctgatgagaacacattgcccgagacaacatacgaagcaaagcagattctgtgtccactgaggttagaggtccatataattcacgcttgtccaaacgactgcatattgtaccacaagcaatatgcggacttagatggttgtcctgtctgtaaggcttttcgatacaagcgaaagaaaagtgctgatgaatgcaagaagtcaaagaggtgtggtctggcaaaggttgtgtggtatctacttatcattgatcgtttcaagacaatcttttccaaccccaaggaagcgaagttagtacgttggcacgccacagatagaaggaatgacggtatgcttagagacacagcggattcaatcgaatgggggaatatcgatcgaaaacacaaagactttgctgccgaccctacaaacatgaggatatgtctgtgtacggatggcatgaatcctttaggagacatgagaagtactcacagcacttggctagttcttattgcaaactataacctcccgccatggttgtgctttcaacggaaatatattatgttgtgcttgttaatccaaagtccgaggcaaccccgcaatgatattgatgtatttgttggcagctgttaaatgccgattctataccgccaacatctgcataaagttcatataataaaacatccaacatagtgataggcgcttaatttcacatatttcacaagtgtttgtgtatatttgtatgcaggtgataaaccctaaagttgggaggaaaacaagattaaagtgaggagaaacaagtatccgtacaaggatgggttgtgaacttcatcaaaataccaaagactcagcccaaaactccgagaaatgggcagaggagagtccagggagtccacaggccgaaggccaggccgggagggcccagcccaggttcggccgaaccctcccggtcaccgttgatcctggggtttggcgtggacgctccagatgatctcctaatggcggttgcggggcagttcggacatttccccttctcacaaccatcataactgccctataaaaggagcttcactccttcactctcacacacactttcaagcttgagctgaattataagatgccctattatactatgttgtataatagaataggaagagagtagagtagaagaagtcggaagaattccggagttgttggtaatcttctctcatttctttttttctgttcattactctgatttcaatataatatttttcttgagtaatttagatttatcttgtgagaattatctcttggttagtttctaaatagcgtacgggattattgttcactataatcaactgaaatatagtgattactttggtgagttataaacactaaagtagatattaattgcttagacgtagtgtttatgtaattgttatccagtaattgctccgtatcccacagtacgtttgaggtaggtgtagaggtggtgatagccctcgagatcacttaagtcctccctgtccaggtacgtagtagagcgacatctgggaacagcggattgccagtgcctgaagtattgtgttaggattaaatttaagctttccctagacactgtttctcaccagtgaatcctctctatcctggccaatcctttgcttggtgtccttggatgaaccggagaaagaactgaccacacacgttcccttggattcgataccctttggaatactccgtgggggaagtgctacatcggtatatctgtgcgcatgcagattttatctgtgatcgtaagaattaccaataagcatttctggcgccgttgtcggggaatggttgctgatcatttcagaacccagttcatcctcgtatttctttttcactttttattctacctttacccctgctacccagagaagtattcctgttaaattcttctcgactatagagcaacctctctttgagctgtctgcttctaggggcgaattctataagccacctccttcatcggagcgcatttatacaactggctatgaaattcgctctgaactaatcagcatggatagggaaaatcctttttctggttttgatttagaaaatccctaccatcatctgcgagactttgagcaagtctgctcatgccttaagattcgtggcatgagacaagaaacttgttaacagtgaaatttggtaagcccggagtaatcatcggcttagagtcagtatcggcttcgaagtcctgagattagccgatgagtg

SEQ ID NO: 23812 - DNA, 3076 bp, Oryza sativa
agcttagacatctaccaccgtaaaaactcaatcaacggcttgattgtctagatattatgtttcttttcatacttagtgttgcatcagttatgttttatctactaagtcgtgcttagaaccataatctctagcctgcttctagattgccaataagggtttcatcggggtttcatccggtcagttatttagacgttgcatcggctcataaggattgcatatacatagaagttggatttagccgataacaacaaaggtttcactgtttaatctaatcttgtggatttcatgacatcggacctctagccgatgtgtgctttaaccttcggatcgatgcttatttatcatatcactatttgccgattggtttctactggattatattgctatattatattatcatcagtcgattgcctttatatcattatctacattggacatatagccgattgcttaaccctatcgctattggctggtatcggcatcggctattatcggctatcggttggaactactccatcggcttgtcagccgatcggctgttttgatctactatttgcatatcttgtcagttgcaggatcaaactgactggcacgccctcatctcaacaacctttggacctgcactggagctaagcagatctcccaggccagtgtattcgattttttcgtcaacaaaactgtacggtggaaattgtttccgttctcccttcaagagagagcgaagcaatggtacacctctacagtcagatgtgtaaacgctagctgggaaaagttgcgagagagattctgtcttgcatttttcctagatactcgtattactacctttcgagtagaaatccttagtttccagcagatcaaaaacaaatcaatcggtgcggcttggtcaagattcgctaatttagtacagtccggacaaaccctgtttatgtgctattgcaacatttccatacgggcctggataaggagtctgcattctatctggattcattgatttcaaaatgttgctacctattgcaaaattagacatttcctatctatctagattcattgtactatgaagtacaacactccctccgtttcacaatgtaagtcattctagcatttctcacattcatattgatgctaatgacatatatatctgtctagattcattaacataagtatgaatgtgggaaatgttagaatgacttacattatgaacggaggatgtatctaattaatcatataccaggtagtaatattttttataagtaatatatgaaaatggcacttccccacaaagcctatatgtctttaatcgtaatctatatgattaagcgggattgggttaacaaaatggctctcgaacatatcctttagctccaggctattgctgaagccattcttcttgccatggtataggagggtggcggacatgcacaggttggcgatccgctgcacgaacgggaggaacgcgcggtgcttgaagcgtatctggttcatgcttttccacccgtcctcagccattccagcgatcttcgcctcggcgacctctctcgtcaccccgtgctcgttcatgtaacactccacagtgctcgccacatccatcttgtccctcccactctgcatgcatgccaattaatacatatatttatagttagtatttatacatatacatatacatatatatatatatatatatatatatatgccaattaattaatactccatccaaaagtatttaatatttatttatttttctgattcttttttttttgaagagggtcctatatgtcatcttcggatatccaaaacatatatgaataaataaattaaattattaatcagaatccaagtagccatctaaattttcattaattgcatgtagcatatacattttgtcctcattacacgcaggataaattaattactttttggtgataaaagtaatactgctacatctttcgagcactattagaaaaccgattttttatcattgtacccaaaacacaaatatgtcagttagatttagaatcggtactaaaaatattttgcagtacctgttctaaaagtcgaagtctcaaaaacgtttctactttcgattggtgttaccaatccaaccgaagttaaagatggagaaaccaaacccgtactaaagataccggatggtaacaccaacctagaatgtttttacggttttagtacatgttagttaaagaagaaagcatctatatcaaagttagttatgtatagtaggtgagatggtaacacaaatgaggactgaggtgagagaagtcttgagtttgaatcccacatccgacagattattttcatttagtatgcatcaaccagtactaaagatcgagaataaaaataaaggggattttaaaccggtaataaagtggggtgcacataactagaaataccaaaggttgtacagtggcccaccactttgctattgacctttgttattttaagcatgtgtttgtgtgcattcgtgtgttatgtgcatgtgtagtactatgccagtcgtttgcacctctagtgtaatcgcaaaaaataatgtatattaaggacatgagcacgtccagtgtacactaagttcttaataaacaacatgctcggaacattgttcgtaaaatattttcccttttattgaggtgtcggctagccatataatatattctcggtattcaaatatataatattattgactttatttggttcctatggtgcaatttttcaccactaattttctattagactataacgataattaaatgtctaactaaattataatatgggtcaagacactaaattataataatgtaaatgtgcttataaagaaaaagaattatctgcacgaattttatgtttgagactcgaagtttcaaaattttgatcgaataaatttaaaagtgacgcataattagatacggagggagtattatttgtttatgctcaggcacatgatcgatacaagcgaaatcaagatcgtgatattaattaaatgacctactttgtatagtttgtattttcaaaaagtagcgttaaatggcattactttctccgtctcaaaataacaacatttcggaat

SEQ ID NO: 23813 - DNA, 2900 bp, Oryza sativa
  unsure (1)..(2900): unsure at all n locations
ttgctcgatagtatttgaaactgcatgtagccaaaaaaaaaaaaaaggggataagcacaaactagtgatcgaagaagacaattagtgttttctaccttcaggtaggtaaaatgcatgattgtcatcncaggttttaacaagtttattggtccactaaattattaattagttaacatatatattattccactacttgttaagtagtggcaaatttattttatggtgttggattgtgagatatacactaaaattatattccaagaaaacagtacgtggccataagtactttgataaggagctagagactggcgttttaccgctttaatgttgtaagaattacgatatttctcatgtggttccaattcatcctcaaactccctaaagttacttattatgctcagaaaaaatctcttcaggtcctctggtagaagtgaaacgtcactcttgtcccatctgcatataattatatagcacacacaattaatatacgtgtctgcgtatgtgtgcgtgtgcgtgtgctgctttattaattattacttatcgaaacgaaaggcaagaaaagaattgaagtagaccaaacctttgcagagcatcgttaaacttgcgagcctcctctaaagttgcacgcacatcgtatgtatcatcgagcagtgaaaatagcatacacctcttggcgaatatcatacgggcccgtgcgtgctctttttcatagtaggcagcgtatgcacaaaaatagcactcaaccacacgttcacggacgtagtcgagtctaatgtcacttgaaagattctcccaccacctataatatatataatataatatattaattctattttctcgctacaatgattagtaataaaatcatgtggggagaacagcggcgcagactagaaaacttactgacaaatttccttgagttcattttggtgaactttttgtagaatattgaaatcaagcacggctagctccaaaatagagggattgaacattttctcttcagcgctatactcgaagatataatttagcacctctactctcttcatggtccttggtaacggtatctcaagggcacgtgttacttgttcatccaatgggtacgcgaggttgcctctcaataattgtaggtgatgccttgcaaacaatatagcttcttcaagtgctttctcgttgtgagttagaaggtgagctgcgttgtataaacttaacaagcccttcggatcattagttatgtcatcactactaaagctcccatcttcagctttgaatttgttgaattcatctgtgttcagtacagaccataaagatcaatcaaataatttagaataactaatgttgtacatattctgcttagtagacttctcagttctcacaagtcattgaaattatgatataacaaaaagaatggaaattcaagattcgtgtggaacagaataatttcactgaaattttccaatgaaggagtaaaaataatcccacactccaaatacatcatttagtctaagtgtgttattggtatttaattcactgttgcagtatatgtacctggcgagacccaatacccttgtttcctaagtaagcgaaaccgaagggcaacctcgtaaaggtcagagctattgaactcagctctatgaatattttttagaatggtgtcgatctgctcctcaaaatgatgatctattcccaaacgttggagcacatccaccaggttcatttgctttaccacatcatccttgcaaacctcaagcattctacctacctcctcaaccaactgatctactctctcttccatccattcatctgactcctgcaagatacatggaaggacatataggcaggtagttacttttataaacacataacaaattattttgtaaaaagtatcattttgaaacaatcttaaaacaatatttaattttacaacagttgtatgaagagtatttcccctaccattttggtgggggttactgctagccggcagtatcaagattactgcagcgaccatgtggttttaccggaaaaaccgtttggtaagagtgaaattcagtgaggttttaaatactgataagggcatgtggtaaccgcaacaatcttacggtaactgtgcgatgttaagaatccttcactttgtatacgcggcttaaaaaacaacttttcctgcttctagactttccattttcagaggtggctaaaatttgtaaccacctatgatgaagatgaccgatgcagtctccggtaattagaccgtctgtgaaatcatattttgacaagcagtgtcttaagaaaactgcatatgcaaataaaccaattttcatgggtgtttagcctatagtgaaccgtctatgaaaatgctgataaaagtggggtaatttttataggtggtactatctataaaaagctctataaaccaccctttaaaatgggaggaatagtatttaaagaaaaaaatcataagtctttcatacgaagttggataaaaacaaattttatatgaaaattgtagcactagatgagatataaattttgtagttgaaatttttttcatgtgagattgtttaggggtcgaaattttctttagaactcagatagatacctgttctatcaaaattagatcttgacaacacctgcatctttgtagttgcaagttttttccacttgagatcgtttagttggccaaatattcagtacagtctctcagatataattttttattggcgaatcatatggaagtcgaagctttcaaatttcatataaaatgcattttatgtccgattaagttgaaccaaagttatgcaagatcattgcaacatttcttttaatattgggtgatctatattttctgacaaaatttgctttactgtggtcaattacttatgttaacttgtatatagcatgcaaactct

SEQ ID NO: 23814 - DNA, 589 bp, Oryza sativa
ctatctgagcggcggatccgggggcggccgaagctgccacaccggaaccggaggggttccaggtccatgcctcctccttacgagccactcggtccgcgagctgaaaaagctccgcggtagtctggggctccttggaggcgatcttttcaagcatgcggttgtgccgcacaccccccctgaacgcgtaaatcaccgcgtgcgcagggatgcatggtatggtgttgcggacttgacagaaccgctgaatgtacgagcgaagtgactcatcatcccttcgctgtactacgtgcaagtccgcttcctcacctgggcgcggatatgtgccttggaagttcatggtgaactgttggcacaaatcctcccaagagtggacagacgcgggtggcaagttcattagccaaccccgcgcttgtcctttcagggccatgggaaagaaattcgccatgaccctgtcgtcacccccggcggcctcgatcccggtcgtgtagacctagagaaactcggcggggttgacgctcccgtcatatttttcggcgatggtgggccggaaccttgggggccaacggacatttcgaaggctcgccacaaa

SEQ ID NO: 23815 - DNA, 594 bp, Oryza sativa
ccttggagagaatgccacgcggctctggccgccgatggaagtgccggactcggggatgtcccccggacccggttggtcctgagcgtcgcccgagggagtaggcccaagcgacgcgcccgcggcctcgtcgccagctgccccggaagttgtcgcctgagtgtcgcctgagggagtgggcccaagcgacgcgcccgcggcctcatcgcgagctgcctcggaagtcgccatcgcctcgtcctagcgaaatccggcctcctcccgagcggcttccccggcctggcgggcccgggcggcctcctcccgagcggcttccccggcctggcgggcccgggcggcctcctcccgagcggtttcctcggcctggcgagcccgggcggcctcctgggcggcctcctcggcttcccgtaggcgatccgcggcctctcgccggtcagattcccgcctgagggcctctgcggccgccggatcctcggcctcagactggccggacttggaatggcgggagggacgcgacaggatctcgctgaaacgaaagaaaaaaccagaagacgaacaagatgggtgagtgaaaactcgcgttgagagaatgaatac

SEQ ID NO: 23816 - DNA, 956 bp, Oryza sativa
gtggaccctcagatcttcgacattccgccgaaacaaccgctgtttcgtggcctatggtaagtggtttctagaaaaatttctaggcgtccacctttaccaatccagtctctctagggtgaggcccgtgattctgtagccgtaaaaaaaccctagcacgattccatgcccggaaggcaaagttaccaaggtcttaaattcgcccaaaaatctccatcgacaagccacggtgtcgccccgccagcctaccttaacggtgcggttagtcgacgtgcttgacaccgaggtcgtctaagctatccaccctaacattctatgtgcagttcctatcctaaccacctcgttgaaaaccagttgtggacccttagatcttcgacattccgccggaacaaccgctgcttcgtggctgacggagcgtggggctcctcaccgggagaccgcgcaggcccccctttgccggttcggccggggactcagggagagattctaagctctctgtatgtggaaggctcgcgagacaggaaacacacaagacacgggcgatgtatacaggttcgggccgctgagaagcgtaataccctactcctgtgttttgggagatctgtgtatgaaggagctacaaagtatcagccagcctctcccttgttctgggtttctaatctggaaaagtccagtcccccctctcagtgggcaaggtcctccttttatatcttaaggggataccacatgcaccatttctctctttttttgtggggacttacccccccttttcataaatggacggagatttgtatagtgccgtccgagtcaccttctgatgagacggcccacaactacctccactttcgccgggagcaggtgcgacgtggaatcgtgctgtctgctgacgacatgaccggtatcagaccagtcacgtcggtcattcttgtccaccacgtgtcagcttaccaatctacatg

SEQ ID NO: 23817 - DNA, 504 bp, Oryza sativa
ccccctctgcagcgatccagaccgcgcctccatcctgaccattatgatggcggtcggggcctcagaggagcgagctccaaagggtcacgacggcgcaggcgggagccgcaggggggacaatctaccccgagagggggtcgtgcttctgggtcccgcgacaggggcccggggagcagccgccctgccgacgcccgggggaagaggaagcagggaggaacacctcccccatctcctccccgagggggcggggcggcgcgtgccagtaacaggcgcccggagggggccgcgccaacatcgcagcccgagggggagcgcaagaagaagcggccccgtaagatgggggagacagaaccatctcggggaaacctcatttcccctccaaagtggtcgtttaaccgaccccctcgcaggttcgtctctcacccatcgtggctgtattcattctctcaacgcgagttttcactcacccatcttgttcgtcttctggttttttctttcgtttca

SEQ ID NO: 23818 - DNA, 716 bp, Oryza sativa
tgcaccccgatggggagtgggcgggtcttgaggaagccgagaggataggcgcggcggaccatggtggcgaggccggcgtcctgaacgagggtgaccggcgcgcggtcgcgacccacctccgctcgtggcattcggggtccgggctgctgagcagcgccaccgcacacacctcctcggcgccgcggttgtccaccagctcgatgcggtagtgccccgccgcgtccgtcgtcccctccgccgatctctccaccgccccgctcgcgctcatgaagtgccggcactccagccgcacccgcgcgccctggatcgccgtcgtcgcgttcgtctggaaccccgcgcggcacgtgtcgcagtacacgtcgccctccacgaagaaatccgggtcacggctcccctgcaccgccatcgccatcgccgtcgccaccaccatcaccatcaccacaccgccggccataaccatacatcaatcaatcaatctcgataaattaataaccgatcctgcttatatatatatagcagctatatatatatcgaatagttgaagcgatcgatcggctgggaatggaacgacggcccaattaatcaggtgatccatacattaatttgcattgcatgttatatatgactctattgttagttagttaagttgcttgcgttgttgaccaatcgaaagtactcctaatgaacttcccctacaataattaaataataataat

SEQ ID NO: 23819 - DNA, 802 bp, Oryza sativa
cggcatgaagcggcgcgacagcccagcctgcctctcgctcacgatccgggaaggcggcagcacgctaccatcgagcagagcggaaccccgtgccatggcgccggaggaagagaagattaagagcgagcgcgtgtggcgaaggtagggcacagaaagaaggagttagggcgcaagcagcgaagacaaggggaataatggcgaaaggaaggaaacagatcccttcctcagtgcctttatactcttgccaacgctgtgcccggctcctcgcttctcgcgcccactatttcgccccctcgtttctcgcgcccacgcttccactaatcccattcgcccgcttgcggcgcatgaggtggatatgcggttgtggcagtcgagatagatcatatcgtgcgcgcgttaattacgctcgccgaccgaagcaacgttaccatatcttcagacgaaacgaatcgccatgtccagattcgtatgctactcaagtaatgtggcagtcttgaagagaccgctcattgttgacagccgagttaccattgccgatgtgcgtggtttgtgaccgttgggtttctgcccaattgtggagatcggtcccacctgtcaccaggtctcaggagtggcgtcacgcccgaccgtttcccttaaagagggcgatcgccctggcataacgccgggggctactgtcggtgacatgggatcaggagtatcatgactagaggtttgaggcagacacaatcgcacacgtggcctggtacccccgagggacgtcgggcccgagggtgatgcgttcgccctcctcttagtcccc

SEQ ID NO: 23820 - DNA, 12794 bp, Oryza sativa
tcgattaactccctctgttttctgcttgcgtgcgtggttgagtcaatcgtggtcaaagtgaacggcaaacgacagaaaagtgacgaaagtgttaaaagaggaatgaagggaactttcggtgctattaaagtgaaccggtaactttcggtgctagagaaccaaaaacgtgaactttcgatgctttgaaaccaatttttcctagttttggccacatcagaagtgattgatcagaccattttattacatgcatgacaaaaacagaaccatatagtctggctctatagcatccagtccacatgctcaatcttggtagcgtcttatgggttttgctctattggtaattggcctatcagtttaaagcaagtaaacttttgaccacccagctgttggagcaaatgctttaaattgtttgttattcttccatttttttaatggataaagtgcctattcccacagattaatcttattatacaatcagttaacaaggcctgcttttattgtaatttttactcaggatatggagctgccctcacaaaagtcacaacgaacaaggaaatcccatttgggttacgtcagatatccttaaaccatttaatgaagttattttatgcccaaaatttgtagcgcataccctttctctgttagatttggctttcacacattctacttccaattgttgtttgttcgtccttcactcctcagtaccttgctgctgtcttgctaaagcagttcatcaaacagcattggcaggaagacgaagagaatttcatgcctcctgttgtttctgcctcggaaaaggtaccatcatgcactttcaatcctctggataacactaattagactcagtccgtaacaggcccatggtgccattcttttcttttctcccttggattgtcaatacaaattgtaattcatgtgcgtggtgttatcttctcgcagcaagcactattttcatgcttgaaaacttctcatgtcagaagattgtgagtaatgattaatgagacaagaggtccacattattacaacaaatattccacatgcatagcttgaattgctcatattttttgatgcatggtatcccttactgttctaatcaatgaaaaaaaatttaaaaaatggtataaattgcaaggaccatggtgtcatggcaatagggtgtcgcatgtcatggtacagccagcctgcatgtcaggcccagcagcttgtggacagggaagctcctacttgctatttgtttagtttgtttcttaggccttaagccatttctggatacgatcagttatttgattaattaagcataatactgtttggtagggccattccatctctatttcaggttgctgacagatcattgtatgacaaacaagaattaaccaaagacacattaatctaattctaatagttcactgcaatctaattctagcatgtgacactgacacatgggcttactatgtaaattattgttttctaatatgatatattcttatcgcattattttgcttctccttatttatcattaggtgattatacggcaactcctccttacatcgttggatgattctcacgggaagattcgtactgctattggcatggctgtagcagctattgggcagcaagattggcctgaagactggcctgagttacttccctatctcttaaagttaatttctgatcaaagcaatggttgtggaggtatagagaattcttttgcttcccaatatttttgaaaccagggtgtgcagctattttagaggcctttttagagtcattgagcttaaacttagagctgctggattccttccagcatagctcttccaaataagctgtttttgtcacaatttcctggacaagctgtaggccctggctgagatttcagcaggtttaatttctttaaatagctagcttctaagagaaactggtggagaggtgtaagattccttaagaaactgccccttttgtgagggttttgtcttgctatgtctttcatctgaagcttaagcaataggaaacaaccacaaacttatttgtctaaagaagttcaaatggcatccattaaagcgaactattctatgttgcatggtacaaacatgggtatggtacgcaacaggctactacatatatgtaggattgataatagtatgagaattcttgtttctggattgacttatataaatggtgttctattcaacactatcaggaaaagttgtaattttttaacagttttgtccctccaccaaaaactacaggtgtttataataaaatgaaaattgcactcgtctacttttgttgttgttgttatagtgttccttcctttgaaaagaatggttacgaattgaacaaaaagatccacttctggcatcttctttaagctctcctgttttatgcttcgccatgttggtggctgtgtcagtgtctgacactagtacctagcttacactactagaattctagttttagtgctacatagtctaaataagaaaaaaaacatcttaggatgctcatatggccctaacactgactactaagatgatgaaaatattctaattttggaatttgtacattctttttctctctgaaatcagttacatgaatttagtaattacctattacaactttcaacttactgtctgtagttcgtggagcattaagatgtctagctcttttatcggatgatttggatgatacatgcattccaaaattggtgccagaacttttcccttcattgtacagtataatatcatctcctcatgtaagtctcatactgtttaatgtctgttaaatttcttttatctaactgctatggaggcatttatttgtttatccaattttgaaaagcagctgtacgaaaattctcttcgtgcgaaggcccttgcaatagtccattcatgtatttccatgcttggatcaatgactggtgtatataaggtggattgtcttgtttattactctttgtgctgtttctacatattagtaggaaacaaactaaggtgatctgttggtgcagagagaaacagtcagtttgataagttcaatgcttgatccactcatggagcaattctctgcaattttgaattcaccggtgcagtcccataatcctgatgactggaacatgcagatggaggtatacatcatataatctgtgttgtgaggttgtaagcatgcattgttaatagtcgctgaagctttttgcttgtcttgtgaccaggtgcttaaatgtttacttcagcttgtccagaactttcctgggttgcctgaagccaaaatttctggcaagtgcaaatgacttgttatgatttgttaccccctctccctttttttatgacgaatgggcaattttttgcagctgttcttgcccctttatggcagacctttgtctcatccttcaaggtctatcaattgtcaatgattcaagcctcggaagatgtggattctgttgggtatgattctgatggtagtgaaagaagtctggagtcttttgggattcaggtaatatcttgcatttccgttttgttgaaacttccttttcctgttgttacatttttagataatggataatccagcctttacttcaaaagaagctacaaccacttattacaatgttcataactgaagcaaaagcaaatgtgcatactaataatgaaatgtgacaagaagacaatcctgttattacttatcactgaatttcagactctagatttctttcactgccaccattcctgttattttagggaatacgcaaaagacttgcacacctttgtattaagatagaaaaaaaaagccagatgcgatggtcgatcttacggaggatcgacccaccaaatagttattacagactattcatcacggcaacaatgacataattccctttattgtactccattgtttcatttgctttcatatctcaatatgttcttgtccttttcagttatttgagctatggatatcaattgtggggaattcacggttagcaaaggtatgacatttcaatgaatattatgttcatttttataaaaaaaacaaatactgcctctgtcccaaaatataaggagttttagggttggacacgggtattaagaaagtaggtgaaattaaatgtgtgaaggttgtgattggttgagaagagaaggtaggtaagaaaattaagaggtggaaggatgtgattggttgagaagagaataagttgttattttgtgggacaaacgttgaaggctaaaagttatatttttggatggagggagtactaactattttttgtgctgttctactagatcattgctgggaacattaaagagctagcatattatactatagcgtatcaacagataactgaagaacaggtatgagctggctgaatcatcattaattcatcttacttttggcaaattgtgtttttggttgtttttgcttgcaaacgcttacgtgttctctattctttttgtttctagttgcaaaactggtcacgtgatgctaaccaatatgttgctgatgaggacgatgtgacttatagctgtcgcgtatctggtatgaactttaacattgtttaatttttcttaacttggttggatggattttaacagtgcgatgtgccgaccggtattttgctgtgtaaagtctaaaggaacataagattcataaacagaacaggttaaactaagcaaataacaaaatagagtactgttactgtagtactgcatatattccctcagacccaaaataagttcattttcacctatctcacacataccaatacaaaccaaaaagactagaatacctttattaaacccaatgcaattattctccattttatctactcccaatgccattattccctattttttacaaactccgatgcaatgattacttaaaaatgaacttattttggaacaaatgggaggagccaaaaatgaacttattatgagatggagggagtattaagctatatgctctgagcctccgattaggtactcgggaaatattctcttgatgtatttgcaagactcgcattcttctttacagtttactcttcgacagatatttttttcgaaatgtaacatgttttcctcgtcttggttttcaggatctcttttgctggaagagatagttactgcttacgatgaatacggaatagagtcagttttggaggcttcacagatgcgttttcatgaatcacgtgaactaaagaaagcgggttctactgactggtggagagtaagtttttgattttttaaattactaagaaatcaaaactttggacttgctgcttataaacaatgttactctgcttatcatgttcctcggtacttttaccttctgggttatgtgccttgattttagattattgcactttcaaaaaacagaagaagcaccttcaatgattcttctttgattatttcttgtttggcaatcggccatatttgaatttatttcctaacaaatattaaatcccaagtatgttcatagtgtccttaattgacttatctgatttacccctttttttttgttccagctgcatgaagcatcattttttgctctaggttcactttccgaacagctctgtgaagcacaggttggtttttaattttataataatcagcaatttcattgactccttttcttttggcaaatgtgccctataattttctctagtttgcatatataaagaattgtgccatttggaccaggcatcacattcctacttgttatctaagagcttaacatatcgtaattcagctattccatcagtttgactactgtaggtatgatttggattttggagtgttccaatgtggtatgatggtattgtttgcactagagctgaaaaaaaaagagggggcagacatcctgaatctgagggaaatactaacaaatcacttgattcagttcagtatatactgccaactttaaatatcctatcgcattgtcatgctaactaacatcaagccaaagttaatacatggtagacaacctcagatctgactgtatttacgaaagcaacttgtgctcatggcagatagttgatagggttggaggacgaagagaaactattcaccatatgtccatgctcctttagttcacgcgagtgggttgttttctatatgattatctttttgatggaatcgttaggattgacgcactgactttagaattaagcaacaataatgaattaatataggccctccaaatgttcaacctccaagcctgccgtcttgcaggattactattcgtgcacttttcacccgtgcagacagtacccacacattactgtaagctgaaacttaggtttcttgttttagagataagggaagaatggattgtaatttatttacttgttttgaggatcaagttatacatctatataaggatccatggtatttctcctgagatgcctccatttccaccatgtagcttgggttcttggccctaccccttgtcccccttgtcatgaactatctttataacaaacattacaggaagtggctaatggggactgggactttggatcatggaatgctttatgttgaccattctcttaacataagtcaatgtatgttttactacctcatatggcagtccaagctgatgtatttaacaagcagccatgatttcctaacttaaaacaagattccccttgcaacatacttacatattgagaaaacacattgataggatttatggcattttattattcaccatttgaattctgattgtttaggattctggttacaacgtgcgagatttacttgagcagatggtaactgacactgtgggaacaggtatctttctttagtctgaaatgaagaattgtttgttcatgtgctattactaatattatgacttttagaggtgcaccagtacccgtttcttcatgcacgtgcattctccattctgtctaagttctcttcagtggtaagtttccttttttttatgtatttattttcctatatgtccagcaagctgatttgggaaaacgtatcagataagtaaggaaatctgcgaacagtatctatgcagtgctgctcatgcaattgcctcagatgtgtaaggccatgaatttattcgtcttatatttcttgactcaagggcgaatgatatttgtctgacatatttgtttggcagacctcccccagttaaagttggtgcttgtagggcactggcgcaacttctgccagaatctaaccagagcttgaatgtgcccaacattatgggcatactctcatctcttgttgatcttctggggaaggtaaattttaatttaaaattgaaaacattacctgccttgagttttttgaaatgaagacatgctattttgtggcaggcatctgatgaaacgctgcatcttgttctagaaaccctccaatcaaccatcaaatcttgtatgtcagcatgtgttccaatgtatcttgtggcaaactatgttttgtgttgcacattttgcctttttcttggttgataattatctgcttggtatgtaggtggtgaacagtcaacattaattgagccagtcatctctcctatcatcctagatgtttgggcccaacatattgctgatccattcatcagcatcgatgctgttgaagtgctagaggtaggttatcgtcagacttgggcagtacaacacatgacttttcttgaatgcaggaatcgatgcttttagttcatgttgaaattttacaccattttacttcattttctgaacacatgataactgatgtacaacagaaaacatttagatttttatttctgtgtatcaatataggtctggcatatatttgttttttccagaggtatgcaagattgcgaaagatgatgaaaataatattttattggatgaatgaatgtttctttaaagcaaccaaaaataattttagggtaggctgagtttgaaacagattattgagtggattgttctgcggattatttacttgattttaggggtaaattaaatatttttaccttttgacagccgaagtttggatttggaacttttttgttaatgttcttgattaccttaaaagttacaacccactaaacaggattctagtttttaggccatcaagaatgctcctggatgtttagaaccacttgtatcacggattctgccaacaattgggtccattttagaaaaggtaagacacttaattccagtttcacattattattaccttccttccttcatttaccagtgttatgcgaatctaatttatggctcatatcctagcccaagatccagcagaacggtcttgctgcaggctcactggacctgttgacgatgatactgaaagtatgtcgacacattattaagttccataaagttcaagaccaaatatttcttataagcagtgcctgaagcttctaatcggcatcttgcaattcatatttcagaatgctccaactactgtggttaaggcgatctttgatacatgttttacatctattattcaaatcgttcttgaaagtgatgaccatggagagatgcaggtaaatgcttacatgtggttcaatcattgaagtcataattgatggtacttttgtggacatatacctttaatatggcaattttttgtcaatttagaatgcgacagaatgtttggcagcatttatatcgggtgggcggcaagagttgcttctctggggtggtggacaaggacgtacactgaagatgctactcgatgcagcttcaaggtaacgtcaagactatagatatttgattcatttctgtcatcaaatttagcattatagagtacataagaatcaaatggcttcaatctgtacatcctgacaaacttcaccatctgtcaaaaggaatgcataaaaaattaacaacatggcatcaatctttgtccagagctaggagctcatatatgcttctctctgaaatttgatctgcatgttaacagccaagcataatttcaagctgaatcaaaacgtgccattaggcgaatgcaaacaattaagcgcttcctacactaaaatgtagttccccagtaaacgtacctgcatctttgtggacttgacaaagatgtactaaaaagagcagcaatcaggatttttcatgtgccttgtttggatacattgcttccttttgatgaaccaatcaaccccttttgttgaatatttccatgctatccctataataggaggtgcaacaccatctctctatcatacacacagagaaagaagaagggggtaaatagttggagtacacccctgctttatgccttaaaatttgttttggtacttggaaggcataaccatacaaacacctcttcaatgtctttgcaggcttttagatcctgtgttggaaagttcagtatcactatttgtcgggagttatattttacaacttattatacatctgccttcacacctatctccccactttcctgagcttattgctgctattgtgagacgtatgcaatccagcagcattactggattgaagagctctcttgttgttatagtagcaagacttgtgagttgcatctctctctctctctcccctggttaagttgtttggatttcttactacccatggtggattataattcgatatattcacttttcactttagactaagtttgaattagtgttttggttatcttagtatcttacatggttattattttagttattatttgttttagtcctgggtctcttttctacccaaccgcagtaggattatgttcctatcatcattacctaataactgtcaccctatgttttctagtaaagtgcattaccagtcccttaacttgtcccatgtgtcatcttggcccctaaactctgataattcagttccagaccacctgaacttgttatatgtttcacaaaatgtctaaacctcccagtcaatatcccctctcacccatgtggcacgtttgactgtgcttctgtggtcatctaactaacatctccaggcccgatcccgtgttgcacctccttgtaattgacctggtacaaatctgaatgtgtaatgggtatgagtgaactgctaagtctaatactgtggctctaggacctgcagtcgtcgcctccttggtgctgtgccagtggtgggtccttgagcttaggacagtcgtgctatgctgaactcctagagctcaatgtgcttgggcaaaactgatgtgtgcaaaacatcctagagaggtcaacgatggtcagtttttagttgcacagagatggtggagatggtgcatggaggaagcggtggcagtggggtttgggagataggagagcgggtggtcagagatgttatagtgaaagactcgggcaaacatgtattgggtatgccacatcagcatctgaagctatttttatttggattctggtgaattacttaccaaatttggggtcattagaatatgcatcttcggagttcatggacataatgacgccgtgggacaagtttttaaggattgctagtgaaatttactcttgtattttgagcgaaggggagggaggtggtgcttcaggaaattctaacatttatcacctgctacaggtacatctgagtgcaccaaatgttgatcagtttatcaacctcttacttgcaattcctgctcagggttataacaattcacttgcttatatcatgtctgaatggtcacagttacaaagtaagagctcataaaacagaatatcattgaatcaaacaaatgtgacctttttattttgttcgtatagtaagagcttttcaacatcctgtgtaggtgaaattcaaggagcctatcagataaaggttacaaccactgcattagctcttctcatatctactcgtcatcctgagttatctaggattgaagtccaagggcatattattaaggtaataccataaaagttttgtttgcaacagttcctacctgcttattagcagtccatgggtgtcttacacacaaaaattcagactagcgcaggtataactacacggtcaaaagctagggtggctcctgatcactggaccaagattccactcccagctaaggtaaacaattattatttgccataataattcctccaaagtccaaaattcaattcttaaagagctttcaaagcaattttcaattccagaaggagatgaatctgcacaaatatcgttttaatatattttgtttgtacataatgtctactgttgagtcagacctcaattttcttttcgcatggtactgtagcattggctagagtccattagttagtttagagacaaggtaagatttagttgttcctttatttttggtataaactactcaagggtcaagtcattgccatctatcgagcaagaatgaaaatatttacctaagcatacctgaacatggattatgcagatcttctcactgttagcagataccttagctgaaattcaggaacaagttgttggtgatgaagacgattgtgaagaggttgctatacttctcttgacactgaaaattttaaactggactgttttttttttgttaacattggttgtcaatacaggatagtgactgggaagagattcagaatggtgattctagtattccacatgatatgatatactcagcatcagttccttcaaatgctaagccatcagttgagcatctaaatgcaatggcgaaagtttttgatgaggtaagtcagtggcttgtcatgctactttgtaatgttttgttgtattaattcctttatatttacccctaattacatacaataggatgacgacggaagttatgatgatgacctggcaaaagctgactctcttaatgaggtttgccttcgcagcaaagtccatctaatataaataaagataatacacatacaatcaagtaaaggaattctttttttccccttacaggtgaagctgtcggactttctaacaaacatctttgtcaaattgtgggagagtgatcggctgctttttgaatatctttgccaggtaacactcctttgctgttttctttcattatctttgaaaactaatgttaaatggctgttttatttccattatcaatgaaaacataacatttcatgggtgtattaattttcttcttttgctttgctgaatgctaattgctataaatcccatatatgaatactacatcaatgttgtactgtattatcctttgcaggccctaacagattcacagaggactgctgtggacaaagttttgaggaaataaagcgcatacatgattgagatatctacatttggtcctattccacattagccattgggtgagctttgatgcttagtgtaggtttattgattaagagttctgtgtacaatgtgaggcgagtcctcgaaggcaggagttggtggtgtgtggttttgttagtgtaggtttatttatccaaatttgtctagatccgaaagtgaaccaacttagaaaatacaagcaaaaatttgccatttgtgtgttcatgtgacgtgttggatggtgtattgtttgtatccatatgtttggttcgtgaaagaaggcaaggaaattttttcatagcggtccacccgttcagtgctttcaggtcaatcggagttctgtttcatgaaatttataaaccttgtgttttggttttgatgagctgctcccaagatccagtcgacatgagtgcaagtcatttgttttgcatgagagcttaatcgatagagtaaattgtttcacttcgtaccgggtttagtatatactccctccgtattttaatgtatgacgccgttgactttttaacaaacgtttgaccttttgtcttatttaaaaaaatttatgtaattatcatttattttattgtgacttgatttatcatcaaatgttctttaagtatgacat

SEQ ID NO: 23821 - DNA, 4278 bp, Oryza sativa
ctagattgtgtcatataactgaagggatttttttttttgagaataactgaagggaaatccttttaggctgcgttccttcccattcctaactccccctccttttttccgtgcgcatgcttttcaaactgttaaactgtgtgttttttgcaaaaagtttttatacaaaagttgttttaaaaaacatattaattcatttttgaaaaaaaagttaaaacttaattaatcacacgctaaacgctgcttcattttgcttgccggggaatgctcccgaacacagcctaatcatgagtcgaacttctgatttttttttttttgaatttagatcatgtttcacaaagttttatccatattttatcaaatttaatgaaatatttataggtttgacaatgtaaatcatggtgtatgtaacttatttgaaggcaacctggtgtaaactgaaaaaaaaatgtgttaaacctagggcatctttggattgaagccaattcttaccttaccaattatttgatagttttgagtagcacttgttagctatttggattgaggccaaatcttaccgattcaatagggttagaaacgaacaaaaccctatcaaaatattggtagtgccaaaacttgcccaagatttggcattaccaaaattttggtagggcttcaaaccaaaacaacccctaatgtaaagtgtaatttactcatttgataaatgaccatgcaagactagatcccgagctcatcacggatgggtgctcaggaaagtgaagataacccaaacttaatcgatattaagattgccaagaatcttaagaaataagcacatcacaactcacaaggaacacatcatgctatatcctatgctcgtaacattagttaggaaattaggaaccaatcaatgacataggtagcaaccagctacagaaagtccatggtttcatctggaaaacacgccatccatctggtgatcagcaaacgaagaagcaagcgcatgaatctaaacaaacctattatgatcattgctctgcgcagtacagtacaatatccacagagaagttcacagtaaaacatgcaacaacatctataagagagattctcaactgctaccacaaatctcagatgcataaaagtgccctgctaagatcttacagcatgtaatttgtcagtgatgaatggctggactgtcgatacggaaatcaaatctggaatggcatgctaccatttcaactgcttctgtttctttcattcggcagagctacccgcaggcttcgattcttcgtcctttggcttagttggggtaataccttcagtgcccatctcaaccttgaggtcattgatgctctgctccaactcatcaattcttgcgcccatttcatctagtgagcactagttaaggactatgtacaaaagcaggtagatatgttgatagtacgatcttgtttatgtcaggaattcaacgaaaaaggcaaaagcctcaggaactcccaaacccagcaatttcttttcccagttatatgtatttaaactgtttcagatactcgatcagaactgttccagtgtactgattgaaggcacaaatatcatactttttaaggatttcaagttactaccaaaatcaggaactttttggacttgtccctcttttgtgtagtgactaatggacagatgtcacacatcaataatcttaaatgcccaagagtattcttacacactcagaactaaaggttcaccatgttaatattcttccttttaaatgaatatattcttcctcttaaatgaatgtatttaaagaagtaaagtgcacaagagaactggtttagaaggatattctttgaaatgatgttctctgacatagattggaacctggtttgctgcaagaaagttacaattcagtaaaagtgaagtgattgcatgaaattcgcatcgccccgccatgtgaacaaagttactcaccatctgcatcagaagattttgcacctgcaaaataaatagtgggcaaaacaaaaataaataagttgtcaagaaatgcactagtaagtacagcagcagcaacaacaaacaactcaatttatatagctcaaagaaaatgtgaactcagagcaagatcttaatgctcacgaaagcggtcatatcagcagtgctctgcgccgagccatccgagtcctgatcagcctgcattagaagagggaatgggatgaaatgagcaaactcggcaagcctaaccacaatcgtcagcccaagtatgccaccatacgcatcacaattcacaattataccatcccacgaaacaacacaaacaaacagctgatccatccatcccctagtccttcacggattacagctacgcactatgtatacagatgcaatctgctttgcgcgtgcaccaaatcttcggtagccaagaatcgccagcacgaggaaacctaaaactgcccacgccgcattcgccaaatgcagaaactgcccacagcccgagcagctgccacacgatgcggaggaggaattaatcccgcaacccgcagaggcaggcgggcaggtcgtaattcaagcaagaaccagccggcgggtgtgatgcgcagccccatttccaagaaattttggcgaaaatcgtcttcctcgagcgctcggcgacggcaacgggcggggaggagggtggcagcggggagggagaggtgtaccttgatggggatgccgccggagccggagccgggagccgccataggcttgccgccggcgagggggggagagcgcaggcgcagatccgctcgtggcgagatggaagtgggaactgcgcgatatgggttgggggttttcgaaagtgggcctgcggcacatgggccaagaaggcgcgttgcaacggatattataagagataaaagcaaaagcaaaatcttataagtttatcgcatagttagttgattaggcatataatgctatgctcaaagcaaaagcattcaacttgtggtattggaggtagtctcggacaccaccactagcatcatttaaagtagtatagataactgtgaatttattcttaaaaatacaatataatcatagtgtaattgtattgtaatttatatgtaacctgaatgtagctttcacataattttgaaccatatatttgttttaagattcgtaacattgttacagcacgtatatatgtaagaggattcggtttcacgacactacaaaagttgtacccatgccttgctatacatctaatacgtgttttgaatcttttttttgtctactgtatttttatatggaccaaaatacccctagcatatcttttaaccctagccccaaatctaacaaccctatcccaaatcgatcccctaatcgccccatgctagcgcctagcagcaatggcgatggctgctaagcaagctccaattgcggcagtggtgacggtaagatttcggcatagaggacggcgtgtccggcagctacgatgtgcggtccgatggtagcgacaagctccacattgctcgtgtcggtggaagctgccgatgctagcaatggaggggatgggcagcagttgactggaacgggcagtcatcgtgtatgatgatccctcctcaccagctccatccgctactgtggatgcgctcggcgatgacagatcgagtggcacagagggagcagatttggagggtggcaccgatgagcaatgctgagtacggtggctgccggtggtcatgaacaacaacccgactcttccatcgccctttttttttcccctacatttgttcttctttttcatgtatatttttttacacgaagttcaatcattttgtacacaagttttgtataacaatttcatactttagatttgaaattttgattagatctaaagcatcaaattgtgaagttgataggaggaaggtcatgttgttgttcaatgcttgatttgtaaggggcatatgtattttggtccatatggaaatacggtaacaacaaaacgatttagtttcagatgtataaattgacatatatatgattttggatgttacattggcatgattccaatttactctatttgaataaattttttaaaatcagcaaatttataataatgtcacttaaccatttcttttggatacaagcgaagcatattcctccgtcttctccccgcccgggtgtcgctctcctcctcgtcgccgtcgccggtcgtcgccggtcgcgggtggcgcgcaacccggagtctctgccggctgcttactcgccgcgggcttcagcttcctcctcgatctccggcgcgcctccaagctgcagatcggccgacccccc

SEQ ID NO: 23822 - DNA, 13973 bp, Oryza sativa
ccgccgccgacgagcgccactgccaaagccctagatcgaagcgaagcagagggccttgcctcgccctctccactcaggatttgtaccgctcgcattcgcatcgcgcgctcatgacctggagttcatgttgtggaagtagacgcatcgtagcaagcaccacccacgcgttggcttgcccccgtatctgcggttgattgattcctgttgggttcggttggtgtttgctcagattcgaggtgacaacgtaccagcagtgaagaaaaaacattgcgaagaagtgatcctcgttgcaccaagagtgtaaataatcttttgatcagctcctagaacaaacaataatcacatgtgttggtcccatgggcagaactagaaaatcaatccaaccaagatgagttcatgattgctcattctttcgtgcgtcagataaatcaagctgcatacttgggtaaaagaagatcatgtgctcaacatcttattgttctgctagcagttgtgttgaatcttcctatgattggccgaaacgtattatgaagctcctgatgcttctgctctcccagttgttggtaaagaaagtgatgctgttggtttggctagctgtctagttccttccagtttcttttgttcctagcatgggcaacagtagtcagcaatcatatcaaaattagatgaaatgcttgttacttgttgagacattgagatataatggattatggagatattactccatatgacataaatacatattaattatggacatctatttccagttttctctaatacttttttgtttttctgcagtgtgttgaagcctgcccttgacacttagcaactgcagagtcctgctggagagagatggggttcatcggcgacacgatagagtcaatccgctcgatgcaggtccgccaggtgctggcgcaaatcatcagcttaggtgcaaccttgcctcttttgcctcagtgattattttgctcacagataagtggattgggtccactacttcttgatttaggcttgggtatttaccttgtgattccaggagagtttctttgggagtggtctattcttagttctgttgggtttgatttcgctggtaacgctggggtagggaagtcttttgggattcttgatctagttctatgagctctattaactattccctctgatccatattataagacttttgggtttgtcccaagtcaaactactttaagtttgactaaacttttataaaaacatagcaacatttataacaccaaattagtttaattaaatccactattgaattgtagtatatttgatttgtgttggaaatgctgctatacttttctatgaagttggtaaaacttaaagaagtttgtcttaggacaaacccaaaacatcttataatatggaatggagggagtagatttttctaaggaatcatacggatctgggtaacaaaaatggattcgggaaacaactcttgtttaatgttaactgtaaaaatatgcatgttttatagaggaatcttttcacatatgagtgggttttaaccttagaaacttcttattccttttttttaaagctagggcatcagggcccccatttccattaccagaaatgagatagtgctacaagttcttgctgagttacttaagcctagaaaacaaaaagcgaaaggaagataaagaaggaaaaacaaaagggtctagggttacagtttaagatctgaaggatctcccggcatgacagcaaaatattcagcaaaacacacaactattcctattcagcagtgcacaccacaggacccatctttcacttgatgtctttagccctctagtcttatgatccccgtcccccaaccgaatttggagttgaaaatgtcacttgccacttgccttattaatctggcccccagcagaagtttttctcgatttgcctccaatgtctgcaacacagcccaggtttaaatccagtgacaagtcagaaaaactacctcagtagggtcttttgggagtttattctcaaaacaagcattgctcctaaatttccaaatggcccaaataactgcagccacccctacaaccactgagtgtttcatgttcttctcaaaaccattcaaccattgcggcattgcccaaacaggtgttgtatactcacaccaagtttcagattgagtgcattaattactacattccaaatcaatttggccattggacagttaaagaacaagtgttgaattgattcttcctcattacaaaactgacaaaagatcgagttacaaaatgtgatattaggcaaaaggagcacatagaatttactcactctgtcccacaaagcttcaccttttgccttcttcatttgccccacaaagacttcatctttgaagcagtcagtgcattttggagtttgagaaaaaaagagggacatatgcattgaagtttgacaaagtgcggaacgaatacattagagttctgagaaagtgaagggtattatggtctttttggttttatattggtatgtgtgagataggctaaaaatgaattctttttgggacggaggtagtactgcttagtatgtttttatcagttaggttagacttctgctgctcttatgttatatatatttattgttgatgcaacagcatatatgatagcttcaaatgtttctcttggcaggtatgattgttacctctgcattgatcatatggaagggtttaatagttgtaacaggtagtgaatctccagtggtggtggttctttctggtagcatggaacctggatttaaaagagtaagttgcttccttagacaatataagagccatattatacttatatttgtgcattcgcaatctttggtctttacatacggggatttacagtaatatttgttttttgtgcatacgctgaatttctcagttataagggacaaatctaaatttcagaagttccatctgcaacaaataaaaaagggaatttcctttttttaataagataggacgatatatggtttcctgtaatttatattggtttgcaaatggtgaacaaatgccttgttgccttattttacattccttaaaacttcgggttcattcatttcccaaaattttctttaaacagcaatttattcccatctgtgttcaactttcaccaagaagtcactttttaccctttaatgcactgtatgcatttagcattgttcatgaatgaattgttatctgctttcagggtgacatcctgtttttgcacatgagcaaagaccctatccgcactggagaaatagttgtttttaatgttgatgtaagtcttactgaaacattgtacattgtacatcatgaatttactgtatttctatatctcattgtattgtatttggctgttttctgctttctatgtagggccgtgaaattccaattgttcaccgtgtgatcaaggtaataaatttcaagtcattatattatcccatttgtttcagatgtcttttatgatctttcccctatacaatggagcttatcattctcttggtataggttcatgaacgccaggagagtgcagaagttgacatcctcacaaaaggtatccatcattttctatttgaacaccataagtttctcaccagtggttatagtggtgactggtaaagcattggcagtagtaatcacctgctaacaatgtataacataccgtggatacagcaatgtttgtttgtaactgatgagctgcctttcaggtgataacaattttggggatgaccgacttctgtatgcacatgggcagctttggcttcagcaacatcatattatggggcgagctgttgggtgagtgtcctcgactttgacaacacttatgtgccttcacacttaatgaaatatattttgcctgatcttatgttttgttatgcgagaacagttttctgccatatgttggatgggttacaattatcatgactgagaagccaattattaaggtatgctcatcctttctcagtatactgattgaccttgagattaaacaatgaatgcctgttcataggcgacaatttgttccgtcatataactcttcgctccttctctctatcaatgatagcacaaaaattaagcagtaccattgcagctcgataggtctcttaaaacttgggaagcatttctgactgactgatatacgatttctcttgctgcagtaccttctgatcggcgcgctgggcctactggttataacatcaaaggagtaataaagatgcggcttttcagtagagtagtggcctctctagtcgcatggaagaagctggtatttgtttcaccatgtttccaatggaagatgcgaggggtttatttttaggataactgtgcgacaattggcattgtattttccagcggtttatcatgtggcatccatctttcagtggtttacagttaattgcgcaagaaaatttaacgtgacttttggttcggcaactggttattggatgctgactttgatacaatataagatgaattcataaagcaatcctttgaggcaagtagaatcgaacctggctaagcctttttccatggatttgttggagtcttgactcttgagtgctaaatccctttcttggttaccaactgctattcagcggcagttcttttcactattgtatctgtcttctcaatccaaactatgctgaagtctgatcactgaatagcagcgcggctgtgatggttcattgaatactttgttgaatgctagtagctcatgtgccataaagccctaacagaatactggtgagatctcaacatgcacatatatgcttgtacttgtgtgagattgaggcaaatatttctgtgtatagtaagtatatgtgaaaaggagaactcgagccatattatagatctccagcccattaaatcgtatccagaatattgatatggtgttgtctttttggataaaagaagttcgtttggacgtggtctcttttgacaaatttgtttacttctgatgagtgaaatggtttacattttgactgttgtctgggtgagcttaaagcgtaagaatgatttgaccggctggctttaaaccatggcctttcacttcttgttcttggtccgcagttcttgagtgactttgaatgtcaaaatttcaggttgtcgttcaaacaatgcgatgcttttggcgtcaaaacaaccaactgagacgccaactgagcttagagtcttgtgataaaactccagatttaagatctagactcggcaagaaacttgtatttaccttgagatttaacatgaggacgtatttagtggtcaaagtgtgcagtgtgctagtgctatatggggttgagcctttaatttttttttgaagggatggcaaaagctttacgtctttgcctcgtatatcgatagagtagaagaaaattataaaaagttatgtatagggtctgtcaagacgacatacctggaaaaagagaattcttagaagatatctcccaaaattccgaactcttagagtctagatgctcttgcttcctccttgatcttggctaggattgaggttgacgttgatgctttgtggcataatattcttgcattacgttcgcaccacacttccgaagataccagaatcaccagagttctaagtggttggtgagggttattgggggactcgagcacaagattccactattgtttgactgagtgacaatcattccacttgttcattgtaggtacgtgctagtccatctctggatctctgcccatattctctttgtggccctacattttgctggtaggtgaactgcatatttgtcgacagtacaacacaatgggtagatcttttgatttttccaccctcttcgctccaacccgtccgctgtccacactctattttggacaatgagctaggagaagaacttgcacttcgaaggggcccatgatttctagatcgattggttgaaagcagttctcgtggccccgaggaaccgaagtctgtaagccaaatttgccgaaatttgacgagtattgtctatttgccgtgaggttccaccgaatgccattccgttcgtaatttagaggggtcattatcctgacgctagatcaaagtcgcacgaattgttgcaaatgttccttctctgtgaatcacaggatgtcaatgtctcgaatccaattgctttcttttttttttttgaggctgcgaaaatagcaggtgcaatcctccgtggggtttgattttctagccacttcgagctctaaaagcacactgtttgccatccccaactgttatggttgctgttgccgcaaatagttcctcgtcgagatgattgcacgggaccgcagtccctgcccatggcttctcaggtgccacccactctttccaatctaagccattgtgccgaagcaaaacgatcataaactgaaaaaaatctatactcagatcaatatatctaagcatctgattccgcaactcaacgaggcaaagacaaaaaaaaaaaaaaaaaaaaaggcaaatccaagggaaattttcatctacattgctccatatttgtctgtgctttgctgagtgtcacgtcaggtagcgttgtcatgaggatgcgattatctgaagcagcaggtcgttccacacgtcgatcgctccgggcaagcaccagtgcaggcagtcgatctcgaatccgtcgtgctcgccgccgccatgcccgtgccggtccgggtgcccgtccggccggagcagcatcatccgcgtcacgtccatcagcctcagccgcgcccgcttgccgccgttcctcgccgccgccgccgccgccgccgggagaactcctcgacctgcgcccggtagaactccgcctccgtcgcgccatctccggcgccgccccgtcctcgctctcgctggccggccgcgtcgcggtgcactccccgccgtcgaaccacccgccgttctcgtagtgcgtcggcgccaccgtgcgcaggatcgccgtgccgttgaacccgtccagccgcgccagcgccccgagcacggcgcggaacgccgcccgctgcgcgtgctctggctgcttgacaatggccgtggcggtggcgttgctgtcgccgcagtcgtggcagccgacgacgcggccgtgctggtagtacacggcggggcgcgcgaaccagtgcgacgcggagaggacgacgtagtcgtggctcttggcggcggacgtccaccgctcgtcgggctcgtcgaggtggaagtcgctcgggccggcgaacacctcgccctgccgttccggaccgccgccctccggcgggccgcgcgtcaggcgccaccggacctggaacggcgtccagaagtaggcgacggcgaaaccgtgcgccgggaagcgccagtgctcgaaccccgccgccgcgtcgcgcgacctcgccggcgcctccacctgcgacagcgcgcacacgagggacgtcacgtggctgctcgccagcgagtcgccgacgaacagcatcgacctcccgcgcacgagccggaagaaccgcgccgcgtcgaacggcccgagcggctcgcacccctcgccgccgtcaccgggacgccaccgccaccgcaagaactccatgctgggcctcccgtgcttcatgcagttctggtagttctggatgaacccgcacgtcgcgttggtgtagtacggcgccgcgccggcgtcgcgcatccactcgccccgcccccgcgccagcgcggcgtcgcaggcagccgcaccgccatcatcggcggcgccaggccaacggaaggagccgagggagaagaccgagaaggtggcggcggcgaagaagaagaggagcgcgacgagagccgggacggacgtggtggccttggcggcaacggcgtggcgggtccggcgagccccggcgaggaggccgcggatggagaggcgcttcatgacggttaccgacgaggcctcgccggtggcgtcgccatgtcgccgtgtaagtagtgggaggtcgccgatcgatcgagctccactgacacagatgtgaaagtcaacggcgggggaaagtggaggagacgtggttgatggatccggacgtggcgagcatgtgagcgcgcgtgcgtacattctctcgaagtgccccggtcaatccaacattttttgtacaagtatacggggctatctcgtgcatacgcaccagcaactgagatggcgcccccacccggcagacaagttttcttctctttttttttttacgatttttctcctattttggcacccccttccgtcggagcgtttttttctgttttttttttaatcttcagcgtacgtgttttttaaggaggtgtttggttgcccaccacacattgccacaatttctttggaaagtgtttggttgactactaaagctatgctcgtcacaagccaaacctcctcccaccacaatattttccagcagaagtgtggcgggctttttccccaccacaaccatccgtagcgcgccatatcggcgaaaaaaatcaccaactaccgcgataaattcacccccttgccttgttcaacacaacaaaccctatcttaccacatctctctccttccgccatgctccatggctgccattccacaccgccgtgctcgttgagctcacgggcagaggtactgccttctcccaaaggcagtcttcctttggccttctgccttccgatctcctgtcaccaccaatagatggcacctgttgatctctggttttcgttgtatgtgtgtgcatatctgagtagtttctaagccctatagaagcaacggaggcagtggaggcaaagggacaccaggtacatctaaattggtaactcctatttccaataaactataggtgtcatgttcatttatcattttttaaaataattctctattttcatagggatgcataggagcactatagtactgtactattctcaccactatagtattgaggtatttctatcattctgtaagaggaatccaaacagctaccacaacttcttgccatacattcgtggcaacgatccaaaacaacagccacattgattttgccacaccttagtcataaatcaaacagtctaattttgccacaaactctggctagccttgtacttaagcttaagcatggcaatgtgtggcctagaaccaaacacaccctaaatctttaagttgaaagttttcaaatcttgacttaaaaatcttctaatttaaattggaagtttcaaatatggagttgaaagtttttaaattttgagttgaaagttttaaaatttgagtttaaagttttcaaatatcagttaaactttttcaaaattgagatgaaaagttttgaaaatttgacttaaaaatttaaatttcgagttgagagttacaaaatttgacctcgaagtttaaatattgagttgaaagttttcaaagtttaacatgaaagttcataatttgacttgaaaattttcaaaatttgggtttatagtttgaaattttaagttgaatgttttaaattttttgtatgacttttagtttttaataaaaagttttagattttatttgaatgtttctttcacgtatagatttctttcaatctgttactcctagtaaaaaaaaccttcaaagaaagaaaatattaccttaattatcgttatatccaaaactaatatgattagttacgataagatttagcgcctccgggaaaagataaggttgttgccgactgaaaaaagaaaagtcaaaaacaaaatgtgtggctatgctggtccttatgagcctgaaacgcacgtcaccaattagctttgtcgcaagtatactcctactgaccctctaaaaaaagtatactcctattgatagttcataaggactcaggacactgactccatcatttcggagtttactctccctatcccataaaaaaatattcctactatgtcagatgaaattagtgaagaataaaaataaacaaaatacatcttattattgagaaaagtaataatagtgatatgtaggtaaaggatattgaatggagaaaacttctcgttttatgtactaaggataagtataatggcaaaagttggttttttatgtgacaagatttaaactttagaagttgagttttttttaaaaaaaaattggaacggaggtagtatagattttgatttggaaagatcaaactggatatggcttttctgacgttaggaactttaggaaaattggaggattcagttcctataggatttaagtactattcactcattcagtttggaggaatcgggtatgaaaatattggaggatttttttcccttcacctatgattttatatgaattccataggaaactgaacattcacgatgacctctttttcattttcctttgagaacttcaagacaaatcaatgcatatgacctcaaaatgagcctattccaacacttgtcaagcgaaaaaaaagagttacatatcataatcttgatacaatggttgtgcaactttttgtcaactttggatggaagtttataaatatggattcaataattgaacactctttatattgtgttgacaggtttttatttttaagtttgtttgtgctttaatggctacattagcctttataagtttcattggtctgcattcgtgttgagtgtttcattgtaataattggctgtaaatctcggagtaaaggccgggatggttttattctattctattattaaagaaaaactatttgttatactcaaatagcgaaagtcttatgttttgctctactcctgtgttctgaacaatgtgtgtgcattttttctatgttttttaattctatgtttttcatatacaattctatccgatttatgcattttttttctatttttatgattttgtattcctacattacaaataagcccctaaaccggaactaggatccatcatccaatccttgcgtctccgtgggtcgcggcgcgcgagagcaccccgcgccgtgccagtccaactaaagcgcccgacacgtccacgaggaagtcggggaagtactccgcgtttcacggctagccgaggccactgggcaagtgggcacgaagtctaaggccccaaagccagtgattgttggacgtgacaaggaagtaaacaggtttttggtgcactgtttctctgttcctacagaaaaaaagatgattctggtagagaggtagtagtattactccatccatcctagtacttaagtacaaccatgagttttatgttgaattttaatcgtctattatatttaaaaaatatttaaaaaataagttatgtataaagtactattcacgttttaccatctaataacaacaaaaaatgctaatcataaaaatttttaaataagacggatgatcaaagttagacatgtaaacttatgactgcttttaaaatggagctcatggttgttcgcacgccatggggagttgtgttgctattcaggttggttcgcagttcgtacaccaggccaggcctactggactatcattgggaggtgctcgatgagggcgttcatagtgcagtgaggtggcattctgttctaaccatccacgtcagatattcctccctagatgcatgcgtagcgttcccaatccaagcccgtggagccaaattaagtcacccgttcttcgtcagaacttgtaggcaggccatggccccatgcgacgcccccgcatcccgtatgaggcggcggcagttgccggcgaggccaccacgttgtcctctgttggcgaaaaaatcgaacacaccggcctgggagatctgcttagctccagtgcaggtccaaatcttgatgagatgcgggcgtgccagtcagtttgatcctacaactgacaatatatgcaaatagtagatcaaaacagccgatcggctgacaagccgatggagtagttccagccgatagccgataatagccaatgccgataccagccgatagcgatagggtttaagcaatcctatatgtccaatgtagataatgatatagtggcaatcagctaatgattatataataaaataacaatataatccaatatataccaatcggctagcaatgatatgataaataagcatcgatccgaaggttaaagcacacatcggctggaggtccgatgtcatgaaatcctcaagattagatagatcaatgaaacctttattgtcatcggctaaatccaactcatatgtatatgcaatccttatgagccgatgcaatattcagataactcaccggttgaaaccccgatgaaacccttattggcaatcaaaaagtaggctagagattatggttctaagcacaacttagtagatcaaacttaactgatgcagtactaagtatgaaaagaaacacaatatctagacaatcaagccgttgactgagttttcagggtggtagatgtctaagctaatctaatctagcaacgcgatttagccgataccggtagaaaccctaaaacgagaagcagccgatagagctaaattgatatgctaagactagattaacagagacatatgataaataggtaggcaaatatatcatccaaaccagagcaatccaagaggtcgaatgtactgatgcagccttgaacgacgccgatgtaaacgatacaattgcttgggccggcggaacattggactttccccttagccagagatcgaacaccgatgtagccccgcgtcaggtgctaagtcccgccggacgataaaataaaagtagaagtaaaaagggtggcgatgcgccgaattatattgatcgtagtgatagattacatagaccccgggtgtacatatttatacccatgggttgatacaagtctttgtcggacaagaaagaaactttcctaaagataaaaggaaaagataaagtccttataggccaccaaacacactttcctaaagataaaaggaaactaacaaactattcctaattaatatataacttgccatgccgtattttctttgaactcggtctcttctgaataagcttcctttgatagatcaatttccttaaccgaatatagcaagaatccgacgactgacgacttgacaactctcatcagctaatctcaggacttcaaagccgatgctgactctaagccgatgactactccaggcttgccaaaattcactgttaacatcctcaaagcggtgccgtgtcggatttggtgagctcgacggggtggtgacggcactagccaaggggggaggggggggggggggaaggaagatggcggcggcgatggcctgggaggaaagggaagatggcggcgacaatctaggagaagggaatatggtgactgcggcggaagtgagcttgggccaaaatgtgtgacgcactgctgctgccctggtactccaggtgatactagtcagcgctggcatatgacaaaactggtgccatccattcagttggcatccactgcaaaccggacgcgcgccggcgcacgccatccatccatgcgtgcgtgcattccgttcgttgctcatcctctcccgtcctgttccgcctttgcacgatacgacggaactgccgggtttcactcgtcggtagccatccgatcgtaccgtgcattcctttccgagaaacaacatttccagaaaaaaagacccaccccatcctagaaaaagagttgctcccactcaaaactcacggatagaaaaaagcaagtacaagtactaaattcctagtgcaccggcagggcacttgtctgtgaatattggagggtacttctatgtcatagttaaacaccatatatagaatttgaggggttaaataaacttatttctatatgaaaattttgagagagaaaaattacaaagatgaaccagaaaactcttcacgattgatgacgcagcagcatctggagcagcatctcgttccacacatcgacgggtccagggaggcaccagtgcacgcagtcgttgtacagcgtcacgttctcgtgcgcccagtgcccgtaccggctcgggtgcccgtccgcccgcgccaccatcgccgccgtcgcgtccatcagcagcatcctcaccgcgctcccgctcgccgccgccgccgcctccgccctcctgaa

SEQ ID NO: 23823 - DNA, 2303 bp, Oryza sativa
tattctttcagtaaaaaaatctaatgggtgtgtgaagtcatgtatccaccacacttacttgtgctttcccacaaaacatcacatttttacgcggattaatcccgtaatttgtgccaacaaatgtgtcaaaatgttttggttaccttggagaggaggcacaggagagactgcatatggttcctggagagcgagtcgccgacgaacgccatggacttgcccctgacgaggtccaggaacgccgccgcgtcgaaccgcgggagctcgcagcgctccgggcgccaccgccaccggaggaagccgaggtcggggcggccgtacttcatgcagttctggtgctcctggatctccccgcaggtggcgttcgtgtagtacggcgccgcgccgtcgtcggcggcggtggcgggcacccactcgccgcggaagatgtcgcagtccgccggcgcggcgcgccgggcggccctcggcagcgacgcgatgctgggctcgaacctccggaggaacgaagggcggcttgccgacgccgtgagcagcacgacgacggcgagcgccgtgagcgacgccgctgccgtggggttgacgcgctgaagcagcttcatcggcgacaaccagcaatgtgcaagcaagcaagcagctcagagcagctccagcagcagagacgccgctccgccgccgccgacgctcgcgccgccggccgcgggagagagaaggggatcgggggattttctttctttgttttttttttggggtttgtttcgaccgacgcagttgaatttaaaggggacagaggcgagcagaatcagtttgtcaattgttaaatgtatcagattctgctcattcgaaaacatttgatttatataatatatggtcattttcatagcaggtttggtaagaattttaatctcactacataacatacaatataaggccctctgaatcgcatgattaaaaaaaatatagaaataggaaaaacgtaagattttgataggaatttaggtgtaaaacagaggattgtaaaacgcaggaaaacacgggaatgaccgtttgattgaactgcaggaaaaacgtaggaattggatgagagagatagactcaaaggaaatttatcaagaggttgaagctcttactaaatttccttcaaaatctctataggattgtccattccatagaaatttcaaagtattggataggattcaatcctatatttcaaagggccttacaagaaattttcctataggattgaaatcctccaaaattactatatttttttcctccaattcaaaggggctctaaataaggctgtatttagtttacactaaaattggaagtttaattaaaattggaacaatgtaacggaaaagttagaagtttgtgtgtgtagaaaagttttgatgtgatggagaaattggaagtttgaagaattattttgaaataaacacggcgtaagtcaatgacatatcaagagatttatttaacaaaaaatggacttcaatgaaacgtgagatataaatgggcttgttcggatgcaagtaacagccggttgactatatgtcagcgttgtactaggcagcggaacgaagccattgaaaagaacaatgaaataaaactttgtatcagcggaataaaatttcccattaaaaatgcgctaaatgttacaatcaaaaataataatgagcagataaaatttaagagatatagaaagatataacttatttaatacttcttcatttatgggccaacaataaataaggacagtccaaaccctccacctcaactaatttccatagcattaattatactgtcacataaaaaagctgaggtggaaaagagtttttaatgagaagagagaacatttctcatggaaaaaatagctctacacataaaccaagaacaagaataaaaataagagaatagctggatgaaagaagagtgaatagagataattgaatgaaaatttattatgaagaaaccacccattagatatatagttatctgacatgatgtctatatatatatatacatgttgagcatggaaactatttgatactccatccgtcccattttaagtatggttgtggggtttctatgtccaacgtttgtacatccgttttatttgaaaaatttacaaaaaataaaaagaagtcacgcatgaagtaatattcatgtttgtcggtgatatgggaccgggagtatcatgactagaggcttgaggcagacacaatcgcccacgtggcctggcaccttcggggacgtcgggcccgagggtgaggtgtccgccctcctcctgatttcccccgagggggggg

SEQ ID NO: 23824 - DNA, 8368 bp, Oryza sativa
cgcggtggacaagaatgaccgatttgtgaccggtctgacactgaccatatcgtcagcgcacagccatgttcccacgacgcgctcacccccggcggaagtggaggtaggtgtgggctgtcccatcggagcgtcattcggacagcaaccgtgctgatctccgcccattcaagagaaaaagaacagtccagtttggaaagagaagggtgcatgtggtatccccttgaagtataaaaggaggaccttgcccatagagaggggagttgattctttcccagataatgagcttagaacgggggagaagtcagctcacacttgtagctcattcatacgcagatccaccaaaacacaggagtagggtattacgcttctcagcggcccgaacctgtatagatcgtcggtgtctcgtgttttctggctggcatacgatttttccacatacagagagagtgagagcttgagatttcaccctaagccctcggccgaactggcaaaggggggcctgcgcggtctcccggtgaggagccacgagctccgtcatctggcgcgccaggtagggggctcagcgtgtgctttcagagctctcagactcttccgtgtgccccaagtttttcttgttcagcctaatggccgagcaaggaaaaacgcacgacctctcgccgagtgtgagcggcgacgacggggagccgaatccacgccgtcgagctcgtactcctccacctcctccgcgccaaagccctaagcagggggaggcgcttgagagggtcgacaagtccgcagcgtcaccggccgcaggtgatgcaggagaacggcgagacggggagcgtcgcctcctcgtctacggcgacggcagcacgcctcagggtgcgcttcaagctgctggcgcgctcctacgacacccgcctgtcgtccatgacccggagtctccagcccaacgatggctggaagacgtggccaacttggtcatgacggcacagcagcgcctgggtgctggtggacggtcagccaccaccaccaagacctccggcgccgctaccaccggctccgtgtcatcaaggcggagggcgcggcgagcggcggcggctgcacgtcattcggctgccactccctcgtctacaccgtcgactcgggaggatcagcatggggagccggatgcccgcctcaacatcgggcgccggtgtaatagccggcgtactccccgtgcaacggagggagcctcctcgtccagagtgtcactccgacatggacgtgaagatcagccctccgtgcccccggccggtggtgttggctgtagagcctttgtggcgagtcttcggaacgtccgttggcccccaaggttccggcccaccatcaccgagaagtacgatgggagcgtcaaccccaccgagtttctccaggtctatacgaccgggattgaggccgctgggggtgacgacagggtcatggcaaacttctttcccatggccctaaaaggacaggcgcggggttggctaatgaacctgccacccgcgtcggtccactcctgggaagatttgtgccaacagttcaccatgaacttccaaggtacatatccgcgcccaggcgaagaagcggacttgcatgcagtacagcgaggcgatgatgagtcgcttcgctcgtacattcagcggttttgccaagtccgcaatactataccatgcatccctgcacacgcggtgatctacgcgttcagggggggcgtgcggcacaaccgcatgctcgaaaagatcgcttccaaagagccccagactaccgcggagctttttcagctcgcggaccgagtggctcgtaaggaggaagcgtggacctggaactcctccggttccggagtggcagcttcggccgcccccggatccgccgctcagacagggcggcgtgataggaggaggaagaagaggtcggaccgttccggcgacgagggtcatgtcctcgccgtcgagggcgctccgcgggccacccgaaaggggaggcctgcgagcgacaaaaagaaagaggccggaactcccggcagggagcgccccgccggcaggtggtgctccgtccacaacacctccctccacgatctcgcggactgtcgtgcagtcaaaaacctggctgagcgaacgaggaagtgggaggaggacaggaggcaggaacgccgtgagggcaagtccccggtggttccatccggcaaacggcgaggtgaggccaagcagaaggcccccgctgttgacatcgatgatggtgatgatgacctaggtttccaagaacctggggccaccattgccaccgtcgatggaggagcgtgtgctcacgtctctcgccggagcttcaaggctatgaaacgagagcttctggccatggcccctacccatgaggcgatgcgtcgggcgcggtggtcggaggtcgctctcactttcgaccagactgaccacccaccgtgcattgcccggggagggcaggttgcgatggtggtttcccccaccatctgcaacgtgaagttgggacgtgtcctcatagatggaggagcggctctcaacatcctttcccccgcggcctttgatgctatcaaggccccggggatggtgctccagccgtctcaaccgatcatcggtgtgacgccggggcacacgtggccattaggtcacattgacctaccggtcaccttcggtggacccgccaacttccgcacggagcgggtgagcttcgatgtggcggacctcagtctgccctacaacgcggtcctggggagacccgcgttggtgaagttcatggcggcggtccactacgcctacctccagatgaagatgccgggccccggtggccccatctctgtccgtggcgaccttaaagtcgcgcttgcttgcattgagcagcgcgcggaccgcctcgctgctgcgtccaagcccgagggtggtgacgagaggcttggcccttctgcccccaccgccccgaggcagcggatggccacttgcgacgaggtcccggtcaaggaggttgccttgggcgacggcccatccaagaccacacggatcggtggtttctggatggcaaataggaagacgcgctcgtctccttcctgcgggcaaacgctgacgtcttcgcatggagaccagcggacatgcccggggtccccagggaggtgattgagcaccgtctcgccgtgcggccgggcgcaaggccggtccggcagaaagtgcggcggcaagccccggaacgtcaagctttcatccgcgaggaggtggctagacttttggaggccgggttcattcgtgaggtcatccacccggagtggctggcgaacccggtggtcgttcccaaggcgaacggcaagcttcggatgtgcatcgactacaccgaccttaacaaggcatgtcctaaggatccttaccccctgcctcgcatagatcagatcgtcgactccactgcggggtgcgaccttttgtgttttctagatgcatactctggttaccatcagattcgcatggctagggaggatgaggaaaaaactgcgttcattacccccgtaggaacctattgttatacatcaatgcccttcgggttaaagaatgcaggtcctacttttcagcgtactactcgaatttctttgggtagtcaaataggacgtaatgttgaggcgtatgtcgatgacttggttgtaaaaacgcgcaaccaagagaccttactttcagatctagcggaaacttttgagaatctccgctccgcccgcataaaactgaaccccgataagtgtgtgtttggtgtacctgcgggtaagcttctcgggttcttggtctctgcccgaggcattgaggccaatcccgagaagattcgagctatcgagcggatgcgcccccccagcaaacttagggacgtgcaatgcgtcaccggttgcatggccgccctaagtcgtttcatatcaaggctgggagagaaggcgctacccttgtttaagctcctcaagcgctcggggccgttcacttggacggaggaagctgaaaatgccctcgcccagttgaaggcgtatcttagctctcctccggttctagtcgccccggagccaaatgagtccctgctactttacttagcggcgaccccccaagtagttagtgcagcgttggttgtggagcgcgatgaggacaatcctcattctgcgcacccccgctctgtgccgacttggcccgggagcaggcagggaggagaggcccccgagtcgaacggtggcctaaggcccccgacgaccggagtcggccctccacccgcttgtcaaacggtgctgggtgcccccgaccctcaggaaggccccgaggccactgagggaaggctgcacttaaagccctttggccccgaggctaaccctgtgctgactcgacccgggaaagagcagggagaaggggcccccgagccgaacggaggccagaggcccctgacgaccggagttggccctttgcccgcttgtccgacgatgccaggagtccccgacccccaggacggccccgaggccactgtgggagggccgctcctgtcatcctccgaccccgaggtcatcagcgcagaagacgagtgcgccccgaggggccacttggacgaagaacgccccgggggtacggcccctaacgaggaggatcggccccgccgaaaggtgcagcggcctgtctactttgttagtgaggccctccgggacgccaagacccgatacccacaggcccagaagatgctttacgctattctgatggcctcaaggaaactgcgccattatttccaggcgcatcgggtcactgtggttacgtcttaccccctcggtcaaatcttgcataatcgagagggtacaggacgagtggtaaaatgggcaatcgagctttctgagttcgatctgcactttgaaccacgccacgctatcaagagccaggccctcgccgattttgtggcagagtggaccccggctccagagaccgtctcaatgcccgaggccagcacgaacccctcacagctgcctcacgccgcccactgggtgatgcaattcgacggttctctgtctcttcagggcgccggtgcaggggtcacgttgacctctccgaacggagacgtcctcagatatttggtccgtctcgactttcgagcgactaacaatatggcagagtacgagggactccttgccggactcagagtggcggctggactggggatccgccgcctcttggtattaggcgactcccagctagtcgttaaccaggtctgtaaggagtaccggtgctctgacccacagatggacgcctacgtacgctaagtgcggcgtatggagcgccattttgacgggatagagcttcggcatgtgcccagacgggataatatgattgccgatgaactctcaaggctcgcgtcctcgcgagcccagaccccaccaggcgcctttgaagaaaggcttacccagccgtcggcgcgacccgaccccttaggggagacggatgcgcctgaccggcacccgaggcccgtcggagtccaggcctcgggacccgaagagagcgttccaagctcccttagattgattgcttggatctctgagatccaaacatacctcacagataagactctacctgaggaccgcgaagggagtgaacgcgtacaacgcatttccaaacgctatgtgctggtagaagggaccctctatcggcgcgcggctaatggaatcctcctgaagtgcattcctcaggaacaaggcgttgagcttcttgctgacatccatgagggcgagtgcggagcccattctgcctcgcgcaccctggttggcaaggcctttcgtcaaggattttattggccgacagctctcaatgacgcagtcgatctggtccggcgatgcagagcgtgtcagttccacgccaagcaaattcatcagccggcccaggccctgcagatcataccactgtcatggccatttgctgtctgggggcttgatatcctgggaccgttcaaacgggccccgggcgggtttgagtatctgtatgttgcgatcgacaagttcactaagtggcccgaggcttatccggttgtcaagatcgataagcactctgctcttaaatttattaagggcatcacggcccgttttggagtgcccaaccgtattattacggataatggcacccaattcactagtgagctcttcggcgactactgcgaagacatgggcatcaagctctgcttcgcctcacctgcccaccccagaagcaatggccaagtggagcgcgccaatgcagaaatcctcaaaggccttaaaaccaagaccttcaatattctcaagaagcacggcgattcatggatcgaggagttgccagcggtgctctgggcgaaccgaaccacaccaagccgagcgaccggggaaacgcctttcttcctcgtctacggcgcagaagcggttctcccatctgagctcaccctgaggtctcctcgggccaccatgtactgcgaggctgatcaagatcagcttcgtagagatgacctcgactacttggaagagcgaaggcggcgcgcggccctccgagctgcgcgctaccagcagagcctgcggcgctaccatcagcgccacgtccgggcccgatcactctgcgtcgacgacctcgtcctacgccgcgtccaaacgcgtgctggattgagcaaactctcaccaatgtgggagggtccgtatcgagtgatcggtgtcccccggccgggctcggtacggctggccacgggcgacggcacggagctgccaaacccatggaacatcgaacaccttcgtcgcttctacccctgaaggggggggtcgggtgtcaggttttggctcgggctaaccccgcaccccccctcgggtgtgcagggttagccgggggctaccacacatgcatatatattcctttcagcatttcaatagaagcagtttcaatttcctaaaggttgtgtctgtgccgttttttccttttgaagaatcttgacttgaaataatgtcactcgtgctcaaccttgccctcgggggctcggttcggtcggctaaaatcgccaaacggggcccagaaccgagccgtgccccggggcgtggtgaactccgggggggaatcggcaaaaacccacaatcgggtcacccatacccctcggtcaccacgttcccggcctggccagtctcgacatgcggatctccccaggcactagccccgacccgagccattcgaggaccgggacttgggcgcgagcccttattccaagctaagtcgcaaaaggaccatggcacagatcatcctcaactcatatatatagcaaaataaaactaacacaaaaatttttcatcatttctcattgcagattaagttaaaattgtacaaaaaagaggcatgaaggccttagaagaaagaacaagaaaaaagataagagtggcgggggcctgggggctcattcatatgcgcccgggtcgccggcctcgtcgccaccgccgtcctcgctgctggtgtcgccttcctcgtcggagctgggggcgaacgcaagccgaggggccgagccctcgaagccgttgacgatgtggtcagcagcatccccgacccgcgcgcgcgcctcgtcctcggtcccgggagggaactcctccagcgccatccatggggagaagttgggatcccgggcctggtaactcgccagcacgagttcgaccgccccccgggcgaggtccctcgaggatgccttaatggtcttctcgagctcctcggggagtcgctcgagaacccaagccatcctgttgaggtgcggtgcgaggccttccagattggtggggggcaccgtcgtctggcctccccagagcctgcttgccgaccggcgcgcttcatgcgggagaccgcgtcccaaagcatgccgggcccaatctcgcccgccaagcgaagggcctcggcctccccggtggaggagtccagcgcgcgctgcatgtcagcgacggtgtgttcggcagccgcgaggcgagcggctaagtcgctttcgcccgcagccgccccaccgatgcgcgcccccgcggccagctctttctcccgtgcctcgaggttagcagcccgctgctccagcgcggctctctcggcgcggacgctttcaaggttgcggcgcgcctgctcctcttgcgccgcctcgcggagggagaggctgtccgccagccgtcgcgtcgtggcctcggcctcctcgagagcccgctcccgctcggcgagtgcatcctcgcgaaggcggagcgcggactcctcctcggcgcaggcggcctcgtgcgccgccagcgtcgcctcccggagagcagtggtggcctcgcggtccatcaagcccctctccacggcgccggcatgttcttccagcgccatggcacgggcctcaagggcctcct

SEQ ID NO: 23825 - DNA, 8539 bp, Oryza sativa
ggcgtccaccgagcgccgcccctcctcgacacgcgcccatgcggcctcgagctccgctcgttccgctcgcaaggcctccacctgggcgctaaatccatctagcaccgcggtgtttgcggcggccaaggcctgcataatgggctcggcgctcactggggcgacgagagaagaggagaaagccgccttggagaaaaggcgacgcggctcggccccccggaggatgcgctgggctcggggatgtcccccgggcccgtttggtcctgggcgtcgcccggtgaggtaggcccaggcgacgcgcccgcggcctcgtcgcgagccgcctcggaggatgtcgcctgagggccgcccgagggagtgggcccgagtgacgcgccagcagcagctgccgcttcagcctggcgagcccgggcggcctcctcctgggcagcttcttcggcttggcgagcccgggcggcctcctcccgagcagcctcctccgcttggcgaacccgggcggcctcccgggcggcctcttcagcttcccgaaggcgggctgcggcttcacgccggtcagactcccgcctccgctcctctgcggccgctggatcttcgacctcggactggccggacttggggcggcgggaggaatgcgacgggacatcgctgaagcagaagaaaaaaaccaaaagacgaacaaaatgagtaagaaaaaacttctctttgggagaaaggtggtcgcaatgagaatgagacgaacctgcgagggggtcggttgaatgaccaccttggaggggaaattaggtttccccgggctggttccgtctcccccatcttgcggagccgcttcttcttgcgctccccctcgggctgtgacgtcggcgcagccccctccgggcgccgaccgctggtacgcactgccccgccccctcggggaggagatgggggaggtgttccttccagcttcctcttccccggggcgtcggcagggcggctgctccccgagcccccgacgcggggcccagaagcacgaccccctcctggggcagattttttccccgggcggctctcacccgcgccgtcgtggcccttaggggctctctcctctgaggccccgacccccagcataatggttagaatggagacgcggtcgggatcgatgcagagggggaggatctcctgaggaaggcgagacgcctccgcggagctaagattcagcaccctttggactacgatcttgaagtcctcaggagcccaatcccatctggctccctggtgggtccgcatgtagtcttcaggcccagtgtactcccaggcgctccgggcgcgccgttggagcggcgcaatccgccgacggaggtaatcgccgtacaccatggccccggtgagcccctgggatcgcaggcccgccaggcggtcgaggacggcgtcgtactcctcccccagatctgccggcgcccgccagctggagacctgcgccgggggctggcttggaaggcggaggcgcgcttcgtcggcgaggggggtgtagaaccagtcgctcttccagtcgtcccacttcttgcggaggacgcaggggatgtagcggttcaacaccggcccccgcggctggaagtagcagccgccaaccaccgatggcggtgacaccgactgcacggtgaagaaccaccggaacagctgaagagaggggcgcaccccaatgaacatctcgcacaggtgtgcgaagatggccaatgtcatcaccgcattgggggtgaggtgcgccatctggagatcgtagaactccaggacatccatgaagaaatgagaaaatggcgggaccagcccagccattgcgaaggggaggaagaagatggaccgccccgggtagtctggtgccgggcgcccctcgcccagcatcactatctcccgaccggtggcggactccggcatgaagcggcgcggcagtccggcgtgcctctcattcacgatgcgggaaggcggcagtacactgccgtcgagcagagcagagccccgtgccatggcggtggaggaagagatgattgggaacgagcgcgtgtggcgaaagtagggcgtggcagagaaagagttagagctcaggcagcgaaggcaagaggaacaatggcgaaaggaagggagcaagtccttttctcgatgcttttatacccttgccatcgctgggcctggctcctcgtttctcgcgcccactacctcgctccctcgtatctcgctatcttgctccctcgtttcccgtgcccacgcttccactaatcccattcgcccgcttacggcgcttgaagtggatatgcggttgtggcaatcgaaacggattgtatcgtgcgcgcgttaattacgctcgccaaccgaagcggcgttaccgtatctccgggcgagacaaatctgctcacccagattcgcgcgctgctcaagtgatgtggcagtcttgaatagaccgcccattatggacaaccaaagttaccaataccaatgtgcatggactgggaccgttggggattttgcccaactatgcagaccggtcccacctgtcaccaggctttaggagtggcgtcacacctgaccgcttcccttgggaagggaaattgctctggcataacgccgggggctactgtcggtgatatgggaccgggagtatcatgactagaggcttgaggcagacacaatcgcccacgtggcctggcaccttcggggacgtcgggcccgagggtgaggtgtccgccctcctcctgatttcccccgaggggggggtcgggttgcgcttgccctggccccgagggccggggcaccccgaccccctttaggaagtctgcgccacgtatatgggataagtgagcacagctgtgctcacctaacagcatttattgcagtctggtcaagcgtgtcacgctgcatgcagtgcagcacggcgcgtccctttatccggtctgtgaccagtcacagaccggtcagatcacgggttaggtggcgactggcggtctgacgcacgccatgccccatcccgtcaagacgaaagcctctagtcactcgtctcaagccggcgttaagcgtgttatctcttagagatgacacgttagacccggtcgatatatgccaggcttcatcttaaccattacaggcaagatgttgtgtgaagaagggcaaacatgcacgttgccaagattacacgcggtggacaagaatgaccgatttgtgaccggtctgacactgaccatatcgtcagcgcacagccatgttcccacgacgcgctcacccccggcggaagtggaggtaggtgtgggctgtcccatcggagcgtcattcggacagcaaccgtgctgatctccgcccattcaagagaaaaagaacagtccagtttggaaagagaagggtgcatgtggtatccccttgaagtataaaaggaggaccttgcccatagagaggggggttgattctttcccagataatgagcttagaacgggggagaagtcagctcacacttgtagctcattcatacgcagatccaccaaaacacaggagtagggtattacgcttctcagcggcccgaacctgtatagatcgtcggtgtctcgtgttttctggctggcatacgatttttccacatacagagagagtgagagcttgagatttcaccctaagccctcggccgaactggcaaaggggggcctgcgcggtctcccggtgaggagccacgagctccgtcaatgttttatcatctaataacaataacaatactaatcataaaagaacttcaaataaaatgaatgatcaaatgttggatatagaaactcatactactacgtcggcgtcgggggattttgtttccatgcggttcgtaagtggaaccgcacgggaaaatagggggaccggtgccggattatcgcccgcacgggaaaatacattttcctatgcgggcgtcttaatccgattcattatcccgtgcggttgatttaagaggaccgcacagaaaaatcgattttcgcgtgcgggctttttaagtggaccgcacaggaaaatatttttcctccctcctttccctcccacccacttaaaatttttacatatcctctctcctcctttttttccctttattctacctcaaccactcctctctctctaccttatctctattctccccctcctccctacacgctcgcgcaaggcggctgggagcggcgccgccctccccatgcccggatccagcggcggcagctgccccccacccggatccagcggcggtggcggtggggtgcccggaactagggttagggtttccattttgaaattttattttttttttggatttttattttcccgtgcgtgcaacataagcacccacacgtgaaaattggattttcgcgtgcggcccgcacaagaaaattgcgattttcccagacaatctgttctagacgggcgaatctaccgcactcaaaaatcaaaacaaccgtgcgcaaaaataattattgtagtagtgtcataaatacagttaaaatgggaaggagagagtagtttttttggttgggttgtcctagtgggcaataaattaattttcagataattttttaatgttttaagacaactcatctttcagataaaggtagtagcgtagagttcaaagaatgacttttttcataacaaaatgaatatgtatactatttttgaactttaaaagttacaaacatagtggtaattggaaagtttctacgtacctttaatgacccataataagaacgatgagtaataaatctacacacactagcactacaatgttgatatcgtaaataatgaagtatgtggacttttgttcctctccaaaccgaagccatcaaataatgaaaaaataaaatcataatgaggtacaagataatgacaaatataacatggaaattttataacgagaatgatttttttttattttttgaggctttaaagtgtatggtggggattaacttttttttaattcccattgcaatgtgcatgtattcagctgatattactagtatgataatagcatcagatgtaggggtggcaattttcccagtggggctgggaaacaggggcggggatgggtgctgatttcgactcgcggggagtcggggtcgggggcccggccatgggcggggacgggggcggggtaggatagccacctacgagtgacccgtggagccctgagggtgtatattagactattaatactaccatattgcaagcccaaaaaacctacgtagcctaccatgtataaaccaaaccctaatttccccatcttctaccctatccttttctcacccacccagccgtcactctccaccaccacttgcgcttcctccggcggtggccaggctacggcgtcggcggccaaggagcgagcgatgctgtcagtggccaagtcgcgggcggcggcggcgaccaaggtgcgggtgacggcggtgacgacgaccatggtgcaggcgacagcttcggcgaccaaggtgtgggcggctacgacggcgaaggagcttgtagtgatggcatcgtcaacggctaggggcatggccaaccgcgtcggcgtcgacatgcggttcatacgcagcggcggcggcgccatttccggcatttctcctcatctcgtggccacctcgtcgctgtttgccgtcggtggtgcggggccccgctcacccacgggtcccctatggggactaggacgggtgatgtttcccacctgaccacctctatggggccggagctagggccggagtgagaaatcggggagcgggggcaggggcattctagctcaacccgcccctgacccgccctgttgccattcctaatcagatggatagtttatcagtgtatgaagtaaattatggagagggaatttttttaatgccccttcacatggaggagctagctccttttcttttaagaccaaagatacataggtctaaaggctatgtttggcggtccctcttcctatcttctatccagtttagctaaacacactttgtaattttatgaaacataattaagagaggattagggataggactagtaggactacccgccacgcatgagacatgatatagagtcggtctaacgaaaagtattaactttattagacagtatttgggtcggaccagatcttttttatacttgggtgcaccgcgcaagtgcaggacctttacctggctgatactccaaaacagagtgtggacatcagatagactagcaaccagaggctggcccaatggatccacatgccctttatgtcgccagactcaagagacagctctctacctgctagcattctagcataatgtagatacacaaggagaatctggaatgaaattacgcagtggacattcaatgaccacctaagaccttctagctggtaaataattttaacggtacatgagtggtgggaggccaccgtaagcatacgggaagcatctaagaagacactacgcacgttaaccttacttgttaactgggagatatggaacgaaaggaaccagatgactttccaacataaggaattatcgacgccaactctgctagccaaaataaaggaggaagcaaaaatatggtggctggcaggcgcaaaaaatctcactgcctggttgacaatataattgcctgtagttagggccgtggccctggttttgttttttttttacattctcatttttgtacagtttcatctcctctattcaatgaaattggtggcctcgttgattcgatcgaaagaaaatatgcgccggcccttacttgaatgcaacttaaatgttacgaaaaaaggggaaaagagactattttacatatatcggtgctgttcgtttccactacaagaagtgaataaagttttggatttttgtggcacgcttttcaaactgttaaacgatatgtttcgtgcgaaaactttctatatgaaagttgttctagaataccagattaatctattttttaagtttatataataattaaaacttaattaatcacatgttattaccacctcgttttacatgaaacacttgatcttcatcttcaggagattcaaacaccagcatcatgtgatataatctggatacaaacaatattagactcgatctacgtgtatactgtatgttctaaaaataacgtttatattgtgttattaaaaaatcgttctacaattggagaaaccataatgaaagaaaaaataaagcaacgaattgaattgtgcccgcacaacatgaatatatatatttttctccagtttaaacgtgcatgtttgtttgtgtagtaacttatcggtccaatcactaaatatatttttggtgtcagcgctcttaaaaaacttatcggttggattgtttcactatagctaattatacataaaccgtaacacacttattagcaatacaaaataatttataaataataataaataattaacggatactatacactggtggagaaaccatttttggtcggtccaccaaattccactatagtctcggttgcaataaaaaccgggactaaagatcatttttagtcccggttcaaaaaatggtaggtgatgtcagacccctctaatatctttagtcctggttggtgttaccaaccgggaaaaagatgggcatgcacagagagatcgaggcgtgcgcgtgaatcggatcgagatacatgtctcatcctccctcccggttctatctcctcctctcctcacaccctatctcttcttctcctcccccttctcctctcctccccattctcctctcctccgagatccccttctcctcgccatcttacgcgcggaggatcctctccgcctccccctcccctcctcctccccgatctgcaggcggcggcgcacgacggccggtggaaggtggcggccgggcggtaggtggaagaggcggcttgcgcggcggcgggcgacgcgccagatttgttttgttttgtttttgtttttgagaatttgtgatccggatctgagatgtatttgatttgtgtgtggtgtgaatatgtgatgaattttgtagaagttgtgatgtaattttttttaagattttatgatgtatttggggatgatcgatttgaggatttggaggtgttagttgatttgagattttgggaatggggatggagtgaaatcaatatattaaaaacaatgaagaaaataatagaataaagaagcaactgggtatcagtctggctctatctttagtcatggttggtaacaccaaccgggactaaaaagtctctatctatagtcccggactaaaaatagatttttactcccggttatttcacctgggactaaagataacgatctttagtcccggatttgtagtcccgtttggaaaaccgggactaaagggggttacgaaccgggagtaaaaactacttctccaccagtgaaatatattaatatatgcatttcacttgtggagaaatcatttttggtcggtcaaacagatttcataatagtcccagttgtattaaaaaccgggactaaaaacatctttaatcccagtttaaaacatctttagtaccggttggtgttaccaaccgagactaaagatcccga

SEQ ID NO: 23826 - DNA, 3977 bp, Oryza sativa
tcgcgacgacggtgggctcgtaccttcggaggaaagaagggcggcgcgagcgcgacgacgccgtgagtagcacgacgacggcgacggcgagcgccgccgtgagggacaaggcggcgcggctagcgaacaggagcatcttcattatcggcgatggccagcaacgtggtacagattacagaagcaaaaccaagcagctttaagctagcagcagcagcagcagcagcattgcagcaatggcgtctgcgccgcgggtgagcaaagggggtgaaactgagactcgtgctgcggagctagctgagagttgagtgggagtaaaagatacttccgtagagatggatggagcaggtcatgtcgttgctgcatcttcactcttgtcgcattgtggccattggttcctgggggcagttgagttgggtgcatgtgagtgtactgggcgtgtttcacggctacactgtgacggtaaagctttcatggtaaaaagttagatcggaaatgactcaaagtcatgattagattgatggtcaagtgagtattatagtagagtaaattgtatttgttaggtgagtgtaatttagtgcataaacttgtaaaatactcgttttagtgtatgaaattgtatggtgcatgtggaggaaggcggaaaggacactacatggctaatcttattgatttagaagcagattaggatactatgtaaacatatatctgagaagattgctattagacatacacctctttagtaaaaatagaatataatatagtgatagtagaaaaagattaaaaaatccgagcaatgatgtaagggttagaaatatatgaaattcatcatttccacgatgaaggataaagtagagaccaaatttataaatattgcatttcttatgcataatcactacacgtacacacgtcacatcctaatcaacatcagctttgtaaaattaacattactaagttattttggtcttcgttcgtacgaactagacaagttcgtgtactgaaacgagcattttacaagtttatatactaaattacacctatctaacaagtttgtgtaccgccaatacaatttactcagtatagtacctccgttttctaatacacgatgtcgttaacttttgagcatatgtctgaccattcgacttattccaaaaaattatgtaaatgtataagatataagtatgcttattataattacataattctttttaatatgacaaatggtaaaacgtgtgacaaattcaatggcattatctattaaaaaaaggagatagtataggctttcatcgtttccttttttttctttccgaaaacattagggaattacctccatttcattaaaaagaaaagaaaagaaaatcgaaagtagggaaagtactacctctgtcccataataattgtatttttgtaggattcaaatttgtctcaaaataattttcacaatagagtactaattgttctatcaatcacttttcattcaaatttcttcctattatatcctcaaaaaccctcctacttttatctatacaccgattaatgatggacatcatagtctcacttttcaaaccttaatatattccgaaattataattattttgggacgggtagtactgaacgtcatctaacaaacatgggtcgttcgatttcgattccggatgatgcaaaccatccgatccttcaactgatgaaaccttctcgtgatccttcacgaaacttcttttttcaaggaagtccttccacgtccctgctaggggaaaaaaaatcgcattttgtcgttcacggtgttgctagctaggctgcgacccctcctctccttgcaggcgccacgccgcctttccatcccgggcgccactgcaccgccgtctccacatccctggagccccgccaccgtatcctctccaaccccatcccctcatcctcctccacccctgccacagcctcctcctccccatccccactgtcgtttcctcgccatccccatcgatgtcttctcttccccatcttcagtggcactaccatgacctcctcctatccatctccgacagaagctgcagatctggtgtccttccatcttctttgctccctattcctcgcaatggggaaggtcaacacctctgcctcctttcgtgctggtgactccaatgcttctacctgtctccatccctaattcgccactaggaggcacggtgaagcaaagacaaaagggagacgcggaggggaatatggcggcagattgggaggggagatggtcatatggagatggaggcggaaagggcctcttcgtcacgtatagcaacttgtgcttccactccgcttccacttacggcctccgcctgaccgtgagtacattttatagaacttgtctagcctcatgttcaactttggtggataaccatattttgttcatctgaggtgcggcggccgccggcgttaggcccatgggggcgggagtggaggaggccacgcctctccacgtcgtccttatctgcgccggcgagaggagggagcagaggggagatatagagagaggggaagaagaggaagggattgagaatgacaggtggggcccacgttgaccccaccatttttttattattgtgtgtgaaactgacatgtgggtcccataagttttattattttttggatcgaattgccatgtaagcgccacgtcagatgaagaccgagtcaaattagccacacgtaggcgctacgtcagctaaaacctccatccagaccgccatgggacctatagtgcaccgggtttgacagttgagggacccattgtatctggtttttcggtggaaggatgaaaatcggattcgttgacaatttaagggacctcaaatgaacttattcctaactccttatcattgcaatcaatcattgattgatgcttatacaaaacatttcagtaaagggccatgttgaactggtgataattccataaattatacaaattgaataggctgccacatttccaaattaaatggtaatctaatttatttcctcggttaattaatttcaggtataccgtagcaacgatgttttagtgctgctgtaaagaatataacaatggacataactgtagttggtgcaactggaggatagaataaattaacatgaagtttcaactagagttgcagttagtaacataggagtattatgttaattgcctcattacttttggagaggttcataccaatttagtttgtttttatactatttctgaatcaatggtttgttctattaacatgttgtaacctcggaataattcctttcatggacggtcaccaccatagtctttgtctctattgtgctagtactgatttctacgaaagaacagtcaaggggcctgtttgggggagttagctgttgtagcttcttccagaatcagaagctccccccaaacagtcatcttttggtctaaattttgagaatctgtagttatagaatccataaaataaactagaagcctttctagattctcagaagctggctaccagtcagctgcttcttagaatcttaagctctcccaaacaggcccaaggtctcattcccagctgcttaattcgattgtgtcatgtctcttatcatccttccctgtctatggatttggattttagcctttcaaatatatatgcacattataaattctaacgtttgctaacttctcctttatttcataagcccaaaagaccaaaatgatttggctccatgattgcctagagagttactctaagttctttaccatctattagatgtacacaactcaacatttaagcttagaacatactatatgccttattctgcattggcatcggaaaagaaatgttgtactctttgtatcagcactacagatacaatttgttgagtttggatttgcaatgttggctgtgtttagttccctttaaactttaaactttcagtcacatcaaatgtttggacacaacatggagtattaaatatagatgaaaaaaacc

SEQ ID NO: 23827 - DNA, 11590 bp, Oryza sativa
taaccaaaatattttggtactacatttttttttcttacatattttttcatcaggatcaatccgcgaaaagaaatgtaatcttttcgcacaaagtacaggattaattaatccgcgtaaattgtgatcttttgtatacaaagtacaggatgaatccgtgtacgaatggtgatattttgtacatagtacaggattaatgtgcgttaaaatttcgatccttttgcacaaagtacaggatgaatccgcttaaaattaaattgtgatgttttttttttttgaaggtggagtacccgaaggacgtgtcgaagacgacggatccggggttcaggacgatgcactacgggtcccacaacttcaccatcgccgtcttctggtcgccgtacctcgtgacggcgaaccagtcgtcggaccccgccgccggagggctgtgggacctctacctcgacgagccggacgccgcctgggcggtcgccgtggcgggcttcgactacgccgtcgtctccgcggcgaactggttcacccgcccgtccatgttccacgagcgcggccgcctcgtcggctgccactactgcctcgtcccgggcgtccccgacctcacgctccgctactccctccgcgccgcgttccgcaccgcgctgcgcgcgctcgccgccggcgccggcggcgccggcgtgttcaacggcacggcgatcgttcgcacgctgtcgccgacgtcgcacttcgagggcggggagtggaacaagggcggcgactgccggcgcacgcggccgtccacggcgaacgagacgcggatgtccgggctggacctcgacttccacacggcgcaggtggaggagttcaggagggcggccatggcgagcgggcggagcgcggcgaggctgctgctgatggacacgacggcggcgatggtgctccggccggacgggcacccgagcagatacgggcactgggcgcacgagaaggtgacgctgtacaacgactgcgtgcactggtgcctccctggacccatcgacgtgtggaacgagatgctgctccagatgctgctgctccatcaaccaggagctgtttctgtttgatctttgtagtttgttcttgactactacttgttgattggattaaagaataggttcagttcaccatttcgaccatcaattttacaagtgctcgagtgcacaatgtgtagaattccactctgatcacttatgtgcctaatgacgtatcaacaattgcagttttcaagctttaacaatcgagtaattagccaatcatctcagcttcatactgccgccgggctggataggtaaggttcacatttttagttttagcacaagtggatcaagttgggatatgtgcgcaatccgggaagtgggtttcttgtgtcatcatcaaaattctctgcatacggctttaacggggaaactgttttaaaccttaagggtgtgtttggataatgagttacgagaggtgggattggaaaatggaaatgaatggaggaacatgatgaaatggagtgagaagaatggatagctaaaattgaaacttatcctttcaaggatgggaaatcatatcccaaacctattatccaaacatggctcccatcatttgtctgcaaaccatttaaatagttatgaaaatagaaaaaaatggcaacattcatatatcatatatagcactgtacaaaagtttaggtccaaacttaactcatgcaatgagatataaaaaagataaattcggataggaatagtagtggtagtattcatatcctaatatgtcatttttgtttctcaatgtgtatatcaaatttgttaacttgatttttggtgcagtgctatatgttactatactctacattatcaaattttttataactatttacattgaatttggaagaaaagatacacgaggggacatcctcttgagggaccacccaaaaaaatactatcctaaatatcaattatctatgcagaagaaaatatatatccctccatgaaacataaaaggacaaattcgtcctacatacgcgtatacgaagatagcagaatagcaagtttaaccacgagtgaggatgcacttttttttttgtctgatctgttatttttatccctctacgtgtaaattaaatttggcgttttgtatttgtggagggacatgtaacacgacaagcaatattatcataaggttttcagaatttgttcgaactatttagaatgtttgcaacaacgagcacgcaagtttttcagaattttttttacttgaaatcatttcatgcatgaagatttaaaacattttttcttgaaaatggcctccccctaaccgaactggatagctacggagcacgccgataataacatttgggtttcatggcaagtggatgaaagtaggatatgatgcacaattcgcttcccagtcaccttccaaatactctggatattcatgacctaatgagcaattgtatgtgcagtgcaaggagctgagaactaactgcaacgcacaaatatatatacacctgaatggactctactattgcaagtgtttcacacacaattcttgagatagatatagattcttagtttcctcccagtgccaatgacgcctcttaataatctctgcaattttcgtgtcaagaagcagtactacaaccccaggtgcttgatccccgccgtctctctcctcctattcgtcgtcatcctcaccgtctctaatacatacttccccttcccgacaactaagtcgcgaacactgtcttactcttccttctcctcctcccccggtgggcagaaggccgccgacgaggcctgcaacatatttaggggagagtgggttccggatcctgatgcaccttactacaccaacaacacctgctcggtcatccacgagcactatgactgtatgaagtacggaaagccggaccttggcttcgtgcagtggcggtggcgtcccgacagttgtgatctcccccgtctcgacccggcgcgcttcctctcctccatgagggggaagaccttggccttcattggggattcccttgccaggaaccacatgaactccctcatctgtctactgaccagggtaaaaaagtgaaaaacgtgccggatttgctacagtactagcttcgatctgacccgtcgatcgcttgatcggacggtcagaaatgggccagcagcaacaagggtgtgacgttttgttggccggcctgcaggtcgccgagccgacgacgagctggccgagcagcgagcacacggtgtaccactacggcggcggctacaacttcaccgtcctcagcttctgggcgccgttcctggtccagaacgagctcgtcgacgccgacgggccggcgcacacgggcctgtggaacctctacctcgacgagcccgacgcagtgtgggcgccgcacgtcccggcgttcgactacgccgtcgtgtcggcgtcgagctggttctaccggccgtcgatgctgtacgaggccggccggctcgtgggctgccaccactgcctcctccccaacgtcaccgacctcacgctgcggtacgcgctccgcatggccacccgcgccgcgctccgcgccgtggtgggcggcggcggcggcggcggcgtgaccgccgtgcttcggaccgtgtcgccgtcgcagtacgagggcggggagtggaacaaggacgggaactgcgtccggacgcggccgtaccggcgcggcgagaagacgctgcagggcgtcgagctcgacttccacacgctgcaggttaatttcttgatttttctccattgatctagtgatcaattatcttgttctttctagggaacgtgtgttctgagcttcgtaggtggaggagttcgaggcggcgaagagggcggcgagcggcggtggggcgaggatgatgctgatggacacgacggaggcgatgatactgcgggcggacgcgcacccgagcaggtacaggggatggacgcgtcgcaagggatggatgaaggagtacttcaccatctccaacgactgcgtgcactggtgcgtccccggcgccgtcgacgcctggaacgacatgctctcacacatgttgctcacatcgcaaagctagttagttaggttattgatcaaacgaacgtagcagccgaaaaaaacagagaaaaatacattcactcctgaattcagtctagaatttcaaaaccaccgtccatgatccatgtgaatttctagcaaattgcacgagctgaactcaaacattttggtcctgtttgctgcattcgcaaagggttattgtgattccgtctgtatggacctaaatcgacctgaggcccaatattgcgaaaaatttcagaacaaacatcgtaatcgatttgagatactatattgatattttgtgacaaatctggaagaattaggaataatctagccgattcaaaagcagtggttgaactcaagttggctgatctcgacatgcagtcaaaagattatcagacagaaagggaaagctgctgctaggctagctcatacaggtggccagtgcccctggtctcaaaccaccacacctgtttagcacttcgattctttccatttcgccaagacctagtaataaacaggtggttatctcaaactacacgcgtggaatccaccatcccaagtgtacgctgaatgctaatttatcacgtaatctaatgaatattcgtgacaaaaactgcagaaaaaattcgatgtatatacagcaatctcatctcatttcatatccatgagctaagctaagctgtagtgtggacgttgaccaaccaggtcgatgatgaagtttcacgaggtgatcaagctgccatccattgctcattacggcctacgctatgtgcttcccgccgccgccgtcgccgcgtgcgttctggtgctcgccaccgtcagcctacccggccgcgtgccgctgccgctgctgctggcgccggaggtgatgacgaagacggcggatggcgtcggcggcgacacgtctggctgtgacatcttcaagggcgagtgggtgccggacatggccggcgagccgccgccgtacaccagcgagagctgtccggtgatccatggacactatgattgcatgcggtacggacggccggatcttgggtacgtccggtggcggtggcggccggacggcgggtgcgagctgctgcggttcgacgcggcgaggtttctcgccgcgatgaggggcaggtcggtggcgttcgtcggggactcgctggcgaggaaccagagcactcgctggtgtgcctcctgtcgcacgccgagcggccggcgccgtggacgaacggcagctacgcgtaccgcttcgagcggcacggcctcaccgtcacggcgttctggtcgccgttcctcgtccgcgccgtcgagacggaccccgacggcccgacggggagcggctccggcctgtggagcctccacctcgacgagcccgacgccgggtgggcggcgcacgtcggcgcgttcgactacgtcgtcgtctccgccgggagctggttctaccggccgtcgatgttctacgaccgccgcggccgcctcgtcgggtgcaacacctgcctgtccccgaacgtcaccgacctcaccctccgttactccctccggatggcgttccggagcgcgctccgggcggcggcgacgggctcgcaccgccacgccacgaggaggacggtgatcgtgcggacgatctcgccgtcgcactacgagaacgggacgtggaacggggacggggactgcctccggactcggccggcgcggcgcggcgagtgggagttgaacgccatggagaaggacatgcaccggatacaggtcgaggagttcgcggcggcggcggaggagacggcggggaagagggggaaagaggcggcgaggatgctgctgatggacgcgacggaggccatggcgcagcggccggacggccacccgagcaagtacaggctgtggcagccggacaagttcaaggtgtcgcgggactgcgtgcactggtgccttcccggcgccatggacgcctgcaacgacatgctgttccacatgctcatcgggtgatggctgatgcccgttcttctcattatggctcgtcgatttttttttctttaaaaaaatacatcagcattgtttagatagcttgggagcctgctattgatgggatgtctgatttttttcaaatcattggaaagtattgcaccgtgttattgatgttcacatgtttcacccttcgataaaaattgttgcaacaaaagtgttctagatgtttcacaataagagaaatgtttccgcactagagcatagttgtttcaactaaatacactactaaaacatatcgattgcaacaccaagaaatcaatgtatacaatattgaatcaaaacgaaataaaacaccttaatacaatcaagtaaaaaaaatacaaataaaccgtaacatcactttaattcacaataaaacccactcctctgacttctattccggccaccgaaaccaagcagctggcatgaggagacaagtgacatgatgcgtagacgaggatgagggcaagcaacgacttcaggtgagcgaccccaccagggctagctgcatcggcatccagtccagcgcctccttcttcgcatggcactgcttcgccacgggtagagggctagcacctcttccggtcctcgctttcgcctcagcatgccacgccaccgccagcgtggtcaccggcgccgtccttcctcttcgcatcgcgctgccccgtcgccacccgcgtggccaccggtgacctcctcccacttaatgtctcggtgggtgcggcgacgatggtgatgtcatcatgtgtttcctatgagcacaaaaacaatgaggagaaaatgagacgataaggttgtggtggattcaatcaactgcggtccccaccttatttgaccgtccgatgtttggtctcgcatcgaacgctctgggatcagcatttctggataacttgctctaaattatttgttagcttgaattcattcctataagcaagtgtctttactctgtccaatcatccatttcatacttgttgatggttagaaggtttgctgttagaaaatatcaatgcctacttctaatttaattgcaaataagttagcaattatgctttataacgatggcagatcgaaagatttatccttttagtggccgaggtgcatccttcgaaacaactagcgtacacctaagccctccctgaaaataggttttggttttgtaaggcattttctcccaactaatcggcgaccttgtcgagactaagaggcacttggcacttgagatccatcatcaaattgcagtaattattcccgcataaaaatgctatgttctgagcttggctaagcataaacctaaaatatctactaagcactagatatataactttcactagctgattttgtttacctagggttgtcaaggataaacatggatataaataataagaccataaatgtaggaatgactaataaaacagttaaatgcgtcgggaatttaattaagccgtgcaataatttaaaccatgacagttttcacatactgggatttaatattctcaaggaaagcagtatggtttgccttgctcaacaagaaggtatttctgatgtcttgatatgcactttcaggatcctttgaaactataggaactacacgagacacacaaaatgtggctaaaggtgtatccaagaagcaagattagtctataaaaatacaaatgggttcttcacgatttaaccaaaatattagtgacttgaacgggctgattcagagttcagataggtaacttgaactggatgtatattggttcctctcctttcatcattaattagcatatagtagatatgtacaaggaactattcatttatctgttttcttgattctttagggtagtgctatgggagaatgtagtaccttctagccggggcaggcgtgcaacctgatgtgcccatctcatttattcactgtctactattgctcttgttcagagtaccatacttcgagtttcctcactccaattgattatatatgaaaaatacaatggtagggttaaagatggtagcaaaatgaacatgccttgagtctcttgaataaataacttactattgatcaatgagtgacattcgtgcaactaaggctgtcaacgagctgagctcgagcgaatttggctacgtaggcttgagcttgacatgaactcgagccgagctcgagccaagcctggatactgatcgagcttgggagtgagctcgagttcgagctcgagcgagcttcgagcctactcgagcttgacagcttgtcttggtgaaactccaaaaaacttacacttgtataagagatattaatgcaaattatcggtagtcaaaattaatgggtgctacttatcttgaataaagcctctgcagcttttctcatgaattcatggctttaaaacgttgcaattaacaaaagctagctactacatctaataggaatagtagtactattactagcagccggataattgctttattgagaagcatcgatgaggtcttgagacttgagtaggtcaagcacgatgacaagtatacatggacccatcaagaatatcttcctacatgcaatacatcttatgctaatcaagccttgccgagctattcgagctcgagcttgctaggcttgcgagcctcagcctaggcttgagcttggcttgtctagtatttgagccgagctcgaatcaagcctgtaacgaatcaagctcgagcagcttgcgagcttcgagcttttttgatagccctacttgcaactattcgtgagacaacagacaatgtgttttatacagtttatgccccttagatgggtaatgactatatgtcctatttggccggagtcaagtgtttttcactatatcaattacatgagtacaaggtatgcaatggaaccctaatctagcctatgactatatcggcgagaatgatggtggtggtcggcaactagttgttgtcgagtttccattaatgtttactatggtggtggtggaattgccacacctactagttatgtgtagactagcgatatagtcagatcctagctataatgttgatgatagaaccaccacgtctactggtttatgtagacgatgaacatagtcgtaccctgaccactgttttgttgtttaggctgaaagttttatatgcatcccattgtttatccaacccttaaatcattatggaggtgtatcggtctatggtttgtttcaagcttttttttttctccaaaacatctttccaaccagactgcttgtaatgcacgtatatctctatgtttgttcaacggtatgcttggtattgtcgctatttgagatctctgcctatgtcatcatggtagatgttacaggcagtgcatcgggttctccgcttgatagcgaatcacctccttcgtccttgtcctgattcccgagtcgcttgaggccattcacaatgcgtcatgggccacgaacgaatttgtgatgccacataggaccaagctcctctaaagcaactcacctcacaatgcaactcccactcccacccacttttcatgggtcccactcccacacacttttcatctccccccctctctctctctccactatctcccccaccggcggaggatgggaggagcacccgaggctcacgtgctcgccgccgccgccgccgccgccgccgccgcgccccacctcttcgtccgccggtgcccctctccctccctccttccgcagagctcgcatgcgtggagcgggacggcacggagctcactagctccggcggtgcggagctcacggagctcaccggcgtggatctggcggagctcaccggggtggagcgggacggcgggagctcgtcctctccggcggcgcagagctcacggagctcaccggcgtggagctcggcggcgcggacggcgacgaggtcggcggcgtggagaggaggatggtgacgagcttggcggcgcggcgaggaggatggcgtcggcgccagcggagcggcggcggagcagcccagtccggcgctcgccgggtctagcctcgggcggcggctacggctcgtcgcatctcccctctcctcagctcgtcggcgctcgccgttaatggctacggctcgcagttttctgctctctcccctcttccctgtcactggcgccagctttttcaggcttttagtgggaagaatgggtgaccaaaacttgctacgcgttcctcgtgaggctccgagtgtaatcgacgaggcatagaatatgccgttcctcaagccgaggctgaacgccacggaggcgcattgtgaatgccctgatagccgccttcaccaatcgctgtgtcgcacaagggcccaaaacccacagggctagctgcagcctactcaggccagttaagcaagcataaattggtccgcatcttgcttgtgtaagctgtccttcggcccaatggacaagtaattagtaggattttttagcctcgtcttccaaaatttcatgttgatatggtgatttggactcgaatgataggagtgctggtatcacgggtaaataattgcgaccagggtcttgataatgctggctgctattgtgctcattttgtcacgagcgaggttaactagcttacgttattcttgatcccttcctaaattatctggcgatatattgtgcgcactgactgatcgatcatctctacacactaccacaaaaatacacaaaagtgatggagaaatactaaaaccggcacctacaaacccctgtccgcggcacgtgtctagtgcctacggggcgtcatccggtagaaccgacacctttaatacaatctggtacctatgacttctgtcagagagaaatgtgttgatttctattgaaaactagcacctttgagtacgtacgagtgccgatttttgaaaaaaaaccgatacttgattaaaccgaggcgacgggcgtggagcatgagaaagaaaacaaatttacgctcttatccccttgcgtgcctcatcttccttatcctcttgcatgcatcgctcttctcctctcgcaaaccgcgcctctcccctacgcagcggtgcggcggtgccagcggccagctcctctccctctccccctgcgtcggcgggaggttgacaccgtggcgacgaggaggtccggctcatccttccatctctcccgtcccgtatatacagcgatctcccgtatcaaatgaatattcgtgacaaaaaaactgcagaaaaaaattcgacgtatatacagcgatctcctgatcctccatgagcttagctatagtgtggacgtacgttgaccacccacatcgacgatgaagtttcacgaggcgatcaagctgccatccattgctcattacgccctacgctatgtgcttcccgccgccgccgtcgccgcgtgcgttctggtgctcgccgccgtcagcctacccggccgcgtgccgctgccgctgctgctgatgacgaacacggcggatggcgtgggcggcgacacgtctggttgtgacatcttcaagggcgagtgggtgccggacatggcccgcgagccgccgccgtacaccggcgagagctgtccggtgatccatgggcattatgattgcatgcggtacggacggccggatcttg

SEQ ID NO: 23828 - DNA, 10005 bp, Oryza sativa
tcgtgcggacgatctcgccgtcgcactacgagaacgggacgtggaacggggacggggactgcatccggaagcggccggcgcggcgcggcgaggggagctgaacgccatggagaaggacatgcaccggatacaggtggaggagttcgcggcggcggcggcggcggagggggagacggcgaggaagagggggaaagaggcggcgaggatgctgctgatggacgcgacggaggccatggcgcagcggccggacgcccacccgagcaagcacaggctgtggcagccggacaagttcaaggtgtcgcgcgattgcgtgcactggtgccttcccggcgccatggacgcctgcaacgacatgctgttccacatgctgatcgggtgatgggtgatgcccgttcttctcatcatggctggtcgatgattatgtgcggtttattcgcgccacgattttaaatgtacgattcgtttttttttttaaaaatacataagcattgtttagataacttgggagcctgctatggatcgaacatctgatttttttttcaaatcgtcggacggtgttgcaccgtgttattgaaaaatgtttcacccctcaataaaaattgtttcaataaaaatattccagatgtttcacaataagagaaaaatgttttcgtcgcttgagcataattgtttcaactaaatacaccattcaaacatatcgattgcaacatcaagaaatcaatgtatgcaacattgaatcaaaacagaatggaacatcttaacacaataaagtgcaacaaaaaatacaaataaattgcaacatcactaaaattcgcaacaaaacccacctctgacttcttctgttccgttcaccggaaccaagcgaccggcatggggagagaagcgagatgatggcacagacgaggatgagggcaagcaacgattttaggtgggtgaccccgccagggccagcggcatcgacatccagtctagtgcctccttctttgcgttgcattgctccgttgctggtagagggctagcacctcgaccagtcatccctttcgcctcggcatgccatgccgctgccagcgtggtcgttggcgtcctcctccctttttgcgtcgtgttgccctgtcgccacccgcgtggccgcccatggcctcctcccacttcacgtctcggtggacgcaacgacgatggcagtgccatcgtgtgttccctatgagcgcaaaaacgatgaggagaaaatgagagggtaaggttgtgggaaggatggattgaatcaactgtggaacccatcttatatgaccgtccgacgtttggtctgacatcgaacgctcggggatcagcctatttatggatatcttgctctaaattatttgttagctttaattcattcctataagcaagtgtctttactctgtccaatcatccatttcatacttgttgatagttagaagatttgatgttagaaaatatcaatgcctacttctaatttaattgcaaataagttaacggttatgcttcgtaacaaaggccgaaagatttatccttatagtggccaaggtgcatccttcgaaacaactagtcgtgcacctaagccctacctggaaataggttttggttttgtaaagcattttctccccaccaatcggtgaccctattgagactcgaaggcacttggcactttagatccatcatcagatttcagtaattattcccacataaaaatgctatgttctgagcatggctaagcataaacctaaaagttctactaagcacaagatatataatattcactagctgattttgtttacctagggttgtcaaggataaacatgatataataactaactagcatggtggcccgcgcagattacgcggctagcatgattatattttctctcatataatagtacatatgttttcttattatattattcaaatatattaaaacgacaacataattttaaattttacaataactttacaaaactactaatgtgtaatattcatattgtattttatatacgtgttagttattaattatttttaatatcaaattttagttatttgtaaattatatatattcctacatggactctagattcgtcttttaatatttctttttttaattccgaattttctgtaaattgtatttctatatagactctatgctcttcttccaatattatttatttttatttctgaatttttattatttctaattgtatttctatgtggactctaaactcatctttcaatattctttaatttttaatttcgaattttagttacttctaaattgtattcctatattgactttaaactcttctttccatgtttttcttaatttcaaattttagttatttgtaaattgtatttttatacggactctaaactgtacttttaattttattatgtttattctaaattttagttagttttaaattcctatatggactctatactctacttataatattccttattttttaattccgaatttctattttttattaattgtatttctatatggactctatactctacttctaatattccttatttttaattccaaatttctattatttcctaattgtatttctatatggactctatactctacttctaatattctttatttttaattccgaatttcagttattttctaattgtatttctatatagactctatactctacttctaatattccttatttttaatttcgaatttaagttatttcctaattgtatttctatatggactctatactctacttctaatattccttatttttaatttctatatggactctatactctacttctaatattccttatttttaattccgaatttcaattattttctaattgtatttctatatggactctagtctcctcttctaatatccttattttttaattccgaatttcaacaattgtatttctatatggactctgctttttctttttctccgattaatgtaagaatttctaggctatgagagcgaacgtggaggctcctttttttattcctttaataatataatagataaggccataaatatacgaatgactactaaaacagttatgtgcgtcagcattttgataaacctgtgcaataatttaaaccaagataattttcacatactaggattcaatattctcaaggaaagcggtatggtttgccttgctcaacaacaaggtcttccgatgacttgatctgcacttcaggatcctttgaaacgatagtaactacacgagacacacaaaatgaggctaaatttgtatttcaagaagcaagattagtatataaaaatacaaatgggttcttcacgatttaaccaaaatattagcgacttgaacgggtcgattcagagttaagatagataacttgaacttgatgtatattggctcctgtcctttcatccttaattgatatgtacaagaaactagagatttatctgttttcttgattctttaggatagtgctatgggacaatgtagtacctcttagccgtggcaggcgtgcaacgtgatttgcccatctcatttattcactgtctactattactcctcatctgagtacaatacttcaagtttcctcactccaattgattgtagatcaggaatgcaatggtagggttgaaggtggtagcaaagtgaacatgcccaaagagtatcttgaatagataacttattattgatcaatgagtgacattcatgcgactcttcacgagacaacattcaatgtgttttatacagtttaggccccttagatgggtaatgatcgtatgtcctgtctagttggaggccagtgtttttcactatatcaattacatgagtataaggtatgcgatagaaccctaatctagcctatgattatattggcgagagtgatggtggtggtcggcagctagttgttgtcatgtttccattaatgtcgacttgataagattggggatggattgtattggcgtgtggcagatttgcttggtgacaaattgtgtttccatgagttgagatctccactaggggatgttgtatttatacccttggatatcaccttgtctaagtagaactttggggtaagttaggatacgatctgagcagtcattgtccccatgtaggactatgtcttccttttatagtcggggctctttccttatctactaaagactttatctttatttgggggttttaatttcttataggaattagcatgtggtcctttgctgccgtgtatgtggcacatttgtagggtatcccatacttatttccttggtagtagaccctcaactctattgaaatgcaaatgttgacaattgagttcagctgttccgaggaaacgctgcatcagataagtaatcgaggtcaggcgatactgactatgttgtgcccgagttcgatgctctggtccgggtaactagtagtagtcagatgatggcatttggatcggataagaaatttgtctgtgtacatatgtgcgaaagatctcggtggggaaaccattttttgtttactcttacattggatttatgtagttaatcgatgtcccaagattttgattttttatgaagtcaactcctcggaaaaagtgttagataacaagcactagagggaatgctcgggagaaatatatataaataaactgaaattttgataagttttctagtctataagtagagtttatgtaatttccgtagccctcaactgttttatcataaacatagttaacgagtagatagtcttaatagaaaaaagatgtaaaaattattaatattttttactgtttgatgtcttctaccataatctcgatgacactagcagcagctcctttgtcccgagttcaattttgttgtggtaggaatgctacactcttgaaccccaatcacaattggcaaaatttgctatagggcatcgaaaaaacgtgtaattagctcgtggacaccgcaagaacgagaatttgctaacgggcattacaaaaaacgtgtaattagctcctggacactcggggccttattttattatttcccgtgaatttggagagagaaacactaaataaagacaagtttgcccttgggtctcgacctagatagcgacaaagcattggattggccggcggcggcgacagagccgaacacgtgcagcgcttgtgttctgtccctgtgacgggtccgagtggcggcgaccatcgtcgggatgctccgcgctgtggccggcgtgcgtgggctcgtcgccgccgatgacccctttagcgtggagctaacggacgtgttgactgacgacaccgacgccgacgacaatgcgcttgtgttctgtccctgtgatgggtccgagcggtggcggccatcgctgggatgctccgcgctgtggccggcgtgcgtgggctcgccgccgacgacccctttggcgtggagctaatgcacgtgttgattgacgacactgacatcgacgacaatgcccggcgaccggagaacacggtgcccggcgcgtgggcgacggtggagagttgtgatgtcgcggagctgctcctcgccagcctcgatgccggtgtcccgttctcctgtcgtgtcaatggcagctgcttcgcaattgcaagggagaggatcaaacaacaatttacatatagagatggagagatcacaaaaaaaaaaggaggggaaattttgatcgggagggagagagcacatgcacatactcgtgaattccctttcgcatatggcgctgagctagctctttccagctggtgggcggcgtgacggcgtggcggtgctcgtcgccagcgactagagtgcttctcggttcccgtcgacaagagcatgcctcctcctcggccgcggccacgggccggagcagctccacctgcatcagcccgcggcggccaccggcggagctcgtcggcttcacggacttccacgcgcggtcgatgcgcagcatcttgagctccacggcctcctccttcctgtcgtccttgtcgctgtcgtcttcctcgtcttccagcgcggcggcgcagatggggggaaggcagcggtgcgcgcgtgcgtcggtttccgccggcggcggcggcggcctgcgcaccattggctggcggcggtggcgcggatgtgcatgcgatgtcatgcgttggcggcctgcgtggtcgcggcagcgggcggcgcagagcgggctcgcctttctccccctctgcccaacgcgctcgtcgcgcccgccgccgcgcggaggaggtggcagcggtgctctggccggtgtgagggcaggggcaaaatcgtactctcaccagtgtttctctctccaagttcacaggaaatattaaaataaggccccgagtgtccaggagctaattacacgttttttgtgatgtccgatagcaaattctcgttcttgcggtgtccacgagctaattacacgttttttcgatgccctatagcaaattttgcatcacaattttgttgtggtggaatcgccatgtctactggtcccgcacaggatccaaccacaatgttgatggtagaattgttgtgtctatcaattatgcacacacctgtggtgtagtcagactccaaccactacggtggtggtggaattgccacacctattaactatgcatagttagatctgactataatattggtgatagaatcgtcacgtctactggttctgcgtagatcaacaacgtagtcgtactctgaccactatttgtccaacccttaagcattatggaggtctatcagtctatgatttgtttcaggcctttttttttcctccaaattataaaacatctttccaacaatccaactagactgcttgttttgcatatatatctatatggttgttcaatggtacgtttggtattgtcgttacttgaggcctctgcctatatcatcatggtagatgttagacaaaattgctataggacatctaaaatttgggtaattggttgtgggacaccgtaaaatcgtgtgactgctaaagcacaccacaaaaacagtgtaattggctacaggacaccgaacacattattttataattttcaagacaaagtgaagagaggaatttttaaaaagacaagtttaccccttcttactctttctcccctggctatgaggaggcggcggtggctttgacaatggcgagtggcagtgcaagcaggcagcggcccgctgtgattgatgggtggcccactcagggggacgtccgccacctgagcaacgccggcctggtgctgggcctatccctcggcagcggccgaggaggaagaacgaccaacgcgacggcacaccgaggtggctgctggtggccgtatcgctaccgctggagtcatcgctgatcctgatcatgctcggcgatgcggcggacgcagctgcgacggcgaccgtagccctacgcatatgttaggaaccctcttctcccaattagtaacaacaagcttgaatacaactctcacaagtattttgggggaaaagagagaagcaaactagctagctgatacaagtgtctagaagtttctggaaaggagagagagaagctggaggtagaagaggatgggaagagatcgccaagattccagcccggaaccaggacgccgccgccgccgtggccgaagccgccaatgcctgatctgtttcgatgcctcgccatggttgttgctgctctgtatttgtatcctccctgtccaagcttccatgggccacaattgaatattagtgcaacatcagcccaagagcccatcaaggttgagaccctaacaatcccttctccttaaaattcaacttgtcctcaagttgatgccaattaaacttttgaaaacgtaaaccacctgggtcccatggcacctgtagcactcggatgatcaatgtgatcaggtcatccctatcaccattgcttttccttgtacgcacaatctttcgctgcagcttagtctctttgccttctccatagtactcatggtgtcccacaagccttgcaataatgatttgatggctcgagtaaaagtgttcttctatgctgaaatgaaattcttgattgcacttttctttattcctttcattttccatcggccaagaccattcttcagtataatagaccaataatatgtagctgaagcacataatagcactgaattctagatcccactgtatctgtagcattgaaattgattcacctttcaagagccctagtgtgcttgtatgtccttgtgcagatattctagcggcagcaataagtaaacaaggtggagccccattaaagtccagatgcacctccattttagcaatcaatgtccaacccaacagagctagtatgtgcagatattggaacaattttaataacttggaatgctcttgtttaatgaaggagagctcaactaaaacatcatgaatctttatattagtgcaggaattcctttgtggctggataactagagcagtctgaaataaatcagcatgcacacatgctaattcccttgagattttaatgtggaaaccaaaggttgtaggctcagatgctagtccagcatacttgtgctgttcaatctgaacacatgactgcaattgcttcagttcaacccagctctcatcaagtaagggtgcattttctggactccatgcctcaagaaaagaaccacattttagtggagcaaggacaaagatcatagagacaggctccaaatgacaaatgacccaacaagtgttcaacctcaatttaaatgagcattttactcctggaaaccaaaccatatgaattccttgtccatcaatttgctcttgcatgacagaaattccaatgtcaaacccccttccatgtttcactaactccttcaaattcccagcaaataatcttactacagtaccaatgtcaagattatacctatcaacatcatcaatagtagtgaataggaatgaacctttctcaaaattctgtggacccaaacaagttggttgatctttagatggctccaggatgtagttccccttcccaattagtcgagcagatatatagcaatgtgaatacaattcacaccagaatctcatttcttcactatatgatacccccttgttctgatccacacatgcttccttcttagcaactgctatatagctgacccacacacacaactcttcaggaactccgacactgataacaagctcaatgttccagcaattatctcccaggtgaaagtattggcattgaagccaatcattcaacaaaatcttgtgtaggtgaactttgctatcaccaggatcccacactaatggcaccaacatgatatgtaagtgtttcagtggttcccctagtggaaaatgcttgtcaatcaggattccaaaccacctgctcgaatctgatgcgttaaagtttggaggtggccatggattgacatcaaagtgcttgtgcggaccatgccatttcactgaacatcttgcgggtgtcaatgtggccagcttgcggttggcattcatccttgatgagaagttgtccatagactggacatatgctggaactaccttggacgcagccgtcatggcctggaacatgacctcagcttggtcatggatgccacccttgacgtcgaggctcaatgtcaaacacttgatgtgtgtctccttgggacaaacaagggcgtcgatgtcggtggtgcatgtgatgtcctgacaaatggaggccagagaagtggacgtgcacgaaaccatcgcagccacggtgaggttaggggtggaacaattcatcgaacacttggcgggcatcaccttgggatggttgtgattgttggtgtaggttgcgccgatggcatcttcaacagctaccagctccatagaggtcgtgtcaggtgtggcgcgtgtaaccaccacaaccacagggggatcaggctcgacgtcggtgctagtgcatttcgtcaaacatgtggtgggcgtcaccttggattgcatgtccccaaccgaaatttgcaaatcttcagcagtcttctggatttcaagcatccacgattctaccgccgccttgagagactggaaatcagctctcctt

SEQ ID NO: 23829 - DNA, 2064 bp, Oryza sativa
aattcctgcagccccttggtactgagatatgcctacttcagctgaaatttcaacaaaataacctactctaatagaattggattacagcttccttgcaatcctggtgactatagccttccttttgttcgctttcaatggacttgcatgtgctagggatgcaacactcctgctccttgtaactggtccagggctgccatccacctgcattgcaacttgtgcaggggcttgatcaccagctgcagcaggggcttcatcaccagcagcagcaggggcttgatctatcacagcagtaggggcttgatcattagcagcagcagtaggaggcctatgaaagagatattgaacaaatcagaaaatgctaatggcaactgaaaacttgatgaaaacaggaaaaatacttacatagtgctgttaccaccagtaggcacatgttcaggcttggttttcttctttctaattcttttaggcttgggtggggcagggggaggggcatctggatcatacacatgtttattgcaagtcttggataggtggccaaagccattccacctctcgcatttccttctcttctttcttgaaccaccttcttcaactccaatgaacctccttgttctaggtcttccagctgatctcttcagtattggtggccatatcttgaatccagcgtctactttctcccataggctcttgtctggcattggaggcacaattgtggcataggcagccctaaacatggccactgaatagtaggggctgacatagtcttccagctccacttctcttagggatccaataaaagaaatggcatgcctacatgggaggcttgttagctgccattgcttgcagctacactcttgtttggtcaagtccgctgtgtgtctccatgttgtcaaatccctgtttgcaccactgacttcacctacaaatggcagactcttgtggtgattgtaattgagatttctatttttgtcatggagttgcttcattacatttcccgccttgaagcttgagagatagtttgtgccttgtacacatcctctccatgatcatctgcctaatcttgtctagtagctcaaccacaggtagtgacttctctagcctaatccagctgctaaatgtctctgcaatgttgtttgtcacatagtcacacttagatgaggtggagaagctagaccttgcccacaaatgctggtgattctcttcaatccattgcattgatcttggggaagcctccttcatgatattaaaatacctgtcaaaaacatctttcctatatgctctactagcaggccataggtttctttcaaatacatctctatggaaccttttctgaaaattcttgtacaaatgcctcatgcactctctatgctcaactccattattgagcacccttgtcactgcagcatctatacccttgcctgcatcagtagacagtagtaggccttctggagatccaattgccttattcagacaaaccatgaaccattcccagttttcctttgtttcagatccaaacacagcatatgccacagggaacatccaattgtggccatctataccaatagttgaagccaaatgtcctctccacttgcctgtcaacactgttgaatcaatgcctaaatatagcctgcacccatacaaaaatccatctatacaaggcttcaaagcaacaaacatcctactgaacctatgcttctcattaatcacatcatactctatctccactatactaccaggagatctcttctcaatctctgctttaaaattgtacactgcctcaaagctttgctcccagccaccaagtatcacatctaaagccatatgcctaccatcccatactacatagtatgacagcttgattaaatacttctctaaagtcttcttcagaagcagcagcccctatggttggatcttctcccagcttgttgataaccctgtccttaacccaagaattgctggccatgcaattattctccaatttgcctgtgctagcacaactatgctcatatggcatcttctttatctacaacaaaaaatggacaataaacatccaaaccattattc

SEQ ID NO: 23830 - DNA, 12426 bp, Oryza sativa
tgacaccagctcattgtaattctccctctcatcactaactcctatatactcaacctcatcaaactcaccccatggatctggatttggcactaattgatcagtagctttgtccctggacttgctactttttttggttggaacctttttttaggtagcatctcaggtaggaacattctcagcctgacttgcttgtgtgggtaaaaccatactcagtgaaaccaccgtgtcaacttcatccacacaagacacaatttgggtacaaggaggctcactcactgtcacttgcaatgaaagcttcctaccatcccagtattggttaaatgcctctaataacatagcatcagaataaatttctacatccctacccactctcttgtcccagaaagtcacagtaagctcctgcgcactaccacggatgatttcatcatccaagtccttcatcaaatctatcaagcatacggtgtctttatctacaacccacttatgcgaagttgaaacatggtaatcttggctaccgttatccatatactcaacataagcaacaaccctaaccacaactttgcatgcagagttcggatccatcctacaatgcgatggcaaatgaggagaaaaatgggatccaaaattagatccaccaaaccatgcatcccaaaccaatcaaaaggggaaaaacaaatcaaagagtggcggaaaaattcttaccctttcggtaaccattttggcgtcggcggcgctgaagctagtgcagattccaccacctcctgcgacagtgaagccatctccgctcgtcaaacttgcatcccaccggcgagaatgcctgggcacagccagtatcgagggtggcggaatgagtgagtgctgtttcgatggagctagggttctatcgccggtactgcttgcgaatggagccaaaccgagtggatatgaggagataaggccgaggggtatttgcgtccgaccgggccagaaaacagcctcccgtctgccacgtcagcacgtcaagttgagaggagacggcgcggtgtccgtgggcaaatatccatgattatgggatgtcttcccccaaatgttcactttcgcggtgtccctgagctaaatacacacaattgcgatgtcctgtagcaaaatttgcctataaaatatcgatctggtgattttggactcaaaccgatacgagtgatggtatcacaaataaataattgcaaccagggtcttgataatgctggctgctattgtgctcattttgtaacaagcaagtgtgggcccccggttttgtacaccagaaaccccatgtattttacaatatcactccctagatcagtaggtggtacacacatgacacagtcgaatatcacaagctggcatcgttagtactatattaataatacaagggtagcctaaatgggacccaaatagaccaaacatggtcatgtacattacaaaataccaaatgaagtagaagagacagcggaggcgaagcagtggcggtccatcatactccacaagcaacgaatggtgaaccaaggtcccaattccactgtcttcgacacattctcaacaacatagcacgcatacagtcgactccaactcctttcttaaaaaattaaattaagtaagggtgagtacaaacgtactcagtaagtcaccactacaaaatgcatttagtgcacacaggggttcaaggatggcttggtttatttgcataaagctagttttcacaattcatatcacaaacctatgacttagcatttttaactgaaaaaccacgttaaattgaagttgtcatttatcgagggttcatccaccttcccaagtctcgcttggttcggtttaccctcacattccattttataccactaccaaaataacctccctgcacatcggcaaggttacgcatgcctttacatctcgtagtctaagcaatattaaaatctatgagtctagtcaagagtagtacaagttccgacgctcattaaccgcgagcatggctattcgaatagatcggtttactcatactgcagtggatgtacgctttttaatcctgcaatccgtgacttgtccaacacatgagcctagtcccaacacatgagacttgtcacggcccggtttttcagtcattctcgcattgcggcacccactccaaggactatgagcccccattacacccaagcacaccaaccctacctcgagtcggaagtgaggggagtcctggcgctctcgggattaggagttatttaacatatatacacttatagggtgtattttaggttttagtcggcattatccaaacatcaacactgcaacaacaacaacaacaacaataacatactcgtacagaacctaccatgattggggtgccgccccatgagaatttcctagttcatcgggtctatacccacttgagaaatgcaatcgtactcggttcgtttcttgtatagcttcctgactcggtccttaactgaccagggtcggcgactaacagtttccagaaccacccatattctattcttgccaccctagtcgaaattattttgttttattaagttttggttttcacaaaaggtttttgagtgatcacacatccatacccatataacataagtatggagtgtacgatcgtctaaaatagcaatgctaagcaatgccaataattgactgtgtataaataaatagactcatgcaacaatggatgaatgcataaacataatgataacaagatcaaggaggggtttcattcaagtgtaggtacacagttttataaatagcatgcaattttatttgaagacaacacatttataaatataggttcgatatgctcgaggaagggagcgtagtgacttgccttgttttcagaaacctatgtcttcgaggaatccgtttcagttagatacccggaatgcccacgttcaaagaataaccaatatccaaaacgtccgacaaacgaccacagaagaaccacacacaatcctaaatataaaataaaagtaatattcagtacaaactaatggtgccagtaaatagatcttgattttagagagattatggaagttgaatggagtcattcggaggtatggttcgtaagatatggatttccaaagtttggaaggatttgtaaaccgtggaggtagcactcctcgggtggggagatgattcagacttccagagagggttttgggttgtagagggacacaagatggattttagtgagcaaggaggctgatgatggtctcagcccgaaggttagatgaaggacattatacagacttctatagaggaattaatctctggaataagtacatctgaggtcccttaattttacatcgaatctgattatcgtccttaaccccaaaaccagatacaaccggtcctcaaactgtcaaaaccggtgcaaacgaggtcccttagcagttttgaaggcggttttggctgacgtggcgcctacgtgactggtttgaccaggtctccgtcccacgtggcgatgacgtggcaattatatctcgaaaaaataataaaaaccatgggcccacatgtcagccacacaaaaaaaatttaaaaacggtggggcccacacgtcagctaaaaagatatggtggggcccacgtgggccccacatgtcatctccctctccccactcggctctccctcttcttcctcatcacgccgcagcatgctgacgacgacgacggcagccgaagcatcggcggagtggcggctgcggcaggccgcggcgaaggggcccacgaggagcggaggggcgggcggagcggcggaggcagcagggcgcgggcggcggaggtggccggaggaggagggagaggaggaggtcgccgccgagtttcgctgcctagaggacggcaacgaggtcggcctcttcgccgtgttcgacggccactccgacaccgacatcgccaccttcatccggccccacaagtcatctccctctccccacatgtcctcttgtgcggccgccgtcctccgcctccgccggccttcgccccaggccatgctgccaactacgacgacgccgcctcctctcgccctcccatggcgtcaccctccccttgtcgaactcgaactccgcgccgccacggccggctgtcccttctatctccatggagatggaggaggcggcgaggttgaggaggtcgccgcggggccaggcgaaccacggcgcggaggaggcggccacgcggccgacgctcgatccagcgaggctgtggccgtggcggcggtatggccgatgaaggcggaggcgccggtgggggatggtggcgctggtggcgagccggccccggaaggatggcgcgacgacgacggccgatgcggcggcggcgccggcgagcgtgaggaggccgcggggtcggcgtccaagaggcggcgcttcacgtggcgtggcggcgtcccagcgccgatgaagacggtgacggcaacaacttcgagggacggcggcggcggcctcggtggcgctcccgctaggcggaagcagaggcgaccgtgagaaggggaggtcggcgtggcggtgcgggtacccagcggcttggccacgctctgccgggcgccggccgtgagcgaggcagaagcagctgcagccgattcggctgtgcgcggaggcggcgcccgtgcagcggggaggcatttttgcttggtgctgcaggtggcttctaggagaaggaaggggaggtagaggagatgacatgtggggcccacccaccatatttatttattttagctgctatgtgggccccactatttttaaattattatttttagctgacatgtgggcccacgatttttattattttattattttttcaatgtcacgtgggacggatacctaatcaaaccagccagtaggcgccacgtcagctaaaaccacctttaaaaccaccgagggatcttatttgcatcggttttaacagtttggggaccgattgtatctggttttggggttcaaaggacgaaaatcggattcggtgtaaaattaagtgacttgagatgaacttattccttaatctctcgggctcggccaaggatgtataggctgggtgatgtagacttttagagggagagagagcacagacgggtcccacttccttttattttgcttcctcttttcttctctctttctcggtctcatctcttcctgctctctctgtcacgcgtgcgttggccagggtgacgggcggtcggcgtgcgacggccgggcgcggcggcgcgacagcgcgtccgtgcgcacgggggagaggcggctcggctcgatgcggcggccaggcagcgcagagaggaggagccgggcgcagaggggagccggggcacggcgacgggcagaggaggtggccggtggcgatggacgtggaggctggcggcggaggaaggggagaggagctcggcggcggtaggagagaggaggctggagatccgacgcggtggggagctcgatgcgggcggcatgcgcgaggcggccggcgcgcgacgcgcggcttggcgcggcggcgtgaggaagaggaggcctacggtgtggaggaggatgccggcatgctgcgatggagaggaggacgacggcggggatggagaggagactggcggcggtgaagaaaggctgccgcggtgcgggcggcgcgcgacggcttggcgcggcggccgggaggcaacacagaggggaggaacagaggtgacggtggatgggaaagcagaggagggactacaaggcggcggccgcggaggtgaccgcacgtcagcgctcggcccgacgccatggcggcttgggtcgggcggagacggcggtggcagtggaagtggaggaagggcagaggcacggggaggaggagccgggcggcgaggttgggggtgtcgatggcgggccgcacacatggcgctgccactcggcggcgtcctggagcgaggccaagacgacagcggggagggcatggcgcaacgcggcggcgcgggcgacggccgaacacatcgcgcgcgcaagaggacggaggcggtgcggcgcagcggctaggccgtgcactgccaggaggcaatagaggaggagcgatgcgcgggcgccgcgcaaggaggatgcgacgatgcgcacgacggcggcatcgcgcggaggcaaagacaagagcaaaagaagaacagagaggagggaggaaaacacggaaaggaaggaggaaggaggagatgctcacgtcgcggcagccgggtagcggcacaccgtgcgtggtcgatgggcgtcgatgctcggctcgcggttcatcctcggctcgaacacagccacagaggttcgtttttcagttttagctcaagttttagttcgactacgtccacggtttgagttggattgcaagtttttggaggatgctatgggtcggacgtcgacacgaaactgcctcacgactgtgcgcatgcatgcagcctgctgcgtgatgaggcatgtgttgctgactaccctttgtttactgtatgcggtgcttgtctgcctgagctgttactttactttttctcttcccttcaatcatattgcatgtatctacttttccattaaattttaaataatattttcatcttaaaagacatatacaatgtacgattcaattataccattacattcattgtaattaaatgtttataacaagaacccacgaggttatatatatgtgagtatgaaaatcaaccattgtttcaccatttataaaaacatatttgaactcacctcatgaagtgtttcaaattcagagaaatgtaacataccgaaaaaaaatactaaatgcaacaatcacaaccactacatgaaacactaaataccatcgagtgaaacataaaaaggatcatattaaacatatgctatatttgcaaaatatacttagttatgtttaaatatttttaaatcacacatgatgcatagttgtaactgctgagacaatcaaaaggatacgttgttgacggtcgttatcgatcagtttcgaccgtcaatattgccaaaatagaggagaactagtgatgcttgcaatgcataattacgttagaataataatattccactagtattaggtatactaaccttttgcatagaatgacaataaagtgaaggagaatcgacatcaacacagacgataaatcaatcggacgatatcgacaatcagacttatgtatgaatgggctaagaactcagaattgacacgatgaattgggccaaaattcacaagtctgcagagtggagcaatagaggaggccaccagccgaaattgggctggattgggccagccccaggttcagccgaaccaatcctggcgccgtcggatctaggttttggtgtggacgtccaggattgcatcccaatgacggttggagggcacttcggacaattccccttccacaaccgtcataactacctctatataatgagctcactctcttcacttcaacacacacctcaagcaatagcttagtttagtagtatctagctggtggaataggaatagagtagaaatcaggagtccgaaagtcttcggaagagttcgggtatggctctagcagcttttctcttctcttttgtaagccttgtacttttattagaatactcttctaaatacatttatggtattgaaatactttccgagtatatgagtacctactttacattatgttcttgttatactgaatatacggctagcttatctgggagatgctttggtgcgggtataatgtttgcttatgcaattactctatgtcatgacgatgatattagagaagtatctggtagtttagatgtggtgtctagattacgggatattattatttggggttatatattgcggatgagaggtgggccgctgatggtgatagatcggtacgggtattcctccgcgcctatatataatcctaagttaatttcctggggagggtattcctccgtatttagccccggttgtatggtcatgacgggctgtcgtaaggaactcggcagtcaggggtggcttctcgaagtaccaggagggcatcggaaagagggtattagctagtatatcagtttactaagatgtatgtatactatgtatattagaagtataggaatagattatcttcctctttcctttccacttagcttagataatatattatgagaatgagtagttaatgcttgtgtgtcactctacccttggattatcttaacccctgcttagaatatgattattacaagcaacatataaattattagttaagtcctctctacatgatcttcccacgggataaaataaatacgatacatttcgaatactctcgggtgaaatgctacaatggtatatccgtgcgcttgcggatgaactctgtaaccataatataccagaattatttctacgccattgctgggaattatatttctagtaatgtcgttaagaaataccaaataagcatttctggcgtcgttgccggggaaaattcataatagagattacttgaactaatattttatatttgcctctgtataatcattttcctttgcaggctaaccttggttgttttcacctttgttgtgagaacagggtagtgcatgactggtttcaacctgccggaaaatttcaaggaaaatccagaagctttcttccggagcgtcagaccgcgagtcgctgctccgcagaaaactctaccgacagagaaaccagccgtaccagcgccaccaattttcaagactatggctagcaagactctccgcgagttcgctgctccctctgctgacaatgtggccattgggccacagatcaacatgggagacatggatttcaatttgaagtccagactcatcacgatggcgcaggctagcccattctgtggcaagcctaatgaggatgccaatgctcatctgcaacagttcctggagatctgtagcatgtacaccatcaagggcgtcagtctcgacgccgtcaggctggactgtttccattctcccttctcgggagagcgaagcagtggttttatgccaaccgtgctgctgtcaacacctgggataagtgttctatggcattcctctcgaagttcttcccgatgggcaaaaccaatgcccttcatggacgaatttcaattttccagcagacgagggatgagtctattccagaagcatgggaacgactgcaggagtacgttgccgcctgtccttatcatgggatggacgactggctgattctgcagaatttttataatggactcaccccgacgtcccgcgaccccgacgtcccgcgatcacctggatgcggcagctggaggagcattcttctttaaaacggttcaaggagtcgttgatctaacagagaagatggtctccaatatgggatggagcgaggaacgactccagacccgacagcgaggtatacacaccgtcaaggagacggagttacttgctgccaagctggacctacttatgaagcgattggacgaccacgagaaacgaccacaaggcaccgtcaaggccttggactcacacgttacgtgtgaagtctgcggcaacacgagtcattctaggaatgactgcccggaaactcgtgaggaggcgatgtacatgggcaacaacaacaacgggtactgtccacaaggtggtcaggggtggaaccaaccacgcccatattatcaatgaggtaacaataacggtaatttctctaaccagccctccttgaaggatctcgtttttgcgcaagctaaaaccactgatgcgctaagcaaaaagcttgcggctaatgacaaggtcctagagaacaaaaatgtcaaattagatggctttgcttccgtttttcaaaatcagctgagctttaataaaatgatagaaacccagttagctgagttggcatctttagtccctgcaaatgaaattgggaggattccggggcaacccgactcctccattgaaaatgtcaaggcgatcacgacgaggagaggtaagtccactcgtgatccgccatatcctaaccctgcaggaactactgggatgtcaaaagaagcaccgtctagtgactcggctgacaaggaagttcagccagaaaagacagtgccgcaagagtacggcgacacacggttgctgccattccctcaacgaaggagaccgtcagtggacgagcaattcgctcgttttattgaagtaatccagaaaatccacatcaacgtgccgttgttggacgccatgcaagtgccaacatacgcccgttatctcaaggacatactcaacaacaagagaccgctcccaacaacggaggtagtcaagctgacgaaacaatgcagcaacgttatactccacaagctcccggaaaagaagaaagattcggggtgtcccacgatcacctactcgatcggggcacaacagttcgaccaggccttgtgcgaccttggagctagcgtcagcgtcatgccaaaagacgttttcgacaagctcaacttcacggtgttggcaccaacaccgatgcgcctacaactggctgactcgtcagtccgttacccggtagggatagcggaggatgtgccagtcaagatatgggatttcttcatcccagttgacttcatggtactggacatggacacgggaaaagagacgccgctcatcctagggcgtccgttcctcagcaccgcgggagccaatattgacgtgggaacggggagtatccgtttccatatcaacgggaaggaggaaaagttttagtttcaaccgaggacggaacaatgctctatggtcagaataaagtacgggccgaacccgcagaatattcaagaggtcgaagtggagccacccaagacggacagcctggtgaaattcatgcagaatttcctgaagaaggaaacaacgatgcccaggaaccgttattggaggacgccggtaaaaccaccaataccagccaagaagctagagcagccggctcagaagaagccgccctccgcaccaaaaccaaggaaggtgtggagggagaagccgaagacgcccgctccatcacctccggagacgggtggaaaaaccatgaactaaatcggaaggaggtacagtcctgcacgtcggactttaaatgacgtgaccttcgccaacaggtaaattggtatgtatctgcatatttgccttcaacaatttgaaatttttgcatcatcacacgtttaattttcaaaattgcatttaggacttttgaattttgaggaaattcttcaaatgaatttttcagaacaaaccaaaataaaattttccacgaaaattcattgtgccacgaccacaccgaccgttggaatccaacggccgaaagtggggccggttgggcccactaggggttcggccaaacaccttggttcggcaacggttccctgccacttttggcagggtaacggctagtgggtcctacatgtcatttctgaccgttgtgggtaccctataagagccagccgaccgagagagggaattccaccccatttcaacacattttctttccctctccaaagtttgctctcaaattcattcaagccttgatagtttccctcaaattcaaacacttagctgcatatacatatatatatatatatatatatatatatatatatataagttgctttggtgaaactaatcggcgggtgaaatccttgtcattcctaacccccgtcgagttagtccgttcttgctccattgtgcggaatgagaaggcgattgtctcgtctgttcaaggggtccagctcttcatcaagtcgtcatgacgagtctagtactcgttcatcagctgatgtctcgatggaagacaccgaagctccgcgacaactcctgaacaacaccgacctcgaccttgtcagtgatcgggagagacaggcctactacatgctgagtgaccgggagtatgctcatacgtaagaatactcaccggagctgctaaaaaagataggtatggatactgaatttcgtgctatttggaaagttgttggttggcagagatttgctgtggtagatgagcctggttctcgtttgcttactttgcaatttctgtgcactttgaaagaaatagaagatgggatttcctttcgctttttccgtgaggagtttacacttacatggaaaggcttaagcacacttcttggttttcacgattcctgtaaaatcgatctccagaaaggaatttctgggttcgagaaaaataggttttgcgaagatatttctggtgctccaatttgcaagaaacctaggatgaatgatatccataatcctacacttaggctcatgcacaaatggattgctatgactctatttcctagaggtgatctgagacccataaggggagatgaattaattatcatgtttgccatggttagaaagtatcaagttctgtgctcctgttgagtgcacttctctgattactcggatagcaaaagggctaggggtcgttagcgaccaaatggcttttatctcagccgctcgtccgcgtattgatg

SEQ ID NO: 23831 - DNA, 4466 bp, Oryza sativa
  unsure (1)..(4466): unsure at all n locations
gcctcaccacccacatccgcacgctcctcgacgactccaagaagaccctccaagtatctatgattcgattcgattccactgcttctttgatcccacatcaaatcttgctcggccttctcatcttgcttgcttgcaggaagccgactacaaggagtggaagcacgtcgtccaagaaatcgcgaggtttctcagagctgactccccctttatcaacatgagaccactcaggtacagctacgcatttgatcctccccctgatactcttcctaccgtcccacctactgtcaagaagcgaggtctggtcttaaatgatgccatgctatgcagctactatcaaaacgaggtagggtaatgcttcctctgtctcaccttctctttttttctgtttttaacacaacaaaaataatgaggagttgcctcgctatgtttgttccactcagatcaaatttacagacctcaccatagatgttttcagaatgcttcaatgcctcgaatgggaaccatgcggttcttttgcactaaccaatggttacagtacccgcgatgaaagtggacaaaatcatcccaatctcttaaaagatctgagagatgctgcgctgcctccaaacccacttaaaacaattctctatcgtccctcagtgactcatttcctaacagtaagtctcttcttcctcatttgatgcttgacttactgtcttatcctatgatttagtgaatgcatgcaatcttaaaatgtatttcatacaccatagttatctactagtataatcatcagagattgaaaaaaaagggaaatcactatggtagacagttaccatatgaagaagtttttggtgcttgcatgttactactccccttgaaaataatattggcatttgacacatttctgctgcatttagttcaccttaagatgagctagtttaacttgttggatgtttcagtaatgggctagtataacaattgacaacgtaggaaattccatgagaaaaaaactatattactagtattaactaattgatttaattattctgacaagaaagcatgccaatgatcttcttgattcctcccgagttcatgacatgaggttcaaatgcacaatgaatctgcttggtggcatacatctgattgtctaatgtctacaccaataatattggtattaatggaccagtaaacttttgacgacaaaactactcttttggtaaccatttcggagaaccacaccactaactattgttattgcataacaacaaggaaccatgcttcttgtggacatgatgacttggacctacatggtaacaacataatcctgtctgacccatcacatggacattgacttccacacccactggctggcagtaggtatcacttgtatatacttgacttccataccacactggtagcaataggcataccacttgtctatacttggaagggagagggatgagactatntgatttctgctttgtgttgtgcgtgaagtggctaggtgaggagagccaagattcatctgtttcttgcatttggttttcttattcatcacatagatcatgtttgttatcccttttgtttaacattagttacatcgttgcaagccttataagaccaagcaatccacggaataaagcaagctgagattaatctgtaaactctatcctctctctctctctatgacatgacggctctgggcaagcaaggtcctccagttgagcatgggtatgcgttacgcagcttggggccacctccaagccataacatctgttcagtgtattgtttcttgtttggaatttctttcataccatggttctatattagttaacaaaaaaataaaataaaaataaaaaactttctagattgactacatcctgtccacctatatttaatagggattattgaaatttttggactgctttacacaactcccttgtatattataattcctttttatttaacatggataatagagggctatatgtttttgttaatcatatattatcttgtatcgtatgctacctctccattcatgaatagttgttgattttgacttaaatggatatgattttgtgtttatctttaggcaatataaaataaatagctctaattgtagaatattgtagtacttttgattataaatcttcctataccactttgatgcaaaatagttatacaaccaggaaattattgttggtcaaagcatgatcagtcaattgttatatgttatgtttgtaatctaggtccttgccaccaaatgtgaggagctcccgtcaaatggtatgatgttaatatacctttcagctgcaggtaggtgctgtaggcatttaactaaaatgttatttgtaatatatcgtctgttgggagcacattccaatcaacactctcttatctttcaggcgaggtgggatcttctggattttgccctgatacaaatgagatggttgtgagcagcttgaataagtttgataattttaatctaggtccctccaaggtaattaaggccatgggccttgtttatgggtaggctgccgtgaaggtgaaggtatattcacaatgctggcttaattagattatcttcttggttaggtttatggcatccttgaagttgcccttacatggactcaactttcctagaaagaagtatgttatttctgacacatgttcaaaacatctaggttcaaactgtatatacccttgtgatctgattccatttacaagaagaccactctttttggtgatcgacagcaatgccagctattcattcaaggcaggtttgtttaatcttatttttttatcccaagcaaccatcattattcaatactacctccgtcctaaaatataacaacttagtacatgattagacataatctagtacaacgaatatggatagaaatattttgagacggagggagtatttgttatgggtcacttatattaatttattctggctagtgcgggactgaagactgaagaatatttctttagtgggttatccatgagtgatgaacagttttactgaatcctgtaatgctttttgagagaaagcacatgtgcttggatctgcacatagacaggcttatagtttttgtaattttttaggttgaagcttttctcagtttacttctgtgtaaaatcatgcattatacttatccaagtgccattctattggcattcctcattttacttttgactatgcacctcttagattacgatggaatacatcatatttttactgtaggctgctggttggcatcatgccatttattgttagtgctgtcagtacgttgatcccctctaattttttcaaattaagcattgcagtcaattcatgggtttgaaaaaggggagacaacggccatgttactttctccaagttgccgatcttcctcggcaggattcagtggggattctgtacggcagattggcagtcaatttactatgtttctcacagctccattgcaagctttctgccatctgattggcaataatggggtcgacattgatagggtacttgcttttagtttttgttaacaattttctctctcagagcaagagaagttttttttatattgagctttgacataaactttttttaggatacctataacaaagctgaagagttactatcattgtccttaaatgaatgggccactactttggttgcatcatcttcacttcatcctgtttgggttgaagttttaggcgatccactcttgaggcggcttcttctcaggtcaccttccaaccttttgcatgagttctgtatggacatcaactttaacatgattcttatctactaatttctcaataatgagcgtatgttcactttataagctgttcccctcatactgtgttgagctaatattccttatattctgcgtaatgtaagctgttccctgatatgcatacttgatatgccaacgtgtagcattttaaagctcatttcggttgtttttgcaggtttatattctgcagagctgcgcattcgatcttcaaacctacgtaccataaggtggacttcctcccaacttgcacacctcctttgccagagtcggttgatgcagagagcatgctttcccaatgctgcctgttgcgagttgcatctttctttggcgccaccaaccaattctcattttctgaggtaaccacatggcctgaggttgatgttgaggaggctgctgtcgtcaacccctcgatctagcggtaccaactgtgactcttgcgcatcacaatatttagtttctacctatcaaaagatgaagagatccattgtaataccttaatgtggtgtgtgtacagccaaatttgcaataccctatttatcgtcgtgctaaaatttccgttactggccccgcctcctgtagccctcgaggccaagcgtctttgagcaccgaatgatctgacattggacgaacaagattacagacatatggacaaaatatgtggagacattaattcataccataattcacatt

SEQ ID NO: 23832 - DNA, 17712 bp, Oryza sativa
  unsure (1)..(17712): unsure at all n locations
ccacgcgccgccgtagtcgcgccgccgcgccgccgttgtcgtgccgccgcgccgccaccttcgaagccgccgcgccgtcgcctcggagccgccgcgccgtgcgtcgccgccttgcgccgccgtcgccgtcgttgccgccaccgccgccgccggtgagccgtcttccccccctccacctcgcgcccacttccgtcgccgcccggggaagcaaagagccgagagagagagagatagaaaggagccgggaggagagaaagaaaagaagagaaaaagagagaaagaaaagaaaaagaaaggaaagaaaaaaaaagggaaagggagaaaaaggaaaaggaaataaaaagtaaattagagggagattagggaagtttagaaaatttaaaataattagaatctaattatagaagttttatggtctcgagtctatgacatgtgggccccacttgtcattagctcttcctatttccctttagaaaataattcggtaggaaaaagaaataaacccgggtcccacttgtcagttggtacaaggctgtggatatgtcttaaaaataaatcgtttatgaacagtagcttttcgcaatttctcggattaattcaaatttgaatctttacactagcataacttattcattttaactcggatttgagtgaaacttgaacctaaattcatctaaattcataagctttccaatgatatataattcactatttaacaaaatatacttataattataaattaattaatatcaaatgattagataatagttaacctaaatagtgtgccaatgaataaaaatggatattgtacagtagcataattatctttaacatgtcttgtcactgtagcaactaaataaattagttataatcaatccttcaaattaatggatgtataggaaaatactagtacttatttaatattcgatggccatataattaaatccatggcttataggttatttaaatcaagtatagccttatgattatgtaactaaaatctaaacacacatagatgaatctttaacctgtttaggagaatcataacagagctagatgtggaggaatcactaagtaaattaatcgatgcaataccatatagaatagcatatatatgcctaaattgattaccacttattagtaacccaatagaaccaatgcttaaacttgtcgcatcacatatacaatatcactcatagaaactagctaatgtataattaaactacaatatatttaggaatcacttggagcattgggtagtacactttctaaataagctcatgtacagtaggcgaccaaaaccttatatgttgttgcacacatatattgtacatcccattatagttacacaattaatttatctttttcatatattaaactggggagtatatagcaaacatgaatagtagataagtactaattataaatcttgacctcctatgttcatagttcaattgtaactccggattgttcattaagagataatctgtaactataatattataaacttcccgaatttaacatatagagcatggataattattagcccttttataatttataatggcaagtaaaatatgttcataattaaagtaaagcttccatcaataaaataataatacaaataattcactgtaattgtttgattgatcctaaatccatctaacaaaagaacctctagtatataaccgtcctatttagatagatgaatacatagccataatccttccatagccatttgatagactaaaccaccgattagccaaatatatatgtatcccataaatgctatgttggttaactcctaaataggccacgatgacaatagaaagattaagaaactttagccttagcatgattgggatccattagcaaacacgaatagtacattttattgcgcatatttgattgttgtttgaatattggtttttctcgcgtattatagaccttgtgtatcggttagtcgtgaggcaacgtctgcaacttccaggaggtgaaggttgatcaagattatatcaataataaggattatcctgagcaaggcaagtcatcactattccttgaacatgttgatcccaattgcgaaattgttttgtttgcaaataaaattgcatgcaatgatgaacatcctacttgtgattatgccatgccttgattattgtttacccttaaatctttgtaaccatgtttacgtatgagtccctagtcaactatgacaattgcttaggaatgctattctagaatcatacatactcatatttatcaaatgctatatgcttgggcaattacctttgggaaggtaattgagatgcggcatgtggagacatgagcgccacattgccatgatgttgatgacatgatttgtgaaaggagaaataaaattaaaacaactgttttcgactggggtggacggaggatttgggtggtatctggaaaaggctagtaccgtccccagtcaattaaggaccgagccatgaagttaagcatgaaacgacccccgtacaaccgtacttctcgaatgggtatagacctagcggattagatagccgagcggaggcagtatcccagcatagatggttcacccctgagtgaggcaggtgcgctacgatgggacagccgttgaggtagggccgagaagcgtgccctacatcggtgtcgccattggtaggactgccatgagtgtgtaagagagagaacttaacttgaaccataatttaatatgcgtgacttctctttcccgggagcgccagaactcctctcactgctagaaacatggacgcctagagtgcatgaggatttaagttcatggagcgggtactgccaatgcgaggttatcgaaaagctttgccgtgatgcgtctcatgtgttgggacgaggctcatgtgttgggcagtcgcggagtgcgggtaaagtgtacatccactgcagtgtgagtaaaccaaatctattcgaatagccgtgctcgcggttattgagcaccgggacatgtattacacttggctagactctaaattcttaacttgtggggggatgggatattgcatgatgaattttatgctgatggagccacatcccgagaggagggaaggtggacatcctcagaaaaccatgacgattcaatggcgggaagctatccttgggatcacaatggatggtggacagaaccgtcgttgtttaaagtgaacactggtactaaaatttgatcagtctatactaggttttaggcttgtgaaaagaattgtaaaattagctttatgcaaaagaacctgaagccattccttgaaataccctctatcatatgcattgttgttgtggtggcttcctgagtacggttggtactcacccttgctattcatatatcttttaggagagtgttgaagagaagcccttgtcggtacgcttgcgtatctaacaagatgatcggagtgcggtcttgttctaggtctcgttccccagtcgactgcctgtggcatgttaaccgggcccttatattattttgtcttccgctgttgttctctgatagttgttggcctacctggccctaatgtaagtatttaactcttttagcctaaattcattcgtgatatgttgtgatccaactatgaatgtgtgtaccaactactgatccagggattgatacggataaacacagaagatttccgattcccaaaattgggggtctacactacgttaacggcgcggttagtcaacgtgcttgacaccgacgtcgtctaagctatccaccctaacatcctatgtgccgttcctatcctaaccacctcgttaaaaaccagttgtggaccctcagatcttcgacatttcaccgaaacaaccgctgcttcgtggcctatggtaagtggtttctagaaaaatctttggggttccacctttcccaattcagtctctctagggtgaggcccgtgattctgcagccgtaaaaaaaaacctagctcgattccatgcccggaaggcaaagttatcaaggtcttaaattcgcccagaaatctccatcggcagtccacggtgtcgcgcccgccagcctaccttaacggcgcggttagtcgacgtgcttgacaccgttgttgtctaagatatccaccctaacgtcctatgtgccgttcctatcctaaccacctcgttgaaaaccaattgtgaaccctcagatcttcgacatttcgccgaaacaacagctgcttcgtggcatatggtaagtggtttctagaaaagcctctgggggtccacctctcccaattcagtctccctagggtgaggcccgtgattctgctgccgtcaaaaaaacctagctcgattccatgcccggtaggcaaagttatcaaggtctttaattcgccaagaaatctccatcggcagtccacggtgtcgcgcccgccagcctaccttgacggcgcggttagtcgacgtgcttgacaccgacgtcgtctaagctatccaccctatcatcctatgtgccgttcctatcctaaccacctcgttgaaaaccagttgtggaccctcagatcttcgacattccgccgaaacaaccgctgctttggggcctatggtaagtggtttctagaataatcattgggggtccacctctcccaatccagtctctctagggtgaggcccgtgattctgcagccgtaaaaaaaaacctagctcgattccatgcctggaaggcaaagttatcaagatgttaaattcgcccggaaatctccatcggcagtccaaggtgtcgcgcccgccagcgtatgtaagcggcgcggttagtcaacgttgttgacaccgacgtcatctaagctatccacctatcatcctatgtgccgttccttccctaaccacctcgttgaaaaccagttgtggaccctcagatcttcgacattccgccgaaacaaccgctgcttcgtggcctatggtaagtggtttttagaaaaatctctgggtccacctttcccaatccagtctctctagggtgaggccggtgattctgcagctgtaaaaaaaacctagctcgattccatgcccggaaggcaaagttatcatggtcttaaattcgccaagaaatctctatcggcagtccacagtgtcgcgcccgccagcttaccttaacggcgcggttagtcgacgtgcttgacaccgacgtcgtctaagctatccaccctatcatcctatgtgccgttcctatcctaaccaccttgttgaaaagcagttgtggaccctcagatcttcgacattccgccgaaacaaccgctgcttcgtggcctatggtaagtggtttctagaaaaatttctaggcgtccacctttaccaatccagtctctctagggtgaggcccgtgattctgtagccgtaaaaaaaccctagcacgattccatgcccggaaggcaaagttaccaaggtcttaaattcgcccaaaaatctccatcgacaagccacggtgtcgccccgccagcctaccttaacggtgcggttagtcgacgtgcttgacaccgaggtcgtctaagctatccaccctaacattctatgtgcagttcctatcctaaccacctcgttgaaaaccagttgtggacccttagatcttcgacattccgccggaacaaccgctgcttcgtggctgacggagcgtggggctcctcaccgggagaccgcgcaggcccccctttgccggttcggccggggactcagggagagattctaagctctctgtatgtggaaggctcgcgagacaggaaacacacaagacacgggcgatgtatacaggttcgggccgctgagaagcgtaataccctactcctgtgttttgggagatctgtgtatgaaggagctacaaagtatcagccagcctctcccttgttctgggtttctaatctggaaaagtccagtcccccctctcagtgggcaaggtcctccttttatatcttaaggggataccacatgcaccatttctctctttttttgtggggacttacccccccttttcataaatggacggagatttgtatagttgccgtccgagtcaccttctgatgagacggcccacaactacctccactttcgccgggagcaggtgcgacgtggaatcgtggctgtctgctgacgacatgaccggtatcagaccagtcacgtcggtcattcttgtccaccacgtgtcagcttagcaatctacatgctcgcccttcttcacacaacatcttgcctgtaatggtttaggatgaagcctggcatatatctgaccaggactaacgtgccatctctgggaggtaacacgctagctccagctggggacgagcgcctagaagccctcgtcctgacgggatggggcgaggcgtgcgtcagatcgcctgtcgccacctaacccgcgatctgaccggtctgtgactggtcacagaccggataaacgagtgcactgcactgcgttacatgcggcgtgacacgctcagccaaaccgcaataaatgtggttaggtgaggctnggtgtgctgacgcaccccatgcactcggagaaaaaacccacaaggggtcggggcgcctcggccctcggggccgaggggggtgcggcccgaccccctcggggggactaagaggagggcgaacgcatcaccctcgggcccgacgtccctcgggggtaccaggccacgtgtgcgattgtgtctgcctcaaacctctagtcatgatactcctgatcccatgtcaccgacagtagcccccggcgttatgccagggcgatcgccctctttaagggaaacggtcgggcgtgacgccactcctgagacctggtgacaggtgggaccgatctccacaattgggcagaaacccaacggtcacaaaccacgcacatcggcaatggtaactcggctgtcaacaatgagcggtctcttcaagactgccacattacttgagtagcatacgaatctggacatggcgattcgtttcgtctgaagatatggtaacgttgcttcggtcggcgagcgtaattaacgcgcgcacgatatgatctatctcgactgccacaaccgcatatccacctcatgcgccgcaagcgggcgaatgggattagtggaagcgtgggcgcgagaaacgagggggcgaaatagtgggcgcgagaagcgaggagccgggcacagcgttggcaagagtataaaggcactgaggaagggatctgtttccttcctttcgccattattccccttgtcttcgctgcttgcgccctaactccttctttcctgtgccctaccttcgccacacgcgctcgctcttaatcttctcttcctccggcgccatggcacggggttccgctctgctcgatggtagcgtgctgccgccttcccggatcgtgagcgagaggcaggctgggctgtcgcgccgcttcatgccggaatctgccaccggccgggagatagtcacgctgggcgagggacgcccggcgccagactacccggggcggtccgtcttctttctcccctttgcaatggtagggctggttccaccattttcttctttcttcatggatgttctggagttctacgatctccagatggcgcacctcacccccaacgcggtgatgacattggccatcttcgcgcatctgtgcgagatgttcattggggtgcgcccatctcttcggctgttccggtggttcttcaccgtgcagtcggtgtcgccgccatcggtagtcggtggctgctacttccagccacgggggccggtgctgaaccgctacatcccctgcgccctccgcaagaagtgggacgactggaagagcgactggttctacactcccctcgccgacgaagcgcgcctccgacttccgagccagcccccggcgcaggcctccagctggcgggcgccggtagatctgggggatggctatgacgccgtcctcgaccgcctggcgggcctgcgatcctaggggctcacaggggccatggtgtacggcgactacctccgtcgtcggattgcaccgctccagcgacgcgctcggggcgcctgggagtacaccgggtccgaagacttcacgaggacccaccagggagtgagatgggactgggctcctaaggacttcaagatattggtccaacgggtgctgaatctcaactccgtagaggcggccctcattccccaaggaatcctccccctctgcagcgatccagaccgcgcctccatcctgaccattatgatggcggtcggggcctcagaggagcgagctccaaagggtcacgacggcgcaggcgggagccgcaggggggaacaatctaccccgagagggggtcgtgcttctgggtcccgcgacaggggcccggggagcagccgccctgccgacgcccgggggaagaggaagcagggaggaacacctcccccatctcctccccgagggggcggggcggcgcgtgccagtaacaggcgcccggagggggccgcgccaacatcgcagcccgagggggagcgcaagaagaagcggccccgtaagatgggggagacagaaccatctcggggaaacctcatttcccctccaaagtggtcgtttaaccgaccccctcgcaggttcgtctctcacccatcgtggctgtattcattctctcaacgcgagttttcactcacccatcttgttcgtcttctggttttttctttcgtttcagcgagatcctgtcgcgtccctcccgccattccaagtccggccagtctgaggccgaggatccggcggccgcagaggccctcaggcgggaatctgaccggcgagaggccgcggatcgcctacgggaagccgaggaggccgcccaggaggccgcccgggctcgccaggccgaggaaaccgctcgggaggaggcctcccgggcccgccaggccggggaagccgctcgggaggaggccgcccgggcccgccaggccggggaagccgctcgggaggaggccggatttcgctaggacgaggcgatggcgacttccgaggcagctcgcgatgaggccgcgggcgcgtcgcttgggcccactccctcaggcgacactcaggcgacaacttccggggcagctggcgacgaggccgcgggcgcgtcgcttgggcctactccctcgggcgacgctcaggaccaaccgggtcctggggacatccccgagtccggcacttccatcggcggcccgagccgcgtggcatcctctccaaggcggctcttccccacgccttctatcgccctactgaacgcagagccccttctgcaggccttggccgccgcaaacaccacggtgttggatgggttaagtgcccaggtggaggtcttgcaggcagagcgggcggagctcgacgccgcgtgggcgcgtgtcgaagaggggcgacgctcggtggaggccatggtggaggtgggccgtaaggctcaccgccggcacgtctcggagcttgaaactcgtaagaaggtgctggcggagatcgccaaggaagtggaggaggagcggggggctgccctcattgccaccaccgtgatgaacgaggcgcaggacaccctccgccttcaatacgggagctgggaggcggagctagggaagaagcttgaccgccgcccagggggtgcttgacgctgccgctgcccgagaacagcgggcggcggagaccgaagcggcatcccggcggcgcgaagaggcccttgaggcgcgcgccatggcgctggaagagcgcgcctgcgtcgtggagagggatctggcggaccgcgaggccgccgtcaccatccgggaagcaacgctggcggcgcacgaggctgcctgcgccgaagaagagttcacgctccgcctccgcgaggacgcgctcaccgaacgggagcgagctctcgagggggccgaggccgtggcgcaacagctggcggtcaacctgtccctccgcgaggcagcgcaggaggagcaggcgcgccgcaatctggaaggtgcctgcgccgagagggccgtactgaaccaacgggccgctgagctcgaggcgcgggcgaatgagctggacgcgagggcgcgcagcggcggggcggccacgggcgaaagcgacttagccgcctgcctcgcagctgccgaacgcaccatcgccgatctgcagggcgcgctggactcgtccgccggggaggtcgaagccctccgcttggcaggcgaggtagggcccggcatgctttgggacgccgtctcccgcctagattgcgccggtcggcaagtgggcctctggagagggcggaccgtaaagtacgccgccaaccagggaggcctcgcccagcgcctctcgaagatggccggggctctccaacggctccccgaggagctcgagaagacaattaagtcatcctcgagggacctcgcccaaggagcggtggagctcgtcctggcgagttaccaggccagggaccccaatttctctccatggatggcgctggatgagttccctcctgggaccgaggaccgcgcgcgcgcgtaggtccgggatgccgccgaccatatcgtcgacagcttcgagggctcggcccctcggcttgcgttcgcccccaactccgacgaggagggcaatgccggtggtgcagacgacagtgacgtcgaggccggcgatccgggcgcatcggattgagcccccagacccccgccattcttcagttttttcttcttttctttcttctaaggccttcgggcctcttttttgtatagatcaacttaatctgtaatcaaaaatgaagaaatttttgtgttaatttcatcttgctgtgagtatgagatgaggatgatctgtgccgtggtccttttgtgtcttagcttgaataagggcttgtgcccaggttctggtcctcaaaaggcgcgggtcggggctagtgcctggggagatccacatgtcgagactggccaggccgggaacgtggtgaccgagggttatgggtgacccgattgtgggtttttgccgattcccccccggagttcaccacgcctcggggcacggctcggttctgggccccgtttggcgattttagccgacccgagcccccgagggcaggattgagcacgagtgacctatttcaagtcaagattcttcaaaaggaaaaaacagcacagatacaacgtttaggaaattgaaactgcttttatagaaattcagatataagagaaataagaatatgcatatgttgtagcccccggccaaccctgcacgcccaaggggggtgcggggttggcccgagcccgaaacctaacacccgacccccccctcaggggtagaagcgacgaaggtgttcgatgttccacaggttaggcagctcagtgccgtcgcccgtggccagccgtatggagcccggccgggggacgccgaccactcgatacgaccctcccacattggtgaaagcttgctcaatccagcacgcgtttggacgcggcgtaggacgaggtcgtcgacgcagagtgatcgggcccagacgtggcgctgatggtagcgccgcaggctctgctggtagcgcgcggctcggagggccgcgcgccgccttcgctcttccaagtagtcgaggtcatctctgcgaagctgattttgatcagcctcgcaatacatggtagcccgaggagacctcagggtgagctcggatgggagaaccgcttccgcgccgtagacgaggaagaaaggcgtttccccggttgctcggcttggtatagttcggtttgcccagagcaccgctggcaactcctcgatccatgaatcgccgtgcttcttgagtatgttgaaggtcttggttttaaggcctttgaagatttccgcattggcgcgctccacttggccattgcttctggggtgggcaggtgaggcgaagcagagcttgatgcccatgtcttcgcagtagtcgccgaagagttcactagtgaattgggtgccattatccgtaataatacggttaggcactccaaaccgggccgtgatgcccttaatgaatttaagtgcggagtgcttatcgatcttgacgaccggataagcctcgggccacttagtgagcctgtcgatcgcgacatacagatactcaaacccgcccggggcccgtctaaacggtcccaggatatcgagtccccagacagcaaatggccacgaaagtggtatggtctgtagggcctgggccggctgatggatttgcttggcgtggaattgacacgctctacatcgccggaccaggtcgaccgcatcattaagagctgtcggccaatagaaaccctggcgaaaagctttaccaaccaaggtgcgcgaggcggagtgggctccgcattcgccttcatggatatcggcaagaagcacaacgccttgttcccgaggaatgcacttcaggaggattccattagccgcgcgccgatagagggtcccttctaccagcacgtagcgtttggagatgcgatggacgcgttcactcccttcgcggtcctcgggtagagtcttatctgtgaggtatgcttggatctcggcgatccaagcaatcgatctaagggagttgggagcactcccctcgggtcccgaggcctggactccgacaggcctcgggggccggtcaggcgcatctgtctcccctaaggggtcgggtcgcgccgacggctgggcaagcctttcttcaaaggcgcccggtggggtctgggctcgcgaggacgcgagccgtgagagttcgtcggcaatcatgttatcccgtctgggcacatgccgaagctcaatcccatcaaaatggcgctccatacgccgtacttggcgcacgtagacgtccatctgcgggtcagagcaccggtactccttacagacttggttaacgaccagctgggagtcgcctaacaccaggaggcggcggatccccagtccagctgccactcttagtccggcaaggagtccctcgtattctgccatattattggtcgctcgaaagtcgaggcggaccaagtatctgaggacgtctccgctcggagaggtcaacgtgacccccgcaccggcgccctgaagagacagggagccgtcgaactgcatcacccagtgggcggtgtgaggcagctgcgaggggtccgtgctggcctcggggatcgagacgggctcgggagccggggtccactctaccacaaaattggcgagggcctggctcttgatagcgtggcgtggttcaaagtgcaaatcgaactcagaaagttcgattgcccatttcaccacccgtcctgtaccctctcgattatgcaagatttgaccgagggggtaagacgtaactactgtgacccgatgcgcctggaaataatggcgcagtttcctcgaggccatcagaatagcgtaaagcatcttctgggcctgagggtatcgggttttggcgtcccggagggcctcactaacaaagtagacgggccgctgcacctttcggtggggccgatcctcttcgctaggggccgcatccctggggcactcttcgtccaagcagcctcgcggggcgcacttatcttctgtgctgatgacctcggggtcggaggataacaggggcagccttcccacagtagcttcggggccgtcctgggggtcgggggctcctggcgtcgtcggaaaagcgggcaaagggccaactccggtcgtcaggggccttaggcctccgttcggctcgggggcctcttctccctgctctttcccgggtcgggtcagcacagggttagcctcggggtcgaaaggcgataggtgcggccttcccacagtggcctcagggccttcctgggggtcgggggctcctagcatcgtctgacaagcgggcagagggccaactccggtcgtcgggggccttgggccaccgttcggctcgggagcctctcctccttgctctctcccgggccaagtcggcacagggtggggaagcgtgaaatgagagttgttctcatcgcgctccacaaccaatgccgcactaactacttgcggggtcgccgctaagtagagtaacaagggctcgtctggctccggggcgaccagaactgggggagagcttagatacgccttcaactgggtgagggcattttcggcttcctccgtccaggtaaacggtccggagcgtttgagaagcttaaataagggtaacgccttctctcccagcctcgatatgaaccgacttagggcggccatgcaaccggtgacgcattgcacatccctaagtttgctgggggggcgcatccgctctatagcccgtatcttctcagggttggcctcaatgcctcgggcagagaccaagaaccctagaagcttgcccgcaggtacaccgaacacacacttatcggggtttagttttatgcgggcggagcggagactctcaaaagtttccgctagatctgagagtaacatttcctggttgcgcgtctttacaaccaagtcatcgacataagcctcaacattacgtcctaattggttacccaaagaaattcgagtagtacgttgaaaagtaggacctgcattctttaacccgaagggcattgtcgtataacaataggttcctatgggggtaatgaacgcagttttttcctcatcctccctagccatgcgaatctgatggtaaccagagtatgcatctagaaaacacaaaaggtcgcaccccgcagtggagtcgacaatctgatctatgcgaggcagggggtaaggatccttaggacatgccttgttaaggtcggtgtagtcgatgcacatccgaagcttgctgttcgccttgggaacgaccaccgggttcgccagccactccggatggatgacctcacggatgaatccggcttccagaagtcgcgccacctcctcgcggatgaaggcttgacgtcccggggcctgccgccgcactttctgccggaccggccttgcgcccggccgcacggcgagacggtgctcaatcacctccctggggaccccgggcatatccgccggtctccatgtgaagacgtcagcgtttgcccgcaggaaggagacgagcgcgtcttcctatttgccgtccagaagaccaccgatccgtgtggtcttggacgggccgtcgcccagggcaacctccttgaccgggacctcgtcgcctatgatcatccgttgcctcggggtggcgggggcggaagcgccaagcctctcgtcgccaccctcgggcttggatgcagcggcgaggtggtccgcgcgctgctccagacaagcgagcgcgactttgaggtcgccatggacagagatggggccaccggggcccggcatcttcatctgtaggtaggcgtagtggaccgccgccatgaacttcaccaacgcgggcctccccaggaccgcgttgtagggcagactgaggtccgccacatcgaagttcacccgctccgtgcggaagttggcggatccaccgaaggtgaccggtaggtcgatgtgacctaacggccacgtgtgccccggcgtcacaccgataattggctgggacggccggagcaccatccccggggccttgatggcgtcaaaggccgcaggggaaaggatgttgagggccgctcccccatcaatgaggacacgccccaacttcacgttgcaaacggtgggagaaaccaccatcgcaatctgccctccccaggcaacgcacggtgggtggtcggtttggtcgaaggtgagggcaacctccgaccaccgcgcccgacacgtcgcctcatgagtaggggccgcggccagaagctctcgcttcatggccttgaagctccggcgagaaacgtgagcacacgctcccccatcgacggtggcaatggtggccccaggctcttggaaacctaggtcatcatcgccgtcatcgatgtcctcggcgggggccttctgcttggcctcacttcgccgattaccggaaggaaccaccggggatttgccctctcggcgctcctgcctcctctcctcctcccacttcctcgtccactcagccaaacttttgactgcacggtagtccgcgaggtcgtgaagggaagtgttgtggacggtgcaccacttgccggttgggcgctccctgttgggagcgctggcctcgttctttttgcctcccgcaggcctcccctttcgggtggcccgcgaagcgccctcgacggcgaggacatgaccctcgtcgtcggtatgggctgacctcttcttcctcctcctgtcacgccgccctatctgagcggcggatccgggggcggccgaagctgccacaccggaaccggaggggttccaggtccatgcctcctccttacgagccactcggtccgcgagctgaaaaagctccgcggtagtctggggctccttggaggcgatcttttcaagcatgcggttgtgccgcacaccccccctgaacgcgtaaatcaccgcgtgcgcagggatgcatggtatggtgttgcggacttgacagaaccgctgaatgtacgagcgaagtgactcatcatcccttcgctgtactacgtgcaagtccgcttcctcacctgggcgcggatatgtgccttggaagttcatggtgaactgttggcacaaatcctcccaagagtggacagacgcgggtggcaagttcattagccaaccccgcgcttgtcctttcagggccatgggaaagaaattcgccatgaccctgtcgtcacccccggcggcctcgatcccggtcgtgtagacctagagaaactcggcggggttgacgctcccgtcatatttttcggcgatggtgggccggaaccttgggggccaacggacatttcgaaggctcgccacaaaggctctacagccgacaccaccaaccgggggcacggagggctgatccccgcgtccgtggtgaggtgacactccggacgaggaggcgccctccgttgcgtggggagcacgtcggccattacgccggcgctcgatactgatgcgagcatccggttccccacgcagatcttcccgggtcggaggcgttgatgaaggagtggcggccgaatggcgaacagcggctgccgctcgccgcgccctccgtcttgacgatgcggagccggtggtagcagcaccagaggccttggtagcggaggaccgcccaccagcatctaggcgctgccgtgcagtcatgaccaatttggccacatcgtccagccaacgttgggctggagactccgggtcatgggcgacgggcgggtgacgtaggagcgcgcccgcagcttggagcgcgccctggggcgtgctgccgtcgccgtagacgaggaggcgacgctccccatctcgccgcccttctccacctcctgtgggtgtcgaagtcgcggatccttcggccctctcgagcgccttctcccgcctaggactttggcgtggagggggcggtggagtacgagctcgacggcgtgggtttggctccccgtcgtcaccgctcatactcggggagaggtcgtgcgcctttgctggctcggccattgggctgaacaggaaaagcttggcgcacacgaaagagtgcgagagctcagaaaatccctcgcagagccccctacctggcgcgccagatgacggagcgtggggctcctcaccgggagaccgcgcaggcccccctttgccggttcggccggggactcagggagagattctaagctctctgtatgtggaaggctcgcgagacaggaaacacacaagacacgggcgatgtatacaggttcgggccgctgagaagcgtaataccctactcctgtgttttgggagatctgtgtatgaaggagctacaaagtctcagccagcctctcccttgttctgggtttctaatctggaaa

SEQ ID NO: 23833 - DNA, 21100 bp, Oryza sativa
actagagttgtggagctggatttaggcagctccataactccactccagacctaactcctggagctaaatttaggagttggagctgtactaaacaggcccttggttaattgttttgacggggaaatggggacccccattcccatttcgtcgatagtgtggtccatggtatactcgctggtctcggccacctaggccttcgcgtagctcgtgtgcacgaaataggcctccgccgccactacctctgatgctgattctcctgcctcaactaacaccgtcacgttgcgctgctcatacatgccaaggtgagtgccctgcaaatgcaattccaaatcaatgcatctagccatgtaggtggccatcgaggaatatatgtatatgcatatgtaccttgagggcatcgaggtcgacctggacgcagggtgacactacgcagagctcgccgatgacgagatggtcgtcggaggatgaactccttggaaggatggggaggaggaagggtacaaagtaggtccccacgacaagcaaggctggggcggcggtggaggtggcgctagccaagggggaaccggaggaggtgaggagagggtgattggggaaaccgcgcttcaggctaccgtctcctccccctccattgctgcattaattttagccacactttggctcctcggtcctcacaaatatgctcacaaatatgatgtgacagtaatatgaatatggacacatgtatgtccagattcgtagtactcagtattaggttggtttatatgggacggagagagtacatcgcagagctatatagaaattattgccatgtcaaaaatacatcatcaaatatggcaacaaaataaataagccattaataacaatatgttaactagtaatatgttcgtgctaaatgctacggtgcaattctttttgtctttaataacctttaaattttcatgttaggaaaaaatatttttctatgatacgtgcaattgagttttatttcaattcatatcatacatcaaatatgtttcacgcaaagtacaataatatgatcctgcatgggtatcaccggcacacatacatcaccacacatgcaacaccatactcaccccacggatgtttcacctaacacacgctagaaccagccatacattcctaatctcactaaattcctattgaaaacctaattgcatagacgtaatatttgtggactttttttttctttaatgacttcaaactaggaattttgcaagaaaacgcacaatttaaattgatatgttttttctatgtccatccaagtaggaagctattttccaccctgatttatgtagaaatttatagtgaaaagatatataatacttccttggttttatattataagtttagatttttttttcatagctaaactttttttattttgacccgtttataaagaaaattttagcatctataatgtcaaattagtttcattaaatatgataatgataatgtgtctattttgtattaaaaatattattatatattttttataaatttgaaaaaaaataattaagaaaaagttaaaacgagttactataatatatataagagagagagaggagatcggccggaaccggaagggagaggggagtagacagacggggacagatcagagtcaggcatggccatggctgccgccggcgacgaggcggagatggtcgaggtgacgctgcgcgccgtcggcccgtcccgtcccaccacccttcgcctccctccgtttatctcggtaacaaaccacccgacccacccctaattcagaaatccttcctccttactgctccccggcccctccccgcccctaggttgccgatctgcgccgccacatcgctcacgaccgacatctcccacaagaccgcctccgcctggtcctgcgaggaaggaatctcccgtgccaagacgacgcccatgtcaacctccgccacgggggtatagtatactagtattctttttctttctcttcacatacatcttatgtggaagacaggactattctaggatggatggttaattcgttgtctcttcaagaccctactttttttcttcttcttctgcacttgatacatcttgtggaatacagttaaatacttccttccttctgcaatttctttagatagtcttatagtggccgtggcacctaagccacctgctaatcatctccgtgacggtgatggtgacgatgacgatgatgaagaggaagagctggtatatttctatcatagtatgtcatatagcttttatattttgaggatgtttatgttttcctcataagaattatctctcccatcctgtagaagttcaaaataccagaaacaaccacctggtggaagagaaaattttttatatttcttcgagacaaattgagattacctggtaatttagctttagattatgcacctctattttctgattacatgatagcgttgattaatgtggtgtgcattttgcttctccagatatcttgttgatggtgctattttctctgggtatcaaagcatgggttcttatcgctatgtggttcctttttgcacctattgctcaaatgtacgacgttggacctttatttgtaagtaactttgggaatacaacttctccagcaatgtccatatgaacccactgttctcttgtctccactactcatttttctcatagagatatgtgtgaaaaaaatggtgtggtttaaagaagtatcaaattaataatgtccgatcagcataactactgtctcatcatgttctctcttactctacctaaacgagtccttgacattttgaattcgaatgtaccacacgctgatactcatctagtaacttataccacaacactcatctacttgggtttttctatgacatattctgagactcgtgtatttagaaggaataacagactgttttgcattactacttgcatcatgatagcattattatattgcacatcattttttacctatttgggtgactagggtggtggagagcatcagctcagagcctaagagaactgtattgtactgaggacatgtccttgccctacaaaaggcaatggcctatggccaacttgtccatcctatgaagaaaatgagaggatggagatagtcggtacagagagaagctttggacaggacagagtagaaccatttacactttgcatgcacttctttttttcctgtgattatgtccaatcaaggggaaatgaattgagaaggaaacattgcacacaactcaaaacaaaatgagcagtgtgctcatcatgacactgaggtacatattgaactcaaagcatacacagaaatggtaactgaagaattggacatatcagtttctagctagctacagccaggggaatactttgggcctcgcagggagcccaggaatcagtagtctctagatcactccatgtggttttatcttacatgtataagtcttcaatttatacaaccatacaaatcttgtatccctatcccattcttcatttctttggtctagtttataggtttttctggaattgtgatgctaatgctagtttgtctgtagaaattttgatgaccaaactaattttagctaattgaatttgttgctagattcagtttactgataaacgccactatattatccagatacttggtacaggcttcttggtcattctttgtaatcttggaagacgacagcaaggtgatgtcaggtatgttatctcatctcttcaatctacattgcttgtgttgtctagagtgaaaacttggttttgttccaaacaaacaaacattgttaacattgtgttcttctatgccatagtacaacttatctttattctcttagaaatctactttacgtcatatgaaatggtaagataattaccaactgattgcttgtctttgatttcaatggttggtgaatgtttcccatctagaatatgctccgttctataagatgtatgtcttgattccctgtgtcatacaatacatagtccattgtgtcgtaggatgcttagttttacagcacaagtgctctgagggtgttagaagtgtagtgattgtgtaactgatgtaatagtttcacgtaactctgtatatcataatgttatttgtcaaactttttggcttctaaggggaagaataacaataattcaattattatatatactgggatgtcatgttgattaacaaactggtgtttatctagtaagaacctggagagcaaaattggcatggacacgaagttgctcactttttgcccctgttgacgttaaatttgttatacttacacgcagtgcatactccatatttaatgaagacttccgggagctaccaggaacgcttaacgcggagcgcatcgatagagacattcgggcaggccaattttgagcccgaaatctgatttactgggacgatgggcttaatgggatttgtacagaaggatagtgactcttctttggttctgatcctttgtacctggaaagacttttgaaagaggcccttagcagtgtgaatttacatgtgtacttcacagatggccagcattaaggttgaatggttgagatgcaatatgagtgaggtttgaaaggagggatgcacacatacatttactaatagatcagataaatcaaaccgagtcaatagaagcgcacgtatgtatgtcatgtaggagtataggtgagatttcaatctacatcaggaattcatgaagtaaatgtatattacccatcatgcgttaacataaatatcagatattcagatcccgctgtatgtacatttgccttgcatgataaatctgcagcaatcaaatgtggctcagcactatagcctgaaattcagggaatcgccatataatatctagagtacgtactaccactatcttaagcttcttaagagcaaatagtatttgtgaaattcagaagccgttggagttttctctgattgaacacctcgacttcaacgatgaaggtggagctgacaggtcgatgatctgagaggttcaaacctgagctccaatatgatagttgcttgataccctttcccagccatagtatgcgatcacacctgattcagttaggaggtacgtaccaaatgaggatcttaaaagaaaaagaaagccggagacaaatgacagaattgactatagaagttcagaaacaaagcatatcactgtctgatcagtacaactgacggtatatatttaggtctacaaggaaacatgaatgaacaatttaatgacagaaacatgcacttatgtggttaaaaagagtatgttcagagatttcaccatgctggagatcttttattccccacttcgtcaggtttctccccaacatatttacttgaatttgtttcatacttgtaagtaggcggaaagttgatcaacccctccttccaaccagcaaaagtattcccattggtcaactcctttgttagctaaaatatgtgccaaaaagaatttataattaattttcagaaaacaggaaaagaaacatccccagctttagggtcacataatactccatccgtttcatattataagtcgtttgatctttttcctagttaaactttgttaagtttgatcaaaattatagaaaaatttaacatctaaaatataaaattagtttcattaaatctaacattgaatatattttgattatatgtttgttttgtgttgaaaataatagtacattttttataaatttggtcaaacttaaaaaagtttgactagaaaatagtcaaacgacttataatatgaaacggagggagtagtgtctaatcacgaagcagtagaaatcattatcaaacctgatcagacacgacttataatatgaaacggagggagtagtgtctaatcacgaagcagtaggagggagtagtgtctaatcacgaagcagtagaaatcattgtcaaacctgatcagacttcaagagatcatcccatctcttcatagatactaaatctcgaatttcagcatccggcatgtcaatacgataattaagatctccaaaccaaaatatttgactgctcgaaaattgaaattctgatcaaccatcaaaactgaaagcatatccatcacagtagatgtaaagtgcaatgcaacattgtcaaaccgcctagtgccttgatgggtaacagccttcaacaggaattgggaataaactgtactgtttgcagaacttaaatgtagcattaagaaaagcataataggtgacacactcattttggaagcggtgttgatggtctgcctgaactagttacgcaaaattgcagccatatgctttacaaagattgccctacatgtagttacattttttatgacagaagaaaaagggaaaaacaaaatttagattcctagattctaggagagaaaaaacaaagcatgttatgcctctaagccatcaatatcaaaggaactataattattccttttattgaatcagtgttgtttccatataaatttctttgttggttgggataaccagcactgaagacataaatttagtacaaaggggacaatggattggatgttcaaattttcacccttgcatgcaacatagcaatgcatgctcaatcagtttgctaaaaggtaaatgtaaagagtgaagtgtatatacatactcatgtgaaggaatcttttgtgggtgaccagcagcaaacaaggaaaaaaatcttgttctttgtaaaatctcatccacatcagagttccttttctgttgatccccacatttatggccagacgcaagatgtgagcagacaaagcacatccgagtttggaaaagagacatgctaatggaaatcgatccctgcactaagcaaaattgagatggccaaataaagttaaacatcttgattcaacagttacaccaacatactgtagagatcgacaatcaacagagggaaggatgaccttgtttcccatgtagcccagaagtccaaccccaactgaagctacctccaagttgttaacgtgttgcctcagcttacgggaaacccatacagaaacatatataccaaccatctgtttactaacaacgcgcacgtaatttccaggaggctttaaggattctccttttgcaaaagttgccctttcatcaggaccaacaacagaagttgtgtcatctgatgtccaatcagacatataatcaaccgaactaagaacatctaccttctcttgctgttctgaccatgacatgccaagattcccagagctacgatatgatcgtcttatcccatcttgcaatgctacaccatgtagatcaaatccttgagcgttctccaaatagtcggtgttaaatagccccatgctcattactctcctcaaccctctatttgataccgatatttttgctggaatgtctagtgggcattctggccagtccaatgaactagttccatccaaccagtcacagctgcacttacttatacttgtttgcttatctctacactgttgctgaggagataaattttctgtcattttatcatattcacgttttgtatcatcatgtccatcgtcagaaggaataggtactcgcaatggtgatagtggagcactgtagcttttacaattcgccttgggttgttgagacttattgagagcacggcggataataccctcccatttaggtactgttctactatcttctgctcccaagacattcccaacgcttaatgggaccacttcctggaaactgaaacaagtgaaagactttaaataggatcacagtaattagccatacatgcttgtctagtttggccaaacaagcacaagctccatctcaggattctaacgatatgccaattagatgtcagcagtcaagtatacaagaaaagattgaatgttgtgatcaatttatccaaatcataaagtacgattacatagtttcaaggtacgcaccctaaaatatacatgtcagctggctcttgggaacaaatccactgatctaggtcaagatcttcactaggggctcttccagcaacgttccatgttcctatcatcaccctggtggtaaccactattataaaatcgccagatgcatgacatggaatgcactgaggattaaagatgaactcatataaaccaaacctcatatctttgttacttatgtagttaacacgcaaactttctgatttccttctctgtagtcttcgcagaggcattattttatcccctaacaaaaggggttggcaacttgaaatcaagcagataaaaaagtctcacgaatttcaactgcagaagtatttattcactacacaataaacataaacttgcactgacaatagaaaaatctaccaactgtaccctgaatggtcagtagttgaatacttctggtcctaaaggctaaaccatagttaaaaagaaagttatcaagaaatgtgcataaactaatatatgcacgtgataatagttctattgtttgctatactgtcaagtgtcaattagacaaatagttaaggggatgccatctggggttgccacttgccagtatacaagatgccacacaatactcatgttctattatttagtaatctatatgaaatattcaaaaactatttctatgaccatagtaatggtcaatgtattcaatatcaagatgtggaagcaagtgactaactgcacagtggttgttctctctgtcctgttttcaatatttgcaaccaatttttttaaagagaaagttgaccacaagaaatactatggtgtgtgtgttaaccatatgaaaaataaattgatggatttctgattagaagtcctaccaccatgttataattttctagtataatactatgtcatggtcaagattccgtcgatattgtgagaactcaaaaaaaaataccagccaattattcattccaaattttatttatggaaactctgtgacttgaaaggaaattatcttccacatctaaaaagagtaatagatggttgttctgctatgattaggagcagtgatcatgatttattcaaagtgattagtgagaaaataaaatttgtaatccacaagcactgggtttcaactgatgataatgaatacaactttagcaccaaaatgcatgacttagcatgattatgaaaaagtcaaagaggcgaggatacaatttcacaatacctgatgatctgttaatggtgtggttgttttcatgtatctcaaagaagttgtcgctagcatcctctgcgcagtcactgaaatctgagagaagacttgtaaattttgattccaaacagacatcaggagttcaaacaaagaaatataaaaatcaatgctcctgcaatttaccataccctcatctcctccatctgtatcaaactcatcttcactgaaatcatttaattttggcttaatgtttagccatttcttcatcacaattaaaggccaaaatgactgtattgtacatcagtcagattagataactcatggtataaagaataatggcaaaaagctaacacaatatatacaaaatatgcacatgaggttctgatttctgcaaaccttctccgactgctttcctctttgggatcccatgatctgcaacgctatgaggcaggcaatgaacacagctccaaatatatctccagttcttaacttcatcagaaggcaaacttatatagttatatgttccaactacccaaccaaaggaagagagataaatgaaggaaagatgcaggtagttaaggtggaagtcaaaaacataacaatcaaaattcaaaaaggtcatttccactgcattgcagaaatcagagaaactaacagagggacaaagtttatagtaagttcaccattacctgttgtccatctccatcaaagtacagaataattttgaagcattaaaatccataccagatacttctattgctgatcatgtggtaatggagaatatgaaagtagacatcaatttttattaaaaacaacaagtccttttccagaagaagatgcaaaaaaataactggtggacaagatcaaatgcttgtcctgcacttgcatgaattataaccaagtgcacacggtctaacaagacattacctaagtgataaggaccagcactcgcactggcacactgttggaaagagatggaagtgtgcacatatggatggatcatgctggattagaatgtaaaatacaagccattactcgttattacgggcacttattcatgaaaaggttttatttacgtagagacaaagaatttgtcgatatggcactgtgtgtggtccttgggttcatccactttactttgtgagataaaagatgacaaaatttggttggtaagcaatcaataggagatctcaagtaactgttcagagcagcaagagtagcaaaatggggaaggatgcctgatagatatgtggctgagaaagagctgaaccagattgaaataataattatgcaatggagacgaagatgatggaacacatagaagcaaaaggtttttgaaatgggaagttgtatcttcaacttgccagtaagatgtattattctcaagcatttggaggaaacggacacatcaaaagtggcaagtatacctctaacatttttcttaaaacaattatgttttcacattcctgactgtgacttgcaattactgttttccataaggttgggtagaaaactgtcaaacgtaagcatatgcattcctgaaaacaagatagcacccatagcagacaaaagtatgatgatcaagattaataattttaaaagtagtgaatttatcataaaaatgattgtggttttattttgttattatacatgaaagattaaatatgaagatgaaatgtgaaatggattctgtcatctataatagcacatttcctacatggatgaccaactatcctttagaaaagataacttactatatgcaggggttaagtttctcactgtatcacacaagcaagctgagagaacattatatcaagatatgttctccattacagcactccaagatcagaacgaatcaatttcccaaaaaaaaagatattaaagtgtgcatactgctgtactttctatgaccaacctaaataatttatatatttcaataaatatttatcgcttaaataagtggaaatcaagcacttcatgggaaaattcgtactaaatactaaggacagttgcaaagaagtgtgctggccaaaatacgataggtgaaaactgaaatgtttgcagcagtgggaccagattctaatcccatttcttggtttcttctttgatctgtatcatcatcaatcagttctccctggcacaataccttgtcaatcagctaaaaactgcacatgtgcagctgacacattccatgcatcccactggctaaggatcttataatcaagaataggaaaatgctacttctgtaattccaaccacacttgcatacagctagttgatcttaacataagaaactggggacattgttgtcactgtgctaccagtagtccaggcaagaacaagaaccacttttgaagtggtggaaacggttacgatctctaacaactatcactcgatcatagacctcggaaactaccttcatgacagagtgacaatcctcgcagattctcaagtttttcactattcggataacagcccctctcctcgtgtttatcagtccaaaggcaactgccagcttctcactgtgctgcgagatacaaacttctttgtcctcctcatcaatgtcaaaggtaactagtttagtggcaggcttgtgccctttgaggctcaaggttttgcctatctcatcaagcattgcatatatctgatcagactgaggatgtgaatgatccccagacaagaactcgtaaacaacaccatcaagttcgacaacactcgatcctggaggcttgtgtatcctgtgttgtttcatcgagctcctgacctcttgtacaaggtcccatttcccagcagccgcatatacatttgataagaacacccaggccccggcatgctggggatccaacctgagaatttccatcgcaaccatctgccccatctcaaaattcctgtgacatctacaagccaccaagagagcaccccatagggcaacgtcagccttgaacgggacggccctaataagagccaatgcctcctctagcaggcctgctcggccaagcagatcgacggtgcaaccatagtgctctatggtgggttgcagatgatagtcgagaggcatacggcgcaggatcctcttgccctcgtccaccatgccagcatgcgtacatgcgctgagaacggcggtgagggttacggaatctggctgtatgttgtggtccttcatgtgtgtgaacaaatggagtgcatcggtggagaagccgttgagggcgaggccagcgatcatgacggtccaggtgtggacgtccttgtggcgagtgggagtggagtggaagagggagcatgcggtttggacgtcgccgcacctcatgtacatgttgaggagcgcggtggcaagatttgttgtgatggggaagctgcaggtggttgcgaggtaggcgtgcgcccagcgggcggtgtggagcgccccgaggtgggcgcatgcggataggagggcgagcagggtgacgtggtcggcagtgcgcatcgtgcggaagaggcggagcacctggacgtagtgggcgcgggaaaggtaggcgtgaaggagcgagttccaaagggggaggtccctgtggtataggggggctgaggtcgaacacctggcgtgcagcgggcaagtcccccgcggcggcgtacaaggagaggagggatgccctgatgaacggtcgggagactcgaggccgcggcggaagagggaggcgtggagggcaacccccgcagcagctgcagctgcagctgaggaggaatcggaatcggcaaggcgcgcccagccggcaagaagtggtgggtaggtgtagttgttggggtggaagcgggagtgggagagcatgaagcggtagagcaaaatggcaaggtgggggcggggcccgcgggcgagggcgcgaatggcggagttgtaggaaaaagtggtggggtgggcgcggaggatggagagtgcgtaggggagggaggcgagggaggcggcggcagcgagggggcccgccgcggaggggtcggcgaagagggcgccggaacggaggaggtgggcgtggagggcctttggacacgtggcggtggcgggcatggtaatggtggtcgtcttcctcttcctcttcctcctcgccggcggccggaccggagcgcggctgtcactgtcactctcaggccctgtttggctaattgatatggaaatgatttccacccactaaaagacatctttaaatcttaaccatttattctccctcttttatttaatcctaacccttcattcatttcctaatcttaatcccacccctcatttcccgttatccaacattatccaaacacactctcaggggaagagacgagaagagcggctctctctctctcgtgggcctctcggcccaagatctcaagggacagacggagaaagagggagctgggcaagtgggccccggagggcagtgaccagaccacaggcggcgtggaattcaaaggtgagtcgtctcgtcgtaagccatgcgcgtggtttctttcttcttccttaaacctgaatcaatctttctttctttctttctttcttgtctactagtcttctactggagtaggttctacgagacacaaattagacaggagagatcgagtttgaaggcaggaaggcaggcgatggcgagcatggagggtctgatcggcctgatgaaccgcatccagcgagcctgcaccgccctcggagaccacggaggtggagaaggagccaacctccctaccctctgggagtctctccccaccatcgccgtcgtcggaggccaggtcatttgcttccttccttccttgcttcaattaaatggattttttcttttctctttaaccttattattatttttattattatactcctatgattaatgatgcatggattggatgctgatttctagactttgtaattcatttcattttggcttgtgcacaaacagagttcgggcaagtcctccgtgctagagagcattgttggcagagatttccttccccgtggttctggtaattataataacctcattcaccccagtttccctttcaacactatcttacctcccctcatctatcatctaatctaggaatcgtgacacggaggccattagttcttcagctgcatcagatcgacaaaggggcccacgattatgcagagttcttacacttgcccaaaacaaggttttcagattttggtgcgaacttgaaatcaatccttccccgttaatttctttatacagctttgcaatattgtaatgtaaacctcacatctctgtatcctgctgtttcttgcaaataatgctttagttcaagtgtctgtcctattgcactattctgtttccactgctttatttctgatttaaaatagcactgccaaacttatatatcaacatctttctaaaacaaaaggaaaacttatacttaacagcaccacttatttttctctactgtggtgtagctcttgttcgtcaagaaattgcagatgagacagatagagtgactgggaaaactaaacaaatatcccctgtgccaatacatctcagcatctactcacccaacggtaacctcttcctgttgcaaatgtgcaacctatgttgtaatcccctcccagaaatgtatctccatcttgcaaattgaattgaactattctctggaccacccgagccctgcgattgtgtttcactggtggaactctgttaaccctgtaacataaactttttgaaatgtatgggatcttcacgaagaaagaaagttttaggtgggccagtttgcggcctttcatataatcttcaaaagatactctatgagtatatctggacattaagatgctttgaatgatataccatgcatgcaatagttttgtgattatccaagtttgtagctttctacagtttatccagattctctcatactatataggattttgaatcattgtcaaagactcctcaatttaaactaggatttttaatgtctgcttcacatatttctctcatactatacattgattggctaatagtagtttactcccatatgttgcagtcgtgaacttaacattgattgatcttcctggattgacaaaagtcgctgtaggtatgcactattatgtccttttttaatcaaagatttaattctctctcttttgatactgtgtttagtttatcgtgcatcccccccccccaccttcctctaacttgttcaacttctaattcacagagggacaacctgaaagtgttgttcatgatatagagaatatggttcggtcgtatgttgagaaggtaatcaacaaacgaagtagcattttttttaataccatgtcttcagcattcttgtactagtagcaaattgatgacattaacttggctgctgttttggttgtttaattattcacacccaaataactttaggtgttatattgtttaattaatttctggtgttcaaatttgagaacttatacaaggctaataggttactttgtatgatattttgcagcccaattgtatcattttggctatatctccagcaaaccaggacattgccacttctgatgccattaagctttcgaaggaggttgacccatcaggtactaaaattcagtgcacatagagggcaagagatagtgactcttttacttttattttctgcggagaactcatacaaataaagtaaagtatgttgctgtaaactttgatggtttgttatagctctacagctaagattgttatcttctacagaatgctgcagaatagtttgcttttatcatgatcctatctgactggatttaccatccatttttattttctggatgacaatttttctcttttacaaggtgagaggacattcggtgtgttgacaaagttggacttgatggacaagggaacaaacgctcttgatgtaagattgaacttgcctgccctgacaaacagtagtctgtctgcacattgtcagtttcagaatatctacatgcagcctttttttgttcttaatgttcatatcatacctctgacctgtcatttatctgtaaatttaaccttgttctatctggactacctcgactattttcatttcccccaaaggttcttgagggaagagcctatcgtcttcagtatccgtgggttggaattgtcaaccgctcacaagcagatattaacaggaaagttgatatgattgttgcaagagaaaaggaaagagagtattttgaaaatagtcctgattatgcacacctagccagtaagatgggttctgtgtatctagctaagcttctttctcaggtacctcaaacttgaaatttctcgtttctttgagttggtatatgagcaaggcttaggacttgcataattgctttataacattttcagcatcttgaagccgttattaaagcacgcattcctagcatcacatcattaatcaacaaaactatagatgaacttgaatcggagctggataccattgggaaagaagtggctgctgatccaggggtcagtcattcatatatattttgtactaaaagtagtttttgccgggtctgtactaaaagtagttacaggagtatttgtcttgttcaattttatattcaccgcttccataatgttgtgccaggctcaactgtacactatattggagctctgtcgtgcttttgaccgtgttttcaaggaacatctggacggagggtgggtaattaattatctgtcatcatcttaatggcttcttgtatctctcttctaattatgtaaagcgctttaggttcagttctaggttttcattttagaaatacttatcgttatcataatattttgacttgttgcataaatgttgcttatgaaccataggtagttgcatggcgtatcaacatcactcgtctcaggataatacatgctgaaagtgcacctgtttatgttgagttcccgggacttatattgtatcttccatgtgaacatgaaaagaatttacagaacatgcctatcttttcagaagatggaagtgcatacttcataatgtgtaaacggatttagtcaaaaaaaataatgtgtaaacagaatttataaagtgttcataagttttatacgacaccaatatacctagatttttttttaattagttgtcatttaatatgatgagatcttgtccaattacaatattataacgttcattttactcctttaactgtttgggtgcctaactgttgcaggagatcaggtggtgataaaatttatggcgtgtttgatcataagctccctgccgcttttaggaagctgccttttgatcgttatctatccgtgcaaaatgtgaagaaggtggtatcagaagcagatggctatcagcctcatcttattgctcctgaacaaggttaccgtcgtcttgttgaagccggccttgcgtatttcaagggaccagctgaagctacagtcgatgcggtagctgactttctatatatacatctgtgctgattgatttgttgtccgttagtttctttaatcagtggccaccaggccagtagagtaggcactttgtgctgtacgctttacttcctggagtatatatatgctagtagttatatttgatatgtgccaattaataatactctgatgttggtgttaggtgcgcatttgatgaggtgtcctagcttccaaacctttggaaggaataatgctatatatcccaatgtgtctgatctgccaaatatattatttttttcaggtccatgttgttttaagggacttggtgaggaaatccataggagagacagaggttaggaagaatgaatatatccatatttctttgtgttttggaaaatggtactttatatatgttttctcactaattgcagccactgagaagattccctaccctgcaagctgcgattgcaactgctgctaatgaagctctggaaaggtttcgggaggatggacgtagcactgcacttcggcttgttgacatggaggcatatttgacagtggaattcttccggaaactcccgcaagatccagatagtggcagcaaggttgggaataataccaatgaatccaatggctcaggctcaggctcagtgacagtggaccgctacggcgacgggcactacaggaatatcgcgtccaatgtgtcccagtacataaagatggtgggagaccaactgttacacaagatcccaaaggcggtggtgcactgtcaggtccgagaagccaagaggtctctgcttaaccatttctacgtgcacatcgggaagaaagaggtactaattaactagtagtagtagttaatctccttgtcatctagggtgaatgcatggaatgaaagtaatgagttttgtggttggagcaggcgagccagtttgggcatttactggatgaggacccagcgatgcttgagcgtaggcagcaatgctggaagaggttggagctgtacaaatcggctagggatgaaatcgactctgtcgcatggaccaggtagacacaaacatatacatggtggctagtatcttttgtcgcagctgcgtgtagtttggtttgggcagatctaacttccatttgtcaggcaggcactattttcccttggtatatagtatatactatactatcttacgaattgatggacgttatatatctgtatattttgtcagtagatcatccttcgtacatgtgcaccccgacccgtgccatgctggtttcaacagtttttcttttgttattctttctagtggttggcttctctctgttgtcacggtattacatatgttgtattattccctccgtttcacaatgtaagtcattctagcatttctcacattcatattgatgttaatgaatctagacatatatatatcaatataaatgtaggaaatgctagaataacttacattgtgaaacggtgggagtatatggtaagccataaatgcctcatgttgtgatgcatgccaaacagagtaggggaatgaatttaccgatgcatgctaactgtcctggtaatctatgtactcttaataagttttggatacgtcacgatttaactatattttttattataatatataggaaacaagtaaatatcaaattttaatacagtactttttacgactaatttatacatcatgctctagtgttttcaaactaaatattttaaacttattggtacttaaagtttaaattgcttgacctcaagtttgtccaaaatatcaagaattatagaaatgggggaagtgtctagattactcggcaaaacgatcgagatttttgggtaaatcaaacgcacctatatataagtttactaattagcaagagctggtattataagtcactaagcactttccaaacatgtcatataggctcatatgataagaaagagataagagaagaaagaggacgaggcaccctacatactactcacgtgtaatttactttaatatttacatactactgtatttgagtccttgtaatttttatatttacatttaagtccctataatcttgcaataagatacttgaggttgtttttgttaaaaaaataataaaagggagataacaaaggcagaaaagtgcataaaaagaaaaagaaaatccgcaaaaaaaaagaaagaaaaacaacaacaacaacaacaacaacaaaagtctgtttctcctaagtgacaaaaaaaaaacccgaagatccgaacggaaaaaaatcctattcttataaaaggcaaaaataaaatggtgaaaaaaaccgctagatttgatccctttaaaaaggggggaaaagaaaaaaatgcgattcctttaaaagtgaaaaaaataaaaaaaaacatttaaaaagttcgtccgattcctaagaaagtggtgaaaaaaaggttcgtaaaaaataagaagctggttcgtataaaataaaaaatgcacccgagaaaaaaatggaaagggcgaaacaatgttcgatttctaatcagtatatatctcttctctatctctaatctaatctaatctaactattttaaaatagaaaatgcacgagaaaataaaaactgttcaaaaaacgtgtgagaaaaaagcgcaaaaaacacgctaaaaaggttttccatcttccataaaacaaataaaaaacgcacgagaaaaaatatttccatcatcggtaaaaaaattataaaaaacatgcgaggaaaaaactgtcagaaaaaacacgccatttctaaaagaatggtttgaaaaaacaacgcaagaaaaaacaccgtctattaaaaaacaaatcgctctgaaaaaaatgtcagaaaaaacactaaattgatggacggttgagtcagataggatccattgattttttgtcatctactacatggcttttatttcgtcatatattatactcctgtattggaaaaaaaggcaaaaaagaacatttgaaaaaaacaagcaaaaaaacacgcgagaaaataattgttagaaaaaacaggcaaaaaacacacgagaaaataaaagcaaaaaaaggggagaaaaatatggttttcgtcgtcagtgaaaatagcaaaaaaaacatgctaggaaaaaaactgttagaaagaaatgcggcatttctgacaaatggtttaagaaaaccgcgcaagaaaaaaaaacaccgtttataaaaacaaaccgctcattaaaatacaaaaattgtcattaatatgattatacatgaaaaagtatattatgattagaatattttcacccattataatgcacgggtattttttcagtataatataaatataaaagcaagaagaggaaataataataaagggagcagtgtaggaggtagctagtagcttggtgcggtgccgagcgcgtagctcttgagaaggtcaccgcagatggggagtgggcgggtcttgaggaagccgagaggattggcgcggcggaccatggtggcgaggccggcgtcctgaacgagggtgaccggcgcgcggtcgcgacccacctccgtctcgtggcattcggggtccgggctgctgagcagcgccaccgcacacacctcctcggcgccgcggttgtccaccagctcgatgcggtagtgccccgccgcgtccgtcgtcccctccgccgatctttccaccgccccg

SEQ ID NO: 23834 - DNA, 8839 bp, Oryza sativa
aatcaatcaatctcgataaattaataaccgatcctgcttatatatatatagcagctatatatatatcgaatagttgaagcgatcgatcggctgggaatggaacgacggcccaattaatcaggtgatccatacattaatttgcattgcatgttatatatgactctattgttagttagttaagttgcttgcgttgttgaccaatcgaaagtactcctaatgaacttcccctacaattaattaaataataataatgcatgagagataatcaacatagtactagacatatatataatcaaatgcctcctctaaagactaaaatactaatcatataagtacaatcaatccggatggatgaggatacaagcaaaaagctagctgggactggtagtatacatggctctctcaggatcggaaaagaaaacaaataagctagcagctaggagtattaattaattaagccatgatgaggagggcggcgagtaggacggcagctgcggcggtggccttgagggaggtggcggcggaggagggcggcgaagggggagtagtggtggccacaggcgccggggcggaggaggaatctgcctgcacgacgtcgatctggatcttcatgttgccggtgccggtggtggtgcagtgaccggggaagccacagatgaagtagcgggtgccggtggaggtgagggggatgacgtcgttgccggtggtgtgggtggcgatggaggtggaggtggagcacgagtcgtaacccgccttgttcacctccaccacgtcgtgccgctgagcagagtacttgaacactgcaaccatccccatccattaccatatatatgtattcaccggcagcccagccaatcgatatatacgatacgattctgattgcatacctatctggtcgcctggatggaacctcttttgggcgacccagtttgtgtagttggtggtgagatcccatgcgccgcccggctcgcccacgttgtaggtcgccgccgacgccatgcccaccagcatcgccgccatgcccaccagcaccaccgctactcctcctatactacccatatatactctacctggaaggggcaaactaattaaagcagaggagctagttaagctaactactctgaatcaattgctgtatgctttaatttgtctgtgatcgatgatcgatgaaacaggcagcttttactggagtatatatataagcctcctttgcaaggtcggttggtcagcaggtaatactagtccacggttggtaggtactcctactaattattattgtctttttttcttatttttcatttttgctccttctttttcttcataaaaaaataaatacattatattatttgtgatggcacgtctatccgttcacactgctcatagctctagtccttaagtacgactcactcaatccatcagaccatttctaaatatatacgcatgcttgattaagtaagtatgaattattatatatttagaaaatagatttatttttttaaaaaaatctataaatatactccctctatttcaggttataagatgttttgactttggtcaaagtcaaactattttaaatttagctaagtttataaacaattataataatatttatattaccaaattaattttattaaattaataattaaatgtatttttataataaatttattttgggtcgaaaatattactatttttttctataaacttggttaaaattgaaacaatttgactttgaccaaagtcaaaaatatcttataacgtaaaatgatggagtatttctttttcttttatataaaatccaccgtttagcggttaagaaaacgtgataatagaaaaatgagaaggttgtagtatggagcgaaagtttagaactaaatcaattgggtcgcatgaacgattaattggaactgtcaactagcgtttgtattacgtccgtccgtgcatctacctaatacgagtatagtgcaatcccacttccactatacgcggaccatttcaattcgattgactttgtctcttaggttgctcgatcatttgcgagaaatttgataatatgtcatccattccaatgccgtgtacttttgcccttcgccacgtacacatgtcagatcttaggtcccgcccaacgccgttgccgctacgcccttccagttgatctatccactcaagatcgatccaagccaagcttgcccgcccctatctatgtgcctcgccgcctcggccacacctttgctgctgtcgtcaagaggaggagctggtaattaaactagcacctgttttcttttcaattaagtaataatataattttcaaatagtaattaagcttatttacacctgcttgcctgcttaattgcaaattatagtatattacatggtcagcatgtactgcaggtggccggtcgttgtacgcgtaaaagcgtaacaccgtgtttagatcctaatttttttttcaaacttttaactttttctatcacatcaaacttttctactcatataaacttctaactttttcgtcacatcgtttcaatttcaactaaaattgaaagcgtgaaataaacccaggctaagaagaattggaggaagaagaagaattctgcaggttgttggcctgctgcagtctcatcttaataatttccacacgatataattaatttatactagtaccacaagagagttccaaattggcggctcaagactactgcggctaactggtcatgtgacacgtatgttagctgccagttgactactctgctggcctgtggcgtattacgcaactaaactaatcagatcgatccattgatagatcatcattcaaattaattctgctgacgacaattcgatgtacactaaggctgcgttcgtttggagaacaaatgggggaatgtttgtttcgttttccgcgcgcacgtttcccaaactactaaacggtgcgtattttacaaaaaatttctatatgaaagttactttaaaaaatcatattaatctatttttaaagtttaaaatagttaatactcaattaatcatgcgctaatggcttacctcgttttccgtatcttcccaatcttctcaatctcctctccctcaaacacagcctaaggctgcgttctttcaggagagataggggagatttcactcgttttccgcacgcacgcttttcaaactactaaacggtgcgttttttgcaaaaattttctatagaaaagttgctttaaaaaatcacattaatccatttttgaagtttaaatagttaatattcaattaatcatgtactaatgactcacctcgttttgcgtatcttcccaatcttctctatctcattttcctccaacacagccttaagagcaggtacaatagcaggctataagccagctgcaaacatattttaaagagataaaagatgagagagaagggcaatgggctacagatttgtagccagctgtagcacggactccaagacgcagtgtatgtatgacaggtgggaacagatattaatagtgtagtatataactattgtatgaattggctattaagttggctataagtgaattggagctagtaattgtctatactattaaacttgctctaagggcagttccaacccatagtgtccataagcagtgtctatgatgccatgtcaataaaacatcacaatagaaactacactctataacccatggtttcttaaaattggtcattaaaaaatacatcatatctcttctctaccaatcatatttattcttcatctattatgaagacactattctcttccaatgcaaaacttgatagtgtctagtgtataggttctcatgttgaagctgtcttgcatgagacccaatttctttctctcttcactctttctcttagttaatatagtgtcacataagctaaaaatcttacatggcaatgtagttaatgccatagacaccgtcttaggtggggttgggactaccctaggcatatccatgcgtcaacttgctactagcatttacaggtttaggacctttgatttgttggtgacagaacccaaggcgcttggatcagccaccgggcatcgatcagttgatcatcaaattaaaatttcagttgattaaaactacgtactaactggtcgtaattatattaattactcctaactagtatactatatagttatattagcaaattaattaaggacagcaatcaggggtaaggacagtcaatcgtatcgatcgagtgtatatgcatacgtgcgtaaattaagctagcatgtatgtaggtaggtactgtagctatatactgtataagtgaagtagaagtatatgacatattatatagatagtggtagtacatgtatagagagagagagagagagacgatcgatatgattgattatgcggcggggcgttggtcatcgtcgtcgtcctccggcggctgcagcttctggggacgaggggcaggctcggaggaggcgccggcgacggtgaggtactcgagcgcggtgacgacgtcgctgatggcagggcgcatggtggcgtcctcctggaggcacatggcggcgatggcgagggcctggtagaggcccttggtggggtaggcgccgcggagcaaggggtcggccatgtcggcgaagagcttcttgtccttgaagcgcggggcggcccactggacgaggttctgctcatcgtgagggcgggccatgtcgatggcgcggcggccggtgatgatctcgaggaagacgacgccgaagctgtagacgtcggagcaggtggtgagcttgccggtgagagcgtactcgggggcgcagtagccgtaggtgcccatgacgcgggtggagacgtgggtcttgtcgccgacggggccgaccttggcgaggccgaagtcggagaggcgggcctggaaggaggagtcgaggaggatgttggaggccttgaagtcgcggtagatgacggggggacgagctgcgtcgtgcaggtgctcaaggccgcgggcggcgccctgcgcgatgcgcatccgagtggtccagtccagagccgcggcgccagggggcaggtcaagcaggtggtcctccagggagccgcgggccatgtactcgtacaccaggatgcggtggtcgccgtcggtgcagtaccccagcagcgtcaccaggtttgggtgctccgccagcaggctcagcatcagcacctccacaaggaactcccggttcccctgcatcccgttccggtccagctgcttcaccgccgcctccgtcaccgtccccttgatgctcagcctcccccggtacaccggcccgaaccctccctcccccagcagcgactccgccctgaacccgcccgtcgcctccgacagctcgccgtacgtgaacgcccgcgccgtcaccttccccttgccgatcttcaggatctcgtccgccacgcgcttgtgccggtaagtcactgtccattcatttatccatgaaaatatacaatgtttgtttctttgtttgttgtattccgaaaatgtaaatatatggagtagcttagctaactaactaggagtacatacgatacctgactctgccacgatctcgttcaccaggttcaccaggttgctgttgttgtccctgctgctcccgcccaggctccgctccgacgctaaattcttcttcttgctgctgctgctgctgttgctgcagccgctagaggaggtcgagggaggcgctccgtcgccatcgccgtccccgtcgcctcctctgtcctcggactggaagcagcagaagatgcccattatatttatggtgtgctgggccctccaccaacgccaacaggaacgaatcctggaaccagagggatgatcctccaactctgctcctcaaccagcatccggttccaaactgataaggcctagccagccagccaccaatctgatgatcgatgatcgataacaaagggatgtataattttaattgagattatcaaggatgatcgccggacggcgagcttgtaccgtacgtacaaactgccgacgagcgaggcgcgcgcgcgcgaatggaatggggaaatccgattgcttaataacctttctggcattgcccattggaatggatggggtaaattaattcgtccgttattagtttattattattatttgttccgatgaaaaaaacaaaaagcagaggtgctctgtttttttggatggctcctaatctgagccagaaacacaaccaaccgcatgccggccttggcctggcaacgccaactatattaagactgcctgcagttatctatcgatccatgtagtgtacgtagtagtattttatttatttatttattgggtaaatatatatatgtatatattgccagtgcccagtggcaggctgtgcatactgttgctgatgagtggagtagtagttaacttgacagccaatcgatggatataattgaggtttgtatgcaggaatataatggatggaattatacatggatgcatgtagagtaagagtagtagtagctgctaggtcccgacgtagccgaagccgacgatgaaggcggcggccgactggaggagcaggtagatgtagaagctgtcgcggccgtaggcgatgtcgtagagggcgcagtagagcaggcaggcccccaggaggatctcggcgacatggacgtcattattgaagaagcttgtgcggctggagctggtggtggtcttcctcccaggcctggtggtggtattagctggctgctggtgcttggggttggcgttgcctcgcttgtcggtgacgacccactcgttggcgcgggtggcctcgagcaggccgatgagcgtggccttggtccggtgcatggacatgacgttctcgaagaggatccagaagatgaggagatggcaggagcgcggggtgcaggcggcgttgaggagggtgatggcggcggggacgtagagggcgacgtacttggggaggcggacgtggtcggagccggcgaggacgcaggcggggatgacgacgcagtagaaggagaaggtgaggaggtgggcgacgagcttgcggaggaagaagaaatcgtagaggaggtggagcttcttccagggggacacgcgggcggtggggcctcgaggaaaatcttgcggaacaggttggcggggccgcacgaccaccggtgctgctggtaccggtacgcgcgcagcgtgctgggcagctcgttccgcaccccgacgtgccccacgtacacgaaccgccaccccctcaggctcgctcgcaccgccaggtccatgtcctccaccgtcgtccgctccttccaccgcccgcctcctccagggctcgcacccgccacacgcccccgtgccgttgaacccgaagaagccgtggcacgccgaccccacctcctgctccacgcggaagtggtagtccagcgacatctcctggatgcgggtcagaaggcactcgtccgcgttcacgaaccgccacctcgcctgcaccagcgccacccccgggtccgccaccagcaccggcactgtgcgcaggaggaagtcggcgtccggctggaagtctgcgtcgaagatggcaaccaactcacactccctcgcgtacgccttccgcagcccctcccgcatcgcccccgccttgtacccgctcctgttccgcctgttctcgtaccttatgctcacgcccttccccgcccatcgcccgcactctccctccaccatctcctgcaatccattatatatatgttctctaattaatttcctctttccaaattactagtatatactgtatgaaacacagacgtacgtacccttatggctggatctgtagagtcatccagcacctgaatcaccagcttgtcagatggccatgtcatcccacacgcggcaccgatagaaagccggtaaacctgcgcattgcaccgtacacccctgttttattaggccagatcgatttggtaaaaccaactcttcatatatatgcacattaatttcatgttctgttctggacaatatactagcactatataattactgtggaaattaacatatattatattaactagcgtagtggcccacgcagattgcgcggctagcattattatattttctgtcatataattacatatatgttttctcaatgtattattcaaatatattaaaatgaaaacattattttaaattttgtactacctttacaaaactactaatgtataatattcatgtataatattcatattgttttttatatacatgttagttattaattatttttaatattaaattttagttatttgtaaattatattcctatatggactttaggctcttctttcaatattatttatttttaattctgaatttttattatttctaattgtatttctatgtggactctaaactcatctttcaatattctttaatttttaatttcgaatttaagttacttctaaattgtattcttatattgactttagactcctcttcccatgtttttttaattttgaattttagttatttataaattatatttttatatgaactctaaactctaattttaattttattatgtttattctgaattttagttagttttaaattcttatatggactctatactctacttctaatattccttatttttaattccgaatgtctattatttcttaattgtatttctatatggactatatactctacttctaatattccttattttaattccgaatttctattatttcttaattgtatttctatatggactctatactctacttgtaatattccttatttttaattccgaatttctattgttctcaattgtatttctatatggactctagtcttctcttccaatatttcttattttttaattacgaatttcaactatttctaaattatatttg

SEQ ID NO: 23835 - DNA, 7198 bp, Oryza sativa
aataaatctagacatatatatatgtctagattcattaacacatatatgaatgtgagcaatgctaaaatgtcttataatatgaaacggatgaagtatatattttcatccctagagaggataatctcatttttcataagatagatcaaatatatattttcaagctgggaaagcatatattttcatgcacttcaagtttatattttttgataatctcattttctcaatacacaaacatgtaagttcaaatttaatttctataaattataacaaaaatatcaaataaaattgtggattcacatcaactgatttcagtttaatttattattttttacaactcgtagaagtcaaatttgatcttgcatatattgtaaagtgatatgtctcatattaatttatcttatcaattttttttaaaaaaatatgactatttagatggtaagagatgtctcctcgatggataaaaaacccatcttccttagatcttaaaatctactttctgcatgtgcttttgttagttagtgcatcatatgtgtctattcggtcgtttcgcacgagctagctagcgatctaggcactacaaaaattgatttttgcatgcttctaaaggtgcgtatcatggtgctttctctgtttcatgctacaacatgttttgatttatttatttgtcatctaggctcactagtgttcatataatatttttagatgggatacatccatataaatttggacacaaacacattaattcatatataaatatgttcaaaatctaaagtatatattataattaatgtgaaatagataaagtagttgtttagaaacgaagatcggtacggctgggaagcaataaaaccagaaaggaaacatgacagtagtgatgatgcgtgggccaggcgcaatcaatggagattttctgcaatactgctggtgcagtagcagtggctgacgtgtggacccggaaccatatgtcagtctctgctactacatcagcagtactgcagaggatgtgcatctaggcgcaatatatgtatatcatcgttaagtactagtttgtttcgagatgtaatgacgtgcactcctatagttgacatatatactgttgcagtgccatgcatatattataaatgcacttttcatactagctagctgatttgttttgcgtgtatatataattaatttcttactttacattagacgacgtggacaggcatgtagtggaagcacggagagcaagttcagcatgaacgcacccactgaccatgcatttgcgcgaactaacaatgtactacatgtgaagttcgttttttttttaaaaaaaaaagaagaagaggaagaagagaagaaatcaggcattttgcatgaggaatagaaaccacaggcgcggcagcgcgcagctgggggatcgccgccgcggccgaccgcaggccaagcttgattaattgtacgttctggttgctcgatcgcttaattaattagtatatatgtgtgttaattaattaatgttacacatatgcattgctgtttcccagcgtggtgtggtatgtacatatacaagtgtaggcggctaggcggtggcagtgagagatggtggatggatcgataggagtaaaagtgttgggtcgggaaaagccaagaaattaaagaggacgtatatacagtacagtacagtacagtatagcaagaggtagcacgcacagattactactgacctgtttctcattgaacatggggatctgcaccaggaccatggggctgttggccgcctccgggtcctgcagcagctggtcgttttcagcgccatcgtcgtcctgctccctcctgttgctgcggcggcggcggcggcgaatcagccacagggcggcgacgacgagcgccatgtagagtcgctcgaggaagagcatgatcgacatggcgacgcagacgtagacggccagctgcagcgtcggcaacaccaccccgcaccgcactgcccgccatgcccatgccaacccgccgctcatcatccggaccgacctgcctagcttgatcgatcttacttaaattaattaattgatcaacgtaccagccgatcgaatatatcgatatacaggagtacagtatatatgatcaattaatcgatatgatcgatcagttccccgggcgcccttcgacttggatttgaccgcccaggagctgatgacccgcctgttctatttctatacatatgagtatgtatgcaacattattaatttgggatcgatcgatatgatgtgtagtggccggcctagctctagcgctaagctagctgcgtgcacatatacatatcttgattgagcagctagctagcttggaattggtatatatagtgatatatatgatcgatccagagaggaaagctacagaaactgctagctactacttaattaattaaagttttcttaataaagggaaaagggtctcctcctttaatttgtgtgtgcatgtatatattggccggtcagcctggattcatgcatgtttttttctttaacaatacgcaaaccagccggggtcctcctcctcctgttttcaatacaaaataatgcgtattttttcttggcctgttttgctttatttgctggctgcctacgtggtatatatgggtacagcactagagccaggtcagggccggtgcatatgcggtgaggtctacacgtatctacgtacatacgtacacctttattgtcatatgtagcctaccattgccatacagctaggtgcctactcagaagacatgtttgagactgctgctacctactacgtccgtcctaaaatatagtaacttttggctaaaatttagacacatagttgtccagatttatagctaaaaatacttatattttggaaattcgtcctaaaatataataacttttgactataaatttagacacacagttgtccagattaatagctaaaaatgcttatattttaggatagagtgagtataattctcatgtaagcctcttcataattagtacacgcacgcatcgatcgtttccttcacattatatatatactctctcacaagtcagatccgttctccccccctaaaaaaaaggaacatgcatttgtttaattaatctctgtttaaatctagagttgaatttgccgttatactaaatacgggatacctcaaagatatgcacatacatcaaagaagtaacacttacaacttctacgagaagacaaatcccttaaacaagagatggctagcaacctcactctagccagcccgatccaaacagctagcaggttgagaaggtcgcagatccgatgcaactgatgacctcctcgcttggtgatgcggcggcaatgattgcggtggttgtggggaaggggagggaggatggatcgtgggaggggaaggaatgcaagggtcgaaggggccgagggacttactgcaagctaacttctccttgtttcatacattccaatttatttactgaattaccacgattcatgttgtgaaccgacaatgatactgtcatgtatctggtgggctgcatgggctgctggagaaatgggcttggcctagctcacatactgaaggtgcaagcaaccaagaagtataaataccaaccgtggcagtgagagaaggcattgatgaattagaacctgatggctgtggcctcttcttcctcctcttgatttctcctctaatcccctactctgtgtttctctgattccctttaccccctgcttctcttcccaatctctgctgctagttcttccaatttgtatccctgaacttgatatacagagttggagaggatatattgctcctgtgcttgtgttcaccagtgagattcatgtgggatcgtgacagatacaaatttattacggtagtcacccgagtcgcctaacaacccatgcccttcccctacaagggtgatgatggtacacgcgaccgatgtgcaggcatcatgccatcacttgtcactccttactaaatgcgaaattcgcttgtggacgagcacgttgcatcccgtcgtcattaataagttgttgtttccctcgagttacagatgtgcaggctcgatcatcccgtcgtcgcatatgctttcaatagttgtatatagctttgtatttgcacaactttaacctccctccatactaagaccctgtttggatccgaagggctatttaacagtcctttggaatcttgctatttaagagtattaaacgtagattactgacaaaacctattccataacttctaggctattttgcgagacgaatctaacgagatatattatcccatgatttgctacagtgatgctacagtaatcagccgctaattatggattaatatacatcattagattcgtctcgcaaaatagcctaagggttatgaaatcggttttgtcggtaatctacgtttaataatcctaaatagcaagattccggagggctatttaatagcccggaggatccaaacaagacctaaatgtctaggggcttgtatgtacttttttccaaataattggctcgatcatcccgtcgtcacatatgctttcaatagttgtatatagttttgtatttgcgcaactttaacctccctccatactaaatgtctaggggctcgtctgtacttttttccaaataattgaaatgtaaacataggagtagggtgtatttataaataaaaatatattaaatgtttgagggtttattggcaatattatttattagccggcacaaactgggtttcgtgcaaacatcgtcaaaagtcaacgacattatctataaaaaaacagcaaccgagaaagtgttatttgtgcgcctacatttaaataaaattacattatgcattattgtgaatataatataacttgctgagatttattcttatataaagtggctcaaagtatagccagacgatttaaagttctttcactattccactaagtaccgatctaacctttttcttgccatttgtctctctgtattgggcctggtattccatagcccaaaggctcacatgtggagacccacttagtggagcaacctaagcagcgactcgatcaagttggtcgatctctctccctcttcgcttgatccctttctctctccagtcttatcgcgtaacaccatccttccggtcctcagccgcctctttgatactccctccatccctaaatatttgacgccgttgacttttttaaacatgtgtgaccgttcgtcttattcaaaaaatttaagtaagtattaattctttctctatcatttgattcattgttaaatatacttttatgtatacatatagttttacatatttcacaaaagtttttgaataagacgaatggtcaaatatgtttaaaaaagtcaacggcgtatatcggttaaatatgaggaccgcctccgatattgttaaatattgttaaatatgagggagtatatcggttagattggtccacctccgaggaccgctaccatcaccacctaccggaatcaacacgtcaagttccctcgaattcggcctctctccgatatccgtcgctctcggcggcggcaggatcttgggccaatgtatctctgaagcatctaggccccctgtaggatcaaggaggccgactagaggggggtgaataggcggttttaaaacttaatggcacttaaacaaaactaacctaagttgctaggcaaggtgaggtgaaaggttaactaagcaactaagttaagttttgcaaacctaggtgatatgggctcaaatatgtctctatgaatgtaaattgcacaaatataaatgcaataaataaatgagacaagagacaaggaatttttcaccgaggttcggaaactcgccggtttcctaatccccgttgaggcgagcccaactccaccgctcaaccacgaagccaccgcacgcccccttcgtcaaggggtgggcaaggtgggagccggcccacggagaggactacccaagcctcgatcactagggtagttcttccttcactccgaaggtggtgaactccaaaccactcacaaacggcgccgggcctcctccacaatctcctcggagaggtcaccgggcaacacctccacaagccgtctagcaggcggcaacctccaagagtaacaagtctaggatgcttgccaaggatgatcaagtgccacactagctataacaatgaagcaatgcacttggattggcttaactcactctctaacacctcactagataaactaagtgtccaagggtgtgagagctcttgcaagggttcaagataatgcaatggagtgccaaaacctttcccttgttgctggggagtgggtatatataccccaaccaccaaaactagccgttggaaccgaaatccccaactccgtgctctgccggtcagaccgccgttgtgaggccggtcagaccggactactttgtaacagctagttttagccgttacagggcaatcattgagcccactcaacttggtcggtcttaccgtagtgtagtggccggtcagaccgtccacggctcggtcagaccgccgtcggctcggtctgaccggttgcggctctggcggctctgtatcgccaccaaaaaccagaccagtgcaatagactagtggggccggtcagaccggccttaccacgccggtcagaccggctaacaggcccggtcagaccggcctaatgcccatggttagaccgcaggtcacttttcagctcaaccgaccgttagtaaaacggcgatatctcttgactcgggtctcggaatttggcgttcttgtactctatggaaagcttattcaaagggccatccaacccatgaaaaaaccatgcaagaaacacaacttaagccaaggataaagggctcacactccaaaggatatccaccggacatacccacaagatgtcactcactcctattggacatgcccacttctttcttggtttaggacttgataaaaactcatcacacttggctagacaagcccaccaaatgcacctatatgcatatgaactaatatggcacaagatcatccacaagctcccgcttcatagacccctcttgaaagtacgacgactatctagcaaatccggtctacaccaaacaccaagaccgggaaaagactaagaaaatattcttagctacattatactttgccttgcgccatccatcttggggtcaagcttgagtcgagatcaacacttgtgaccatttgattcaaccatgtttata

SEQ ID NO: 23836 - DNA, 2467 bp, Oryza sativa
accttcggagtgaaggaagaactaccctgagtgatcaaggcttgggtagtcctctccgcaggccggctcccaccttgcccaccccttgacgaagggggcgtgcggtggcttcgtggttgagcggtggagttgggctcgcctcgacgggaagtaggaaaccgacgagtttccgaacctcagtgaaaaatctctcgtctccttgtctcatttacttgttgcatttacatttgtgcaatttacattcctacagacatactagagatcatatcaccttaggattgctaaactagacttagaaagtgtgatttactttcctagtgatagacttgagccactttcaccctaggattgcaaaacttaacttagttgcttagttagacttgttcctcaccaagcctaacaatttaggttagttttgattaggtgtcatttaattttaaatcgtctattcacccccctctaatcgatatctcgatcctacaatctcgcacaatgagaaggggatgactcatgaggggtggcctttgcttgctgacgaccaagaaagatcaagcaacagtgacgctcagatccagaagtccgtggaattcagggtcgatggtgtcctccatcttccttttttttttcgaacacgcaaaaaaattgcacgtcaatatattagcagaaaaagagtttttgttacccaaagcaatcagctagactggcttatgcctaaaaagggaggggggagttgaagctaggaactactacgacggttgtgtcctccatcttcccaatatcgtcttttaccaccccctccccccacccaaatggtaggcgtcactatcgcgtgtaccagacgccagcaactaagaggcaggagacggaagcagggaggcgcagcagggacgggtggtgattggtgaattgctggcgaaaccaaccgaggcaaggtcaatggacgatgccaatgtagtgtttgtactttgcagtgttatttcttttttttctttttattgcgctctacctctaccacattgaataaggtgatagaaagttcaagaacattgtgttttgttgtttttaccaattcgatcgagctatcccctcctacatagatggtacttacttgttttagtggatcaaagcatgtacaatagcatactataagctagctataaacaaatattgagaagataaaggagggaaaagaagagcagtaggctacatatttgtagccagctgcaacacggactccaaagcgcaatgtgtgtatgacacgtgagaccagatattaatagtgtagtatatgtttgtagataactattgtatgaattagctattaaattggtttagatgatttggacttagttgctctcaatcaattgacgtttgggggttttacttttcacatagggtgtgtttagataatagaaaatggggggtgtgatcgtgattaggaaataaataaaaggttaagattaactggacgaggaaaacgaatagttacggtttaaactttaaagatgtgttttggtgggtggaaaatcatttccctatccattagccaaaccctgtcggatcaattttttttaataaagttaagttatatagtgctttcaaggggtggtgctggcctggcccagaaagtccaacacgtggcagggaaagggtgtctctctccaccgccttggggccacgttttagaggaaggaagcccattgaagcacggcatctagtatcttgttgttggaagaaaagccctttctctctctctcattcttgtgtttcttctcgatcgatctctcgatttctctctgtgcaccagcatcagctatggtgtccgacgccagcaagaagaaggcggcgcagaagaaggccgccgccgctgccaagaggggtgacaaggccaaggccgccattactctctccgagcgcacctgcaccgccgtcctcacctcccatcccctctcccgcgacatccacgtaccactatttttctatttcttccatccccaccccccgcccctatctatttatctccccctaagtaactaattaatccatctttgtctcgcagatcgagtccctctccctcacattccacggccatgacctgcttcttgacaccgacctggagctcaactacggcaggtaatctttattatttttttcatcaatcaatcaatccatcatctgtaagtaagtactagtactatagagaccattcatctcgtctcttaggcgatatggtttgcttggcttaaacggctgtggaaagtcctgtctcctcaaagctataggatgccgggagcttcctatccctccacacatggacatctatcatctcacccatgagatcgaggcttccgacatgtctgcgctacaagctgtcatcagctgtgacgaacagagactccagctcgagaaggaggctgaaatcttggccgctcaagtatgtttattttacttcccttccttcttacca

SEQ ID NO: 23837 - DNA, 1962 bp, Oryza sativa
cctctgctgattgaattactaaggatgacggtggcggcgaagccctggaccgcgtttatgaacgcttagaagccatcgacgcatccaccgctgaaaagcgtgctgcagagattttgtttggcttgggttttaacaagcacatgcaggcaaagaaaacctgtgatttctctggcggttggcgcatgaggatcgctttggctagggcgctcttcatgaatccaactatccttttgcttgatgagcccaccaatcatctaggtgagtctcttgagttaccatcttccaaagccagtttaatcgtttgcaatgcatcgacaaccaattcacttagagtgggtgggatcaaattgcacctgtttgaactatacttcttttttccatcagatgatataaatattttttacattatggtcttaggcatcagcgctagttaatgtgcagcgtgatgaaacaacatgcaaatcagcattcatttgtttggcatgtaggctacatatttgatatttctactttatttgtttcatgtactggtgcatatgaaaaaaagtctgaagtgcctcatgtatattattgagtgaatatatgctgtgtgttaacttctagttgcatgtaaacagggaaagcattaccattaccattatggctttgtgttatgctacaagctagaagcaactacatgaaatcttgtgttgtctgctttccattaccatgaacctagattgtgactggtccatactactatatacatccgacaaatttgggtttgaattcctggatttattttgcatcgaacttcccagaaatgtgttaaactcattttaaaaaaaaatattgctggttttcattatgtgaaccatttattcatctgtcctgtctggcttaacaatgttgtttgcttaaccatatatatattcagtataactatggtttctgtgaattgtttgctgccacattgtttctgaataatgtttagcactaggctaccatgtgacttatattatttcagatttatcagagatatggatgctctgttcaggatagatcaaaagatctctgatgcatggttcctatgaagttttctggccctgaaatgtgcttttttcttgattaatattagcaatccattgccactgtttgcagatcttgaggcctgtgtctggctggaggaaaccttgaagaaatttgaccgtatacttgtcgtcatatcacactcccaggacttcctaaatggagtatgtacaaatatcatccacatgcaaaacaggaagctcaagctatacactggcaactatgaccagtatgtccaaacacgagccgagcttgaagaaaatcaaatgaaacaatacagatgggagcaggaccagattgcctcgatgaaggagtacattgcacggtttggtcacggatctgccaagctggcccgacaggctcaaagtaaagagaaaactcttgctaagatggagcgtggtgggctcacggagaaggttgtaagggataaggtattgacgttccgcttcactgatgttggcacgctaccacctccagtgctgcagtttgtggaggtcacatttgggtacacaccagacaacctgatctacaagaacctagattttggtgttgaccttgactcaagggtggcgctggttggtcctaatggggctgggaagagtacgctccttaaactcatgacaggtgatctcataccgctggacggcatggtgaggcgacacaaccatctcaggatcgcacaattccaccagcaccttgcagagaagctggacctggacatgtcagctctgcagtacatgatgaaggaatacccagggaacgaggaggagaggatgagggcagccatcggcaagtttgggttgtcagggaaggcacaggtaatgccaatgaggaacctgtcggacgggcagaggagcagagtgatatttgcatggttggcgtggagggagccac

SEQ ID NO: 23838 - DNA, 2576 bp, Oryza sativa
acggatgtttgtacctgatctccatcaactacatctgatgctatagcccatatggtaccactactgtgtttattatctatattcgtcttgttgcaagcttggtagtaactatatatacttgacgctcttgctgctcttccatttgcagcagatgtaccgtcctcttcttggggtctctggagaatgaggaaacagcaagatccagccagcatagcatgtatgtatagtgtaattagctggtttgttggcggtgcacatgcataagatatacttcctccgtttcatattataatactatctattattgcccacattcatatatatgtctagattcattagcatctatatgaatgtgggcaatgatagaaagtcttataatatgaaacggagggagtattatcttggtttgcacttgcatgatcacctgctgtagttattattatcagtgaccaagttcccctagctagcagtagcactccatgaaaagatatctacatgaaactgtaccacccccacgatattatatatgagattggattttaaactcttgaggggatgtctcatcgttgcttgtatgttaaattgagaagatgtattaacatgtgatatatcttattataagcattcaacttaaaatttaacttctacatgtcgcaacgaaaaaacaaatttgactgtgaatatatgttaactagttgtagacatgtagtagtttaatttgtttttttcgatatgtaggagttggattttaaattgcatgttaatttgtttttttcgatatgtaggagttggattttaagttgcatgtttgtgaagtaatacatcacacattaatacatattgtcattttttttaattttttccataactatttgggtgacacgcaaacaatgagggacattccctcgagagtttagaatagttccctattatatatacttggatcgatacctatatatgatttgttcttagtaatgatggtccattattaattgaaagcttggatgacaaggtttagcccaaatgaggaaaattaaatcggtgaattaaacagaatatctagatcgaacctctattctatatagcctatttttattataacaaagaaagtgaaagggcggtattttaaggtctcatttagatgcgagattcctaaattttgtggggattggaccgattccttcaaatgtgctgtagatatcccacgagaaaagaaccaaattaacctactaaatagcctggatttttactactactggagaaaaacaaatcactagattgaatccataataaacaagaaattgcagtggtggatattaacatgcaaaagtaggagcatacacttgtttctttcatgaaaagtgtagatttttcatgatgggatgttgagaaccataataagattacgccagcatggaatttgaagctaaaacaaagggaaagggaaaaaaagtatcagacagacagacagaactgatataaatttaaccagatggaaacgaaatgcatctctgacctcacagaaattatgtatttggggacggccatatataatactctctccgtttcaccgtttcacaatgtaagatgtctagattcattagtatcaatatgaatgtgaaaaatgctaggatgttttacattgtgaaacggagggagtaacaaggatgaagatgatgaacaactaatgtatggtctttgaatagcagaggagcttacctttgaaaagaaaaaaaggcgcttgtctgcggatgcagcatcatcaagattctcagccaaatcggatgtatatgtgcgtcttgtgatatatgcatggatgtgaatcttgatgatgccacgcccgcaaacaccgactctaccgttccatccatggatttactgtactactgagcattgttcgtatcttctactccagagtacagtaaattcaagagatgcattggacacaagggagaagggagagatttgctcttctctagcctcttctagctaggggtttactccaatttgcattgcaggtagacgagagagcactgtcatactatataggagtacatctgtcagaagtagatcgagttaattaaaggagcttaatggtagtctacgtggcacagttggcagcgccagcaagtgcacgaagatgaaagtgatataatatatagtaatatacaccctctgtcaaaaaaagaatttaaattctgggtttgaatttggatatacactatgtccagatttaaatctagagttaggttttttttggaacggagggagtactacttatattattaactactacgactagtataactagccaattaaccactaaagtagagtactttgtgttaattgcccggagttacaaatatgggcaagttggtaaaaccgtaaaaggaaaagctgctgcttggccacctgatgacgtccccgcacaacctagccaaaatgcaacagccttttcctgcagatcaatggctttacttttccattgtccgttttgcagatcgatgacttggctgtgttcgggaggcacccgacacggaaaaccaagcacggattatagtgaaattaattagtat

SEQ ID NO: 23839 - DNA, 613 bp, Oryza sativa
ccacgggcgaaagcgacttagccgcttgcctcgcagctgccgaacgcaccatcgccgatctgcagggcgcgctggactcgtccgccggggaggtcgaagccctccgcttggcaggcgaggtagggcccggcatgctttgggacgccgtctcccgcctagattgcgccggtcggcaagtgggcctctggagagggcggaccgtaaagtacgccgccaaccagggaggcctcgcccagcgcctctcgaagatggccggggctctccaatggctccccgaggagctcgagaagacaattaagtcatcctcgagggacctcgcccaaggagcggtggagctcgtcctggcgagttaccaggccagggaccccaatttctctccatggatggcgctggatgagttccctcctgggaccgaggaccgcgcgcgcgcgtaggtccgggatgccgccgaccatatcgtcgacagcttcgagggctcggcccctcggcttgcgttcgcccccaactccgacgaggagggcaatgccggtggtgcagacgacagtgacgtcgaggccggcgatccgggcgcatcggattgagcccccagaccccgccattcttcagttttttc

SEQ ID NO: 23840 - DNA, 1098 bp, Oryza sativa
ggcgcgggcgaagaagctggacgcgagggcgcgcagcggcggggcggccacgggcgaaagcgacttagccgcctgcctcgcagctgccgaacgcaccatcgccgatctgcagggcgcgctggactcgtccgccggggaggtcgaagccctccgcttggcaggcgaggtagggcccggcatgctttgggacgccgtctcccgcctagattgcgccggtcggcaagtgggcctctggagagggcggaccgtaaagtacgccgccaaccagggaggcctcgcccagcgcctctcgaagatggccggggctctccaacggctccccgaggagctcgagaagacaattaagtcatcctcgagggacctcgcccaaggagcggtggagctcgtcctggcgagttaccaggccagggaccccaatttctctccatggatggcgctggatgagttccctcctgggaccgaggaccgcgcgcgcgcgtaggtccgggatgccgccgaccatatcgtcgacagcttcgagggctcggcccctcggcttgcgttcgcctgaccgcgccgttaaggtaggctggcgggcgcgacaccatggactgccgatggtgatttctgggcgaatttaagactttgataactttgccttccgggcatggaatcgagcttggtttattttgacggctacagaatcacaggcctcaccctagagaagatggattgggagaggtggaccccagagatttttctagaaaccacttacaataggtcacaaagcagcggttgtttcggtgaaatgtcgaagatctgaaggtccacaactggttttcaacggcgcggtaagtcgacgtgcttgacaccaacatcgtctaagctatccaccctaacgtcctatgtgccgttcctatcctaacaacctcgttgaaaaccagttgtggaccctcagatttttgactttttgcggaaacaaccactgctttgtggcctatggtaagtggatcctagaaaagtctccaggggtccacctctcccaatccagtctctcaagggtgaggccggtgattctgcagccgtcaaaacaaaccaagctcgattccatgcacggaa

SEQ ID NO: 23841 - DNA, 2319 bp, Oryza sativa
catggggacatcgctctgcaagattagtgccacaaatacgagatttgcagtatttatgataaatataagcatctacaaccattcttctaaatatgttagaaatgaaaaccggaagatggttgtggtcctcgcaaagcgacgtgacactaattccttatgtgagcatgaatcctgggggattttgaaaaagaaactttcatgctcatatgtggaatgttttctctcgtcctcgagagtcaatgtcttaagcttgtccgtggcctgaagattttcgttctcaagagatacatcgtgcaagaatcgggttgtttcatgatgataaacaagaacagtgttttgagggccagagggacaaggcttaggcttgatcgagggtgatgagggttgtttagtttcatgaagatgggaaataggttcagaagaaacgaacgaagatacaaacatcacctcctcgaacggctcatgcttgggatgagcctttgttttgctggaataatttagggtgtttccataatcttcataaagaccaaccctgaattggaatggaatttccgaaggatgaatttcttcttcttctggctccagcaactggaataaggattcggcagttgagttgggttctgactccacgtgcaaaggatcctcatagataatctcgacctccgggatagcttcgcttcggccgaaagaatcgttctctaagatcaaatctaagagctctcttccttcggcagtcgtcttgtgcccgaacgatcctccggcggaaatatcgagatttgcggcagagtccttgtctaagccgtaccgaaaatgttggaacaacacatggtggggtaaagacaagtctgggccagattgagttaacaatgagaatctggcccaggctacaccgagagagtccttctcattccgtcggaaagagaggatgtctaatcgaaaattaattacacgggttaatggaaataaagcatggcagaatttgcgcttgagctcctcccattcaccgtggaatttcttgacagacatagtgtaccattacttcgcttcatctctaagagaaaaaggaaataacttccactttagagtttcatgtgtcatgcctacgatggatagacatgaacacactagctcaaagccccaaagatggatgtatgggttttcactaataccaccagagaagggttgctctcggaccatggctataaagtcaggactgatttcgtagccatcagaaaggattggttttgaagaacaggacggctcacaaagctcagcccaaggagcagaaagggtttgaattgtgggttgctccatcaaggaaaaaaataaaagaagaagaaataaaaataaagatacgaggatgacctagactcggataaattagcaaccgttccaaggcaacggtgccagaaatgcttgttggtatttcttgcgaccacagataaatccgcaagcgcacagaatactgctgtagcacttcaccttcgggtgaccccaaaaggatatcgaactcagggaacgtgtgtaatctacctaaggctaagactagcaaaggacaacaactagtggtaggtgggctagagaggactttctatgtgttttaattatctaagctaagcaaatgtaatttcctatctattgcttcgggcatcgacccctgctggtctgccagcgtggttccggctatagcactatgatgcatccgaacgtggaggattactgggatggaattcagggctgtcaccacctgctgcctacctccgacaaatccgtgggatacacaataaacaaaggtaatctctaacctagacaccgtgtctatgttattaattactactctaatacttgtacaggaacttccttctctatccagagtcctagtactagagcacttagtacgaatactaaacaatgaacccgcaaaaatggaaatatatcttactcagactaagtaattaaataacataagagaggaacacgaatgcttactttatagaagaagttctccgaacccgaagcagagtgtaccaacagctccggtactcctccagaattcctcctaggaagctacactcgtcgaggtagaagtcggatgagcgccaaacttctgagcactcctccagagcttcccctcactctctaccttattctaatgtacaaaagatacaatagagcctcttgtaattcagctcaaagttgtgtgcgttggaatgagagtgagctcctccttttataggctccaaatgatggttaggggcatgggaaatgaccaaaacacgctgcaactgcctctggtaaggaatccaagccgtccacgtg

SEQ ID NO: 23842 - DNA, 3937 bp, Oryza sativa
atgtgttttctcctcaaattacctgcatacacatctttcaccaacactagtggaaatgattagtaataatccataccactgagttggataccatattttatttcattatatgtaggtattgacggtcagatattatgatttaaggaccgtcaacagtgtccttcttgttcaagtgatcaaccacggaatcatcatcatgacccataaagcacacatgatcttcggcaatggaagatgaacaaattgatgatgtgaattcttcaattaaacattgatgttcattcactttttccttcaaaaggttagtttcacaagtactataggaagtagagcatccatccatatcatcctcatgcacatatctagtgctaggtgataagcatgagtcaacaacactatcaaatatagcaatttaattattgattgttgttggagtccaatgggagagttggaagatcatcaaccttactcaccaatttattaccttgctcatagttgtatgttggtgggatggatgatgaggtgagaccttcttggttggaggagataatcacttgggacttgtcatgatgaggcaatgaagtagagcaatccccaaatgatgcttccacaagagtatcctctccatcacatttggacttgtcatatctttcctttagtgttatccaaatgagatgagcatcttcaagtggcatgatggttttgaacacatcatcactcaaagcactaaacaaaacattagtagcttgagcattgagatgtgtgcatttctcttcctcctcaaatgatagatcattatcattaggagggagaaatactcacatctacaactcactctgtatgaggacccatggccctaaacacattaagcgcacgagtactccaagatatgtaatttgaaccatctagcaaaagaggttctaggaacatttcatttcttgttgacatcttctcttagggcggtgaagtccaaaatgaaagaccttgctctgataccaattgaaaggaccttgatgtcgcctaaagggggggggggtgaatagacgttcctaaaaattattacaacttcatagcatattggaatgatgagaacttttgattcaaaacggaacttccggtatgggattcgaagttccggtctcaaccgaaaagttaggcggataacggaataaaacactagctataaacttgtacctcaaacaaagaaaatgtatatgaattaaaaggtgacaaataaggtatctaaggaagatataaagttaccaactaaatcaattaagcatgcaagtagatcgggtaaaaacaacctcaagcataatgtgagagaatgcaagaatgggcaaatcaagagaggagacgcgtgatttgtttcccaaagtttggatccacggatcctacgtctctgttgaggagccacaagggccgggcctatttcaaccctttcctcacgaggttgcacaaatgcattcctcggtttcactcttgatttctttccttgcagaggcgaaatcgaagccttcacagactttctgtggcacaccacaaccttgggtgctcaccggcaacgcctagccgtctaggagaccttagtccccaagagtaacaaacacaatcgaagatttgcctgctatgaacttgagtgctcaaagtatggagtgaaactcactagctctcaacttctcaatctctcaatccaactctctccccttctcaaatccctttcacaaagaggcaacacaaaggtaggaaaatggggatggttatttggttttgaatgtgtctaatactccccaagaacagcaggcacttaaaggaggggtggaggagtttatatacccgagcctcacaaaaactagccgttggagaccaagactgtaattttcggaacttccgaaaatttacagaagcaaatatcacgcaaccattttcggaacttccgataatttttttggaacttccaataagcacagagtaaaatgaccataagtttttgctcgggagtccttttttatgatcttggactatgtggaaagctcacttagaggactatccaactcaaccaaaaacaaggcctaaaatcactcaaatgataggttaaagtttgggtttctctcaaggtagcactatgataggtcattttgagcaccgagacatacacaaacacatcgacattgcatctgtcttgatagtacgccattcctatactcaaatttatatagtaagagaattatactaataggataggaataccttctttccatcttcctttcattgtcttaagggacgccaacgccaaaaccattcaccatatattcttcaaacgattgatgtggttacttgtagcttcaaatggtctcacacggtccattatgacaaagccgccactcgtccttcaccactagatttggttcttcggcgccaagccccttgcttgccctttacccccgcatggtccattacgaccgagcatcacttgcctttcaccgtctttcatagtagacacttcgtatctatcgacgagtgatactcgcggaccgtatgagtagagtattggggtacgttggaatgatggtctacgtagtatgacattaagcaaacgaaagacaaagattatattggttcaggccccttatcaggtaatagccctagtccagtttatatgggattgatgatgatgagaacatattacaatgagagtagtcgaaacagatgataccgacaagatcgtagtcgagggattcgacaagatctcctggcgacttggctccgtgtactccgacttcgtaaactttggtgcgtgtgttggtgatggaattggatttcctgaacccctcccagggggtcccttttataccgtggatcatcttgacccccaagaaaggtttgaggatataggacctagtacagtataacagaaactctatcccttccgagtaggactttggaaaatcacgtgactcgtagagatattttccataatttgaaaaagattccacgcgatatttacgggaacaatccatatacgtgaaggtataccttatcggtatattccataagtcgtaggataggaggtatgccttatccttaaccctgaaagtagcccccgactccaactcaaatgaatttatgttgtcatccatgacttctctcaccagcggcttgtctgtcgttcttggtgtgggaccgagaagacgagaagctattgacaacactaacggaagtccgactgcttaaacactagcggaagcaaaagggctggcccataacaggccttttgctcctccctcaccgagaagtccattttgcctccctcctttcaattaatttcaaaatattaaaacttcgaatcggaatttatcatactaaatgaacttatgtgaaaaaagttgtcaaaaacaaagttgtataacttattgagatctaccaattttattttggttatttctccatctgagtttaattgacctatgtaaaatttgaatttcaaattatgacaacttcaaacaatattttcaaatactaaacgatttcaactaaaaaagtcataaacaacaaagttgtataaatcatcaatatctacaacttttgttttggtcatttttctagatgactttgtttcaataatttgaatttgaatttcaaattatgataacttcaaacaacattttcaaatactaaatgatttcaactgaaaatgtcatcaataacaaagttgtataactcatcaatatctataacttttattttggtcatttcttcatccgataaagtgatagtaatattgttcataaaatttacatatgtcttatatggttttgaagtatttaaatcgcgacgaaattgctataacgtcacaggttttgggccggtttatgacgaaatcgataaattgtcatggtattatgggccttgtatccatagttgcatatccgtgacg

SEQ ID NO: 23843 - DNA, 9129 bp, Oryza sativa
aatcaaattctacagattcatcattcatcatcatacagtctctgattaagtgaaataaaagtaattacttactttgcatcaaaagcctctaaaactattatctttaaaatgactagttttagataagctaaactttagaaattcatgtagaacccaatttagcttcaatttgaataaaattaagttatgtaggatcactaacacatgtatttccatgttatgaaataatattatatacttactgtgtagtaaaagtctctaaatattcatataaggatttactaacatagagcagcctttaatttgtaaaacttgtagaaaatttatttttagtccaaatgaaatgaacaaagtttctatagaaccagcaaatagttatcttcaacatagtaaaataaaatttgtcaccttttgtagagaacattgatcaaaaccttaacttagtgaaataagaatttaaacacatagtgttgtttaagtaatacataaacatgtataagtatatatatacactttaggtctaattaaacctaaataaaaacttgattgaccagtgaagccatagttccatttccatccactaaaattagaagaacttagctcatataacaatttctaggttaatataatatattgctagtttagattaaagcatctctactttataaaatatgaaccatagtagtaaagaccataaacatgtgagataaaaatgttttagttaaccaaattattccttttattcaacttaaacaggaagtagcatgttctgaacctataactcaagagtcatgcacatataaaacactatatgcctaaaacacgttgtaacttgtaaaatctataagaaaatcattataattccaaaaattgtgaaaccaaatgtgttagtcttagaaaaacacatctccacaccccctgtgaagtctaatctaataaaaatcactttacaaaagtatttcataacactacctaagactatactattgtaaaccgataaaacttctaaaattcataactcccaaatggaataaaataaaataggaattatttcacctaaattcattttagatcatttccaacccactgtgcataaatcatgcattttagagcattttggattttcagctctttcggtgtttaattgcatgtcgtgtcctttatctagataattgcataatcggtgaagaagtggattaggtgctaacaattctctgatcaaggcaagttttctcctcccatcctttgaacacattgaatcccatgatttgaggaatgaaaatatttgtttgcaaagttgcatgtgaacttagactatatcggtatttgaaattgggttaaggtagttatgacctatttgctgcatattccaccttgaataattgatcctcttgctgtttgaacccctagaaatggttagagtacactctttgtgctcaaatgggtttatatatgctctatgtgcaattacttgcttagccatgcttagaaatatgcaaatgctcattccatctataattaaaatgtggttttgatacttgaacctttgctggaataaaatgaatatgatgggtatttgcgaattaaaatgtgtaaaatgtgattttatacttgggcggcaagtggtgtgcatatggtgttagttgcataccgataggggaagtgtttgcccaagtccataaggaccgaacttgtgtcacccatttaaagttatccgtacatccacatgtgctagtatgggatggcctaagctgattaatctatttaggactagccttgcattctggtaggccggtgtgtatgagttagtcgataattctgaggaattagtcgatgattcagaggaacttcctatttgccccgacgtggtagtttaggtgactaagtctgtccaatacaacggtattgtgccacgtgggtggattcccgttgtgtccgccaccacggcgttaagtttaaggcgtgggcccgccacttaacggttctagacatatttccaagtatgcctaggatggaggaacacgtatcgtgctggtgcaaggctagattctaagtagtgtaaaggcttcgttatgacctctagatcacattcaacatgaagagtgtgatggagtcttgcaaactcaaaacaaactagagagttcatatcatgtgggtaaagctgtacaaactctgcagggttctttaaactaatcaattagccgtgctcacggtcatgagcgctttggtgatgtgtcatgagtatagactatgttttaaaaatgtgatcatgtgatattggtttgaaattgataaatgtgttgagttgtgtgtgtgtgaggtgatatattatgacttgttgtcaaaggatgacaacaggagattgattataatggaattatgatgaattaaatattgaaacttaaaatttgttttgttaattgaagcatcaactcttttacaaaagaattgcgaaacaaaacttgctttatgctgaaaatgaactacatattgccttcctttgaatatatgccttacatgtagtatggtaggattgacttgtgcttgccagtacattaacttgtttaatgtactgactcttgctgttgatataaccttttgtttgcaggtttagtcttagtctttgagtgatgcgggttccgattgcttcttctaggatgagaacttaatggggtatacccctagtcggtgtgcttgtgtttgggtagtcaagcttccgctgttctctaataagtctatttggccggtcggcctatgtaattattaagttgttgtaagtcttaagtttctttcatcttagttgtgtttgctatgtgtaatcatgcttaagatgaaagtgtgaatctagtgcacatcctgggaactagattcacatgagtatgagttaggaatatttgagaggttgtagatctttagccatttttgtcaagtctcctgaatgtgtaacacatctggtcgccgccttcgagtggtttgacgggcacatctcaggctgaagttgactggcaggctaagggcccagcaatgtctccaatattcctctctcgaggtgtcggatgtttcattatgcttgtttgatgacttgaattattcacttcatctctcaaatataatggaaggtccggagagcctacgacagcatggtatcagagcaaataccgactataggagccccttaagttggttgcttagaattgtttcttaaaaattattttgagtgctatgctctcagttacaaattatttgcaaaaatcatgttcaatcttatatctcatccctctttagagattattttactttatgtctcatgttttgatttttaaaactcttatcttgctctataggaccgaaacattttagaaatactactcttgttgaattttatttgaaatcacttaataatcacagcaaaacagtaacatagtgttttgaaaagttttgaaatccatttgcaaactactcctatgtattagcacggatttctaaaatatcgggttaaacatagcccctagaaaatgggttttgagaatgagtcgataaaacttaaaacttgctagaaaatattggaattccatctccctatgttatctctgaaccaaaaatgaatttggtgggattttgtactttcctctcccgatatttcaaaattttatcggtatgacctaaagcgtgcagttgggtatagaatagaatttgctgtgcttaaccctctagattgtttgcttagatggaccacccaaaattcatctagcctctggaccaccctaacataatatgactaaaatggtgataaaatttatacaacctaaaacttgattaaagtttctttttgtgccggttgttctttttctggaatcttgagtcagtctgcttgttaattttgtctagactaaaccgtaggtgataaacatgagaatttttacatgcatcatgtagactaacccagtaagcttcatgaattttggcataatttttagacccctgcatcatagtgaaacaatctagatagttagcataatcatattctggaaattggtagtagctgcattcatcttttcatgtagcccaaaccataattgattaaatatgcatctttttacagtagttttcatacataacctgtaggctccacgaattttggttgaattttttttgagtcattgcatcatggcataaaaattcatataatactgtatagttctgtccggaaatctgtaggttgtcagtttcacaaatttgtgtagcctaaactacaaatgataaagtcatgattccttcagggtagctcctaatctaacccatctatctctctgatttttgtcaaaatttttgtatctttagagctagacctaaaaatttgattaagacagtaaagtgatgaatcccagcacctagcactcatgtcagattaacccctatcctttgaagattattagaaaaccctagtgcaaaaaaaaaattattttaatttaagggggatagtaagccatattcgtatcaaaactaaagataaaatttttaaccttgtataattcttcttagacctaaaatgcaaatcccattctagtaagccctgtaccgttaatatgaccagaattaatgattagaggtctatataaccataggttgttaaaaaaatgtgtgtcgaccttaataataacagtaaggaaaacctttaatttgtaagtgttaattttagaggtttttggctaatccgtgttctaaattttattcttatagatgcctaccatgtacacaccgtactgctattgccgtgggttcacctggaactcaactcagcatgtgctatggcttatgcttcagtacgcccgattcacctatccacctgagtatcatatcctcaagaaacctattggaacatcccaaaccgcagtcatggttcgtgtaagcattcggggtagaactccattagagaaagaccttcaatatactggttatgggtgggatattaagtccgctttgcaaaactgtgcttatgttgctatcatccgccttcgctatgagctacctgagatagaagaattttactgctacgttccatccttaactgagggagctcaacacactacctacccagggttagctgaaataggtgtaggactacataccccatacctccaacttgcaaactttgtgcgctcactagatatgctttatcgctcaacctttgctgagctgcaacgcgtccgcaccggggtagccactttagaaagaagcattatgccaaggtatcgccaaggacattatacaccggagttcatgtttggtgaggatgccatgcttgcaccagcagaagatataccaccacctgttggaatgtatattgaaagaaacccaccttcgcgcgtcgatgtcaggactgcttatcctccacttggaactactggaccgtatggaccgccagagtatgttcaatggtatggtcgagtcttcaagctaaggatgagagattaatcaatagtcctatctaacctctactgccacggtagtatgacttaaggacaagcttaaggaatagtctaggtatgtggtggcccattttggaagaaaatcatggtatgtaatatatgtaatatggctgccatgtactccatttatgtaagaacttgttggatggatgtaatagtaactaagaactcgtttgtccttaatttagaaacctctgtgcttgctgtccagaactttggaaaatctgtaaacataagttcatctaagttagaaatctggttataagctcctgttaatatgaaccaacatttatcttgttggaactaacttctctagtgtcaatttaactaactatctaagcttccataaacccacaactgagtagaacttgccactcacccgcgaaataaaagtttccaaatgttttatggtagcaagtctgtcatacaacttaaaagaaattattatctgctgtcaatgtcaatcctctggagatagtcataacttaagccaaccctacccaaatctcggggacgagatttattttaagggggatagactgtaacatacccgaaattttaggacttaaaaatttcttgtcaaaatagttagaggttaacttctccaatttttagagccaaaaatttccgttttaatttaggtgatgaccaacttaaaccattgcatgattataatttgagaacaaaataaaatcttttcattcccaacattagactagaaatgtcatcaagcatacatgtacataatgcatgcctaggctcgagttctttgtgcatttggagttttggtcttgcattccataataggtcccatgagcataatctaaaagaattatttcactaaacaaacctatagttaatcttgggtgataacatgtggacttaatattaaactcaaatatcatcttctcagtctaaaagaagtttaatgtaatccctataataatattagatgcaattatgaagtgggaacacatatacaaacaaaggtcatcctaattctctaaaatattttgtgcaagataaaatcatggaaaaatttatgtggacagtgattagcacaaacatatcctctgtaattttggtaacatgttaacactcaagttgaaatctcaaattaatcggtcgaagcagacaactaaaagaaatcaaattaaatttaatcggctaaaaccatatttcatccaaaagtacatttaactgcacataagtgagcatgggaaataatttattcaaatactagattagttatcatgaataaatgtaatttttctagatttttcctcctctgtttaagcctcctaaaaattcaatctagctttctaatagcccatctttgtttaatttctgtgagcagtccacccattatttttgagtgcaaccaaagaaaatggaatctaggtgtaatcatctaccaccagtaaaatctacactaattcttctgatctacacattaagttatgaagctacaaagttagaggagaaaataattccgaaaaaaaaatgatctaaaaatcaagtttacccagaatcttacccaaccctctcaccctagcctagtttgccacgacctggacccacctgacagcctcttaagcttgccttgactcagtccatcacttcctccactgttccagccgagagaggaagagattgagcgagccgacgcgtggccgcaacgtgtcgtcgatctcggtttcccttttctcgctctctactcctcccagacgcgtcgccattctccattcatcactctggagctgaagaagccgagggaggaggttctctgcctctccatcgccccaaaccttgccgccggtcgtagtgacgacgaccttcgccatctccgtttgagtcaaggtcacctccatctctttcgcgttcccatctctccacacaatgccgagcatttcctcttttgacctaaacccctctcgtgcagtgcatcgccgggaacgcgaccacgccgacaacgtcctggagcacgcaccggagcgccgccgcttcaaccatcgtcgtcgtccggccattctcatccacctcagagaaagccgctgcgccattgtcatcgcctcaacctcctcttcaaaacacctcaagaaccccagccggaaacatcaagaacacggagaacacatccttttcttcaccggcgccaatctaggatcgcctccgccgtcatcgtcgattaccgctgcctcggtgagccattgttcgattccttgcgcatacaccatctccttgacctcacaaccctcgtgcatgcttgcttgaagcagctcattgtcccgttcgagccgtcgtcgttcacccgaggaggagcgccgtcgccgagccgttccacaagtcaccgctgccgccaagacctcgacaaccctagctcgacccacggtgagcatcctgaagtctagaagaccacatgcatgcatccttttcgttcgtaatcgacttccatgcgcacatgcactttcaccccaaaaccaccgccgctcacactcgccatcggcgctactccgatgtcctctaaccaagaaaactagaggaatggaatcgcgagagctttgtcttcattttatcttttgacctcaacctcaaatgagccaccgtttgccgccggcgagctccagatcgagctcagccatggctagctctgctctgcctagagcagagggatgacttctgtgaattagattaagtgcagggatccgtttacaattgtagaaacacactgacatatgggcctaggactgcgggttgattcctagaaaactcaagggcctttgtgcatattggtccctcacagccatgtggacccatcctttaaaatctgaagaaaaattaggaaaatgcccaaacaattatatgtttagcagaaagatgcacaaagttgtaaaatctatataaaatcaaatatagctcattttgaagtgattccagtttctgtagattcttgaagttatgaactttattccaggaatataaaacttgacactcactgtacaaataatgtctctaagatttatctaagataagtcatgcataaaacatgtacaaacttataaaatacatagaaaattcatttcaactcattttgaaacaaaatcaaattctacagattcatcattcatcatcatacagtctctgattaagtgaaataaaagtaattacttactttgcatcaaaagcctctaaaactattatctttaaaatgactagttttagataagctaaactttagaaattcatgtagaacccaatttagcttcaatttgaataaaattaagttatgtaggatcactaacacatgtatttccatgttatgaaataatattatatacttactgtgtagtaaaagtctctaaatattcatataaggatttactaacatagagcagcctttaatttgtaaaacttgtagaaaatttatttttagtccaaatgaaatgaacaaagtttctatagaaccagcaaatagttatcttcaacatagtaaaataaaatttgtcaccttttgtagagaacattgatcaaaaccttaacttagtgaaataagaatttaaacacatagtgttgtttaagtaatacataaacatgtataagtatatatatacactttaggtctaattaaacctaaataaaa

SEQ ID NO: 23844 - DNA, 35881 bp, Oryza sativa
ggtggacgagatcggctagtggcaaggtggtgaccggtcatggcaggagagatagctagagctcgaggtgcttggttgtgtgtggggaaggaagaggaaaccttgccggctatttataggcgacaagaggcggttgccgatggcagttcgcagaggagaagggcgacttggccatggtggcagcgacttggaaaaggggagcacggtgctggcctcgtccattcattggctggccagggcggcgtgcacacacggcggctacagtggagttgggcggcggaaaaggagattcacggcacgacgacgacttgccgtggtcggcaagatggcggcggcggcaggaggaccacgggcgatggcgccatgccgtgggcagcggcgcgcccataggagagagagaaggaaggaggcggcttcggctgggccggctcagctaggctatgcgccaactgggccgtggcccgagaagaaaaaaagtggagggagggagagaaaaggaatgggctgaatagagggaaatttggcctggatgaatagtaactcttgagaattttgcatagataaatttgaattgaattcaaaggagatgaaatccaaaggaaacaaaaatatttgtggacttttggattttgacaaataatataaaatatagtttttaaagtactaaagaggtttgaaatatttttaaaataaaactaaagatatttatttgagatataaatttgaaaaggatgcaaaataaaaatgctccaattttaatagaattcaataagaatcaaatgtaaaacttgtcacgaaaaattttctctaataatttgaaatttaaattgaagtactcaaataggaaggaaagaaactacaaatggcaaggtttctaattttggataaattttgggaaggtggcagaaatagatggagggaaataaataggactgtagccccaaaatatgtggtatggatttttggtaaaatatttgtgggctaaagaaaatttggatttttgtaagaaagggattaaaataattttcttagcacaagagcaatcactctaatattgtgctaatattattcttgtgccaagaaggatattaagccaccgcaattaaacaggcggctggattaagataggagcatgaccaaagaataaatgatataatatttttggatggagtggaagtaaagatttttggagataggtctagatagaggtttgatctagaataaattccaataaaattagaattatgctggttttgcctcaaggttaaaaatggataatgagatgtaacagagagacgggccgattggggaaatattggtccaagctaaatagtaggctttgaaattttgaatggataatttcgatatacgagattccaaaggaaaagtatttgttggaggataaaactggatttggaaataaatgtagatggggaatcgtaagaatttctataggaacagaattggtgatagtatgataagcttctaaaggaaaagtgttaactctagggatattgaaaaatggtgtttcatgtactctggaaatgtttgggaaaggatccaaaggaaatatgctccagaacaaaagttagaggctagggaaaaataaatggaggggtttttataaagttcgaaagaaataaaaagagaataaaagaaggattttataaaattaaaagagagcatttaactttgcaaataaaatttaggttcaagataaaagaaaagattaaaagcaagattgctccaatggaaaagtcgagaagagcacaactaaaacttttcgcaaatttttttcttcaaaatttcagtatgttacactggattacccatagggccaagaaagtgttgggtgtcgacatgaagtacatgaatcaagatttggcttctaaggtgttgaaacaacaaaagccgaaagagcgggaaaccctaaggcctaagaaagaactgtacacgaaagatactggcagaaaaggaatttacctcaggaatgtcagaggtggtcgccattgttaagagtttgagctgacgaagcaaaggggctcgccgccgggagtttgggtcgctagaggaatcactggagataatagagcttgtgcagcaggggaggttgtgaaggacttagccggagaaagaaaatttgaaacagtgggcatgtgcttataagcttaacagtcaaagcagaaaccctagattttcacgggttcgacgaaagaaaattctgcctcattatataatacagcggaattggggggcatgtgttaacaacataattttgcatcagactcggagaggaaggagcaaggttgaagcagatttggtacgagattggagctggacttggagtcgggctgcgcattggctagataccgtatcggctgaaaacaaagtgtgagctgatcaagcttgatggagccgattgccgatacaactgatatggtatgacttgggctcggtgtgggcctatattggaataaccatcattactaattagagatagagctcggataaggcaattgtatctattaattaggatatttgagtcggtttgttagagatttggcaagagacgtcgtatatggtcttgtttgtatcttgtttttagaaaggttcgagtcgtgtccataatggaatagtttgtactcggggtataaatatgaaccccatagcattgtaatacgggagacaatccaatacaacttcgcgcatcgccaccctttttactcttcttcgttttcgacgagttcttcgcaagaggtaacccgtctcaatggcatgcgctatcggggctaacatgtcgctttagacgtgttaggctcgatatcgcgagtcattgctatcatatgtcttagttaatatattcttagcttctcaattttgctctatcggttattgctcgctttagggtttatgctggtttcggctaaattgtcttgctagatttagctaaggcatctaccatccttaaaagtgtttaattgcttgattgtctagactgcatgcttcttttcatactttcaaatgcatcatccctagtcgtgcttagaacaatgcaaactagcctgcaattagacataagaaggatagtattggggtttcagccgatcttacctaatatgcatgcttctttattcgtttcatgtatattcgccacttatacatacaggtcattttatataagcatatcaagctttagtcactatcaaccagatccttacactatcatgcttgatcattgtttgacatgtttatatagatcaatttatttatataggtttgtactagagtattagctagtacattatctttcatgctcgaaatactgtcacatcggctacttttatgatattgtcttaaaccaatttatcaaacttgatagacagtattacaactgattaggcatatttaggatttaatattctttgatatactcagcccatagccgatttggtctaactccattggctgagaccaccaacgatacgctattggccgactaattctgcttttgtctttctcactgattgcaggatcaaatcaattggcgcgtccttgacacactcgaggctagccttggacctgcactggagttaagtagatctcccaggccgccgtgttttcacatcaacaccaagtgaagcctagtagcttagctccagttggcatgttgctggcgagcgagagagagagagagagattgttaggcgtatagttggtttccagttaatacaagatcacgcctcaattcctaccaaactcttggctcgactgtgaaattccaaatcggggattggaatccacttcgttgaagaggaattccgtgaaaaggaaacttgcctcaatcggttagctgagttcggagcaggatttgaggggtgtgagagcgagatccagttcttagtaaatgggcggaatggatttggaggggaaatttgactcgctcctaaagacgatcgcagagaatgagaaaaagagggaagcgtcggagggtcgcacgcgagctgatcttgtcgagctcaagtcagcggtggaggggcgtcttccccaagtcgattagtaggtggaggatctgaattcggcactcgggattctgagttctaaggtcgagcagctggtaaacaactttccacgtgcggtacaaggtgagaaggaactcaattgggccatcaaggtaggcctgacaagaatgaaattgaaaaataggtgactgaaatgttgaacattggggtaattcaacatagccaaagccctttctcttctcctgcattgctagataagaaaaaagatgggacctggagacagtgcattgactacaggcagctgaattcaatcactgttaaaaataaatatccagttcccataattgaatagttgttggatgagttatctggttcacattggttctccaaattggacttaagagctggttatcacgaaattaggatggctaaaggggaagaacacaaaacagctttccaaacacattctgggcattatgagtacaaggtgatgtcctttggactaacaggtgtcacgcccagaaattcgctaactcgaatttcaagcggaatgtgtattaaaatctctgtcaaggactagccagagtacacaaacgacacatcgatacacagatccacgccttacaaaaataataaataagtcttacaaacgtagcggaataaaattaataattgaaactctgaacgaagatcttctcgagaaaaacatagcttcttccaaatccacaggcatcctcaacatccggatcaagcctaatcctcgaaataatcatcatccgaataattctatgtctctggggcaccgtactcaacaagtcataccaatgggaaggtatgatgcaaggtaataacaaaggattggcaataggatatttgcataaaacaacatttataaatcataatttgaatgtagtaaaacaataaatattactaagcaatattaagcatcactgcccaacgctaaacaacgttgcaacaggcccaaccaaaccacctgaactacaccagttcataaaatcatactattaagaatgagattaatcacggcgagctggttgaccgcccaataaccgcgggcacggctattcgaatatttttattctgatcagaggtgtacaactttacccacaagacacagcctcacaacacgttaccatgcgccgacatgccaccacaacataccgaaaagagactgatagaacccttcgcataaccctccctaaccaagaatacccacctcaggttttgcccctactcctcaataggcagcaggcagccccttctcgtgcctaggtaaatccggaagcagcagagaccgaagctcggtccgtcctgcaccatctcttctacccttgccatggtatgttgactaggttaagctatactctagattcagcctggagcccatgatggcatgtggtaagtacgtttatatcttccaatagttcccgagaactggtacttaattgtcacgggaacgatttgcaaaaccatgcacccacaacccaccattatagcatattttaatttaattaaatccacaccatggcagtacattatcatcataaaattaaggactaagttatagtgaatcccattgtgagctaattaatctaagcatggctaagcattcctaaaccaatcaactaatcacttatgtcccaagttatcaatagcacaaggtaacaataggttgagtacgataggcatccatcccacatgacattataaaataatgcaattttaatagaaaagcagggatttgtaaaataggttcaatatgatcaatgctgtatgtatgacttgccttgctcttgagctgtaggaacctcagcgaccacttcgtaataaacgggagcatcggaactaccagattctatacgacaaacaaagaacacaacaatacatgcaataagtctactgaaacagcaaaagaaaccaattttaatgaattctagacattacaacgaattcacaacaacttgaatgggttaaaacggagctcggatgaattacatatgaattttagaatatgagttgtgtaattactattaaccaaaaatccttagtcaattattaaacattaatgcccgaaggcgaaatagatcaatggaaaatgaactccggtaagcaagcctcacgggtcaacgactcaacgagtcaacctaccatggcacgggaccactcaaacggtcaaccgaaccggcaaacagaaccagcggctcagaacgattgcagggtttcgaacgactcggtacgaccaaacgaacgaggttttaggttatacttcgtacgaacgaacggttagcagctagctagcgaaaacggcacagccggtaaacccggctgacaggacatggcttgcggctgtggctaggtacgacgatcggtaagcccgtaacgacttaggtggacggttgtgactcggcaaggtggcggcgcacaacctacggcttggcaaagcggctaccaagtggtggcagcgtctcggctgagctagcaccgcagcacagctgcgacggcagcgcggtagcagcggcagcggcgcggcgacaaaccaaccataaccaagggacaggaaggagtcctcaccgggagacaacgacaaccggcggggagagacggcggcgcggcgaaccggcgacgctggaacaacgacgacgatcgagattagatgggtaaacggaggagataggatggttatgatgacaaccataccggcggggaaaaggagggctcaccggcaacgcgacgacgacgacggcggcgacgggcgatggcgggaaggcggcgctagcggctagggttagggtttggcggcatcctggggagacgagaggtggtggctgagttttgacggggaaaaggaaaaccaaggaggggtgccaagtattaagtaggtggaggtggtactggattagggtagggctggtggcggtacacggcaaaggaggggaggggaggggcgcacgcagaaggggaggggggcggcgcgcacggcaagagggggggttcggaaaagaaaagaaaaactagggaaaggcggtgccatttaaagaaaggaaaggaaacggcagccagaaaaggaatgcgacaaggactcggcctgcgggaacaaaacgaagccggaacgacaaaggagtcagcagatacaacgaaccgtggacggagagtgaaccaggaacggttcgcgaccaaaggagggacaggaaagaattattactttaaatcctaacattttaaattaacagggttatttactctgctctgaaaattccgctgataggcttgttaatggtttaaagcaaagagaattcaaaaacaaattctccctgacaaatccgattattagacccgttgttaattagggttttctcctggttaaacatagcattttctattgataatttattaatggattaaaactatggaaaggggaaactccgggtgtgacaacacgggccccagcaacattcctgagtgccatgaatgcaacattagctccagttctaagaaaaattgctgtggtcttctttgatgatatattaatttaaagtccagatctgataacacacctggaacatttgaggagaattctgcaattactggctgacaacaattggaatgttaagctgagcaaatgctcttttgcacagcaagaggtttcctatttggggcacataattggaccaaaaggagtatccgcagattccaaaaaatacaagatgtggctaattgggcaattcctaccactgtcaagaaactaaggaaacctttggactgatcagtaaacctctcactcaacttttaaggaagggcatcccatataaatggattgcagaaaccaatcaggcttttcagtgctagctctgcctgatttctctaaacagttcattctggaaactgatacaagtgagttaggcattggggttgtcctctcacaagataaacaccctatagcttttctcagtaaggcattgggacccaggactcaagggctgtcgacatatgagaaagaatacatggctattatgttggcagtagaacaatggagacaatatttacagcatggagagtttatcattttaactgaccatcacagtctcaaacatttgactgaacagaggttacatactcagtggcaacagaaagcttatactaaactgatggggctgcagtatcatatatgttacagaaagggagtaactaactctgcagcagatgctttgtccaggaaggaccatgccaattctgcagaactgtgtactgtctcataatgtgtaccttcttggatgcaagagattgttcacagctatgatcaagatccctatgcaacaaagctgatagcagaactagccatcacaccaacagctaggcaacatttctcttcagtacaaggcattctcagatacaaggggagaatttgggtgggacaatactgaattgcaagagaaattaatcgatgcattgcatgctacccccattggtggacattcaggatttcctgtcacttataggagagccaaaagcatgtttgcttggactgctatgaagaaaatgattcaggccaagctgcagacctgccaaacctgtttgcaagccaagccagacagagctaaatatccaggcctcttgcagccactaccagttccaacaggtgcttggcaaaccatctctttagacttcattgaagggttgcccaagtccagtcactataattgcatccttgtagtggttgattagttccctaaacatgcccacttcataccattatcacatatttttactgctagcagtgttgcactggagtttttgaagcatgtttacaaattacatgggttacccaggataataatttcagatcgagataaaatcttcaccagccaattctgggagcaacttttcatcaggtttggcacaaaattgcatatgagcacagcatatcacccccagtctgatggccacatagagagagtcaaccagtttcttgagatctatttaaagtgttctgttcatgccacccctgcaaaatggtcctcctggctgtatttggcaaaattttgatataacagttcttatcattctactttgggcaaaaccccctttgaagtaatctatggctacagcccgagtcattttggcatcagcttgaatgattgtcccatcccatatgtcagtcaatggcttcagcaaaggaaattgatgcaacaacttctgcagcagcacttgaatcgtgcccagcagcagatgaaacacttggcagataagaaaagaagttacagccatatgtgcagtcattagtggtcgtcagagctaatcacaagttatcctttcgacattttggcccctttcaagttcttgcaaaaattggcactgtggcctatggcttgcaattaccagcttctgctcggatccatcctatatttcatgtttcccaactgaagggcgccaagggtttttctcatccggttcagactgagttgccgactgacttcactcggtttcagattccccagcaattccttaattacagagtgactaaaaaacataattctgctactattcaattactaacccattggtcagggggtgcagtggaggacgcaacctgggaggacatgcaggatatacactacaggtttccacaggcacaggcttgggggcaagccggttttcaagattgagggcttgtcaggcctacctcgatgctgccaagggactccaagagcaagaagcctgacgtccgtgtacaagatggagaaatccacaaggaagcggaggtagctgatcgggagcgcgacgccaagatgatggaaggagatgctgatgaagcagagaagaatggtggcgctgagaagagggtgccggattccttggcccaaaaaccagaaggcccaactcacgtttcgtcggcgagcaatggaccaagtgaagcccagtagcttagctccagctggcatgttgctagcgagagagagagagagagagaaactgcgtgatcttgctataatatactccgtataacagagtagcgagaaacacggcggtgatgaactaatacgcggaggcgtagccggcgcagcttgatcctgttggatcgagagattgcaaggcgtatcgttggttcccagttaatacaagagaaaaatcgttagtgttcctaacatagcagtaacctgacgatttaccactcgatatgtgccaccaagctcgcctccctggcacagagtttccctcacgcagtcacgcatgcatcttcgataatcgagacggctcatatacctgagaaattggtgacgctggctcgtagacgccgccggtcgccggagttcgtctcagattcacggggaggaagtctgcagcaaatgtggagaggggagcatcttgatttactgaggcagttggtgggaaaaataatactccctccgtttcaaaatgtttgacaccgttgactttttaacatatgtttgaccgttcgtcttattaaaaaaaattatgaaatatgtaaaactatatgtgtacataaaagtatatttaataatgaatcaagttatatgaaaagaataaataattacttaaattttatgaataagatgaatggtcaaacattttgaccatggcccatacattttgaccatggcccatatacttaaattttatgaataaaaagtcaacggtgtcaaacattttgaaacggagggagtatatgctaggggagcatccgtggcccatgggttaacgggtctggtgaagcagcccgtaaccaaatgtgcctctaccaggcccgattgcgcgcacagatcttgaagcagaatctactgccaacaaaatcgactgatgcaggtgaccgtaaaatagcaaagctgaaacaaatttgcgtccaattgaaggatgtttgtgtctttgtatagcactgtatggaaaataaaatggttgaattaagtagcattcacggcaaattatctgttgtacacctaccacttgcatcagagtgtgttctactacaaactgaagctacagctggtgttgtggtcagaataacataaactaaaataaaacactggctaatgtgctagtgtattcagattttggttttctgaatatccaaccaacccctgtaacaaagcaaacaccttcctaataccctacacccaaaaaaatccagaaaacaatagatcaagagtttatcagattgcaggaatctgaacaggacatgtaaatatctattccagatccaccttccttcatattctgcacaagaaattcagataaaaatttttagaacattgatgttcagatctttctagttccagatttcatatcagtataggtaatggccctttcccaaatcaccaagaaagacttctccagaaaattatatcacttttctggactcgatttagtcaaatttacttatcactataaaacagaattgttatctattactagttaccatctaccaaaattaggacaccccgtagctagaattttccttcaacctgacacatatagcatttttagaacacaagatacatataaatcttttccggaataggaacaagttagtatagcaaatccaaatcaacatgatccatcaaatactatacatacactaggtcaataagtgaagcatggtaatttctgacattgcttaaaaaatatgtggattggaatttaaacaaaactaatatttattttcatgagaacatgcatgttttcatatttcagatttctaaacatgctcagtgctaacaaataaattatcatctttaacaaatgtaaaaaaactatagtataagactaaaataagaacttcaaatgccagcctgaccaaataatatagatgaaatatgtctgaattaagactttgtagtacctaaccaaaggaagatcagccagacaaaaactaattcatattttagaaggttacaaaactaatagaactattttaggaggttacaaaactaattaagttgaacatattagtgaacattttagaatatatgagctaacagtgtggtgacaaaactaagtacttttagcttacaaaacaaaacaaagcaaaataaacaaaaggataaaataatgcagctcctaaatattacacacaaaacgaacaaaagtgtgcttttagtactcaaaagacaagaagtttgcagctagactatgactaggccagcaagcaaccgtcgagctaacctacaaagcaaccatcgggcaaaataccaaaactacaaatgggacacacaaccttctcgttgcaactttaaaaaaaacacaaaaatgttgcataactacatcaattaaatttggtgaccaaaacaaagagaatagtgaaaggagaaaattacaaacaatgcattctaataaaacagggtactattagtaggcttgctaacaaattacacaaaactaagtataattagtaggttaatcagtaggaggtactgtccatttacacaaaacaaagtacaattggtagcaaacaaaactgtcttattagtatcttcattgctaacaaaattgacaaaactaggtacacttcaccaactacctaaaaagccataaattagaattgacgaccattctttagaacttcgtttctatattatgattagtacaaaaggaaaaatataagataaaaattcagagaagatgtcaggacctataaaatttagagaagctgaaatgtggggtatatattctgcaaaccatgagatgcaagccgtgcaagcaattgcagattgcaagaaggcaaatcataaaaaaaatatataatcatataaagatacaaagacaaaactagttaagtagtgtttgtaggagagacaaatatatccatgtaaatttacaaaattaaatgctattaatctccattgaacaaaactgaactgaagtgaattcaagtgaaatgctattatgctaaacaaccaaaactgaagattatttattattatgttaaaaattgaacaaaagtaagccatcttcagaagtaaacaaaacatacagaactagctttatctgtatgatctagcatacatatgcatgaaaaatcatcaagagagccaaggactacggagaagcagagggactatgtattcttgccgcgctacatgctgtgtggaatcaaacaacaataatacaatcttttttctgacagttacccaaaaataaacaaatcagtgaacaaattttatacactatcgagtagtggttgccccatggatcattccctcaatttgatcctctaaacctagagagactaatcctttctcctctatcttaataacattgggtgacctccttcggtcatcccggcaaaaagagagactaatccccatggctaatcctctaaaaccaaccaggctaatctccaaaggtaaaattgcaaaacaaattaggtagtgcttttgctctaacaaaagaaatgtgagatcaagctctaatcacacaacctccctatttgcaaaacaaaatggatataaaccactttcgtgcagtggctagctgaatctaaggtagacattcctcccccattcgaataatatttgctcaaatcaataagaagcagaatcatatataattattttaaacttgtaaaatggaattatatgattttttttaaaacaactttcatacatgattttttttgcaaaaaagcacgcagctgctgcctaaaagcgtgctgatgctgctgaacagcgagcagtagcgatgtttgaaacagccaaacgatcctttgtcccctgcttacctacggagaaatatattttgcaacacagttgctcgatgatttaaccatttttcatattaggtgtaaatggatccacaaaatgcctctagttggtactgcactacaaggagttctgaagtgtgacattcaagttcatagcgacgcaagaaataaatacatgaaagtaaacatttagcactttgtaaaccactaattcagaacactcatccctggttcttcctcttcctgctagctcctacaaatgctcattcctggttattcctcttcctgcaatatattgcggattctcatacaaattagaaatgatcagagcagtaccacagatggttatggtatcaatgataaaatggatttgtacaaaacatgagttggatacgctatgcaaatctacaaaatcaattcacccatatcttgagttattttgataatgttggtgcttaccaagcactacaggaaacagatattacgattatgatgcagtatgaatatgtatcaattatgcggatacatagattgaaatagctacataattaaaacatgtgaaccaatgatcacttcagtatttccaaatacttgtactggtagtgatatggtagtgatcacttttaactaggaattgtgccgtctatagggcttctgatttattctccatttagattgaagccaatttgaatattgaatatccattagcaagaaagggggtagcatgtgaatcagggattgagcttggctgcagtaccatatatagctatgtgtatgcttgtaagagccactataattagcccacgcactgatgctataagaataactgacatacttcaattctacatgcttaactccagtagacaatgcaaagacaccaaacaaggctggaattctcttgtggagcatcaaagtggcgtcctagtcctaacactgacaccaccaatgtagaaacaacctaaattgcttagagtaatcatttcaataatcatcatttcaacaggacataatcgcttttaccatcaaaaccaacagcatttctagaccaccgtcgccctacctagcatcaaaagcgaggcactagcttaattaaattgcagatgcacccggtaggtggacttactaccaaactaagaaaatgaatatgcagcagcaggcggaaatccgtagaaagtagtaacgcaggtaattaagatgcatgtgtataccatgttagattgaattgaagtacttggaaaactcagaggggaggaaggactggggatagcttgactttgccctgaccatgtcggcatcctcaccggaaaggtcctcctgcccattaacatatggaataactgacaacacggtcttgctggctaggtcaatggtcacaaccgacatcttcctgatcacgtgctcatagtcgcaggtgaggaagtgcatgacattcggcatctccatgctcacggtaagaaacaggagaacttcatgaggcacgagctcagggcccttgaaggaccaaatctccttggacgtgatcgcaaagtctttgctccactcaatggccccaacatccagccctaacgtcctcaaagtgtggcaggtgatggtatagccccgtcctggttctagggagcctaacaacttgctatcgagccggttgacatcagcaaacttgagggcgccagagccgtcgcactcggtgtgacagacacaccacggtacacctgggagaaatggcggcgagatctaccgttagggaagctgtccagaggaaaccggatgaaggcgattccaggccttttctgcagtacgtcgcagaagagcatgcctcggtcgtagtccacccagcagaggtagttttggaaggcgatcacagtgtcagtggtccagtagaagatgtcccagtactcttcgccgctgccgtacacgattggcagctccatgatatcccaccggccgcctccatctccatcttcacctttggaggatatggccgagcggagcacgcacagtctggctttgacattagcattgatgtttctgaggacctgcagctcggcgacggcaaactcttcgccttggcacaagatgccgacggatcgaaactccaatggataccgcaggttgccgtcgccctcaacatcagatggggggaagccgccttctggctggtaggtacatgggaggggttcccccccttttggctggtaggtacatggggggagggctttgagtagcggcgaggaaactgggtcgtcgccggacgcggtgaagatgaagtagtcctgcgggcaagccggaacagggcactcgacgatgtagcagaagcatacgagaacgaggttgcggtgggtggccacgaggtggcatgccaccatctcctccggattcgggccctgtggccactgcacgtacaggcgggagatcgccggagggtcggcgatacggaaggcgatggtaaagggggtcttgtgggatccggaaccggatgccctcagtgtagccttggtgtcgtcggggaatgacttgtcgtcgtctctgcggaagacaaatcgctccagcatcacccagttggggaaggaggcggtggcggtggcggtggcggtggggaaggaggaggaggacatcgccatggatcggtagagatcctgagatggattggggaattaggacaagaaaaacgagacctacgctgcgggctgcggggacggatcgtgggagagttaatgtacagggggctcagactttgcagggccggttggcctgctttgatatttcggcctcgaggccgctagtcttctgcttcggcctatgacggcctccttaatttttaccggaggtccctgaacttgtcaccggggaaaaagtgtaccggaggtccctgaacttgtcaccgagatacgaaaacgtcctccaaccgcaatacgagatatggggtcccctaactatacaataccggtcacccgaggtcccacggcatgatttctccccgatttgtccgatgtggcgacggttttgtccgccgtggcgctttgacctcagtcgtcgtcgctgactcaggagcccggtagttaggatataatgaaggaaatgtttggcgcggcttgcttctcccccaaacaccgaaaccctagcaggtagcgagcgggcggcggcggcgacgacttggcgagtggcggtgtggagatgtcgagctcgatgagcgacggctcgtcgtcttcccgtcagtggaagtcttctcccgtgccttaccgggttggtcctctggattaccaacccgcggtgatgtgccaatgccggtgcccggcgaaggcggcgaggtggctctcgtggagcacggacaaccctaggtgctgatactacaagtgtcaacatgctagggtaagtgagggcttttggttgatatgttgttgaggttggatttggatagtttggggtttgaatgtagggttgtggtttcaggttggggggtgtgatttctaggcatggtgtgacggcccgacgtccagtttcattagggagctattgaatgacttgcgggacatggtgaattcgttgaggaggtggaaggaattgttgcagaaggaagttgaagacagtcgggctaagggggagcgacagaggatagaaatagattatgtgagggctatggttgctgtgaagaaggaagaaattagaagcttgaaggctaggaatcaaaaattagagaaggagaaaaaaatccttgtaatttgtatgatgtcatgtatttttatgctgtttgtggtgttagttgggaaggaatgagacatgttgatgtgtctacattcctgagtcagccttttgccatgctatctccaatggagatgacaagtatgaggttaagcattacacacataggttcactgtgaacttggacaagaaggagtgctcctgtagatactggcatctttcagggttaccttgccctcatgcaatagcttgcatatatttcaagaccaattcactggatgcatacatagctgaatgctattcagtagatgcattctagaagacatatgagcattgcctactgccagttgagggcatgaacagctgccctgaagatgacagagaggctttgaaagctcctggctatgtcaaaatgcctggaagaccaaggacagagacaagaagagaggccaatgaacctgcaaaaccaacaaaggcatctaggatgggcactgtaatgagatgcaagaaatgcaaacaagttggtcacaacaaaacctcttgtaataggcaccatgcagttgcaagaggtagtaccaacacagccccacagcaagataacaacttggtgctatctgtggagattatggataccccatacccacatggcgtggatattcgattaggtatgggggtaccatatacagatagaatatatctagtaaaggactcgattgttatgttaacttgtgtatcaaggaaatacccgatagtcctgatcggttacgattataatttatctttacatgcctagtccgttaggaacatgggttgtatcttgtaattccggctcctccccctatataaggaggggtccgggagcctctagaggcataacttttctctctgatcatacgatcaataatacactcggcgaatcaatccccggacaggagtagggtattacttttcatctagaaggtatgaacctgtataaatcttgtgtcttctaacccatccacttttctagcttgattgccacccccttttaatattgccaaaatattgtttcgacactatcaaacactccatagagttttgtgtagagcaaaaaaaaggaaggcaccagccactgctacaacaagttctgttcatagttattaagaccagactggtgattgaaccgttaaggcactcggttcactggtttattagttggaccggtcaaaccgccggttaaaaacggttcaaatagatgtgagttacatgtgtttcacagcttgtggcatagcctggtggttgaggctctcgcggaaaccaggaggttttgagttcgactcacagattctgcacctttttccctattttctgtgactccacgtgacgcgtcatattactagaaatataattcccagcaatggcgcagaaatacaagcgcacggatatatgggaagatcatgtagagagaactggactaataatttatacattgcttgtgataatcatattctaagtaggggttaagataatccaagggtagagtggcacacaacctttttccctattttctatcacattactagaaatataattcccagcaatggatataccattgtagcatttcacctgagagtagaaccccctattttctatcacattactagaaatataattcccagcaatggatataccattgtagcatttcacctgagagtagaacccagggaattaccagggaaccggggctaaatatgaattaccaaggaaccggggctaaatatggaggcttacatcttcccggtcggtcacccatctcaaaattgctctaggccaagcatgcttaacctcagagttctttcgagatcggtttccggaaaagaagttgtaacttgttgatatgagtattctattaatcctattaagccctaggctggaatgtcacatcctcaccccctcaagagagatcgacgcccccatcgatcaaccctaggccaagaacgtcccctcgcccccgtcgatcaaccccaggccaggaacgtcccctcttagccacgtccatgtgtctagtgccagcgcatgtgccatgctgtgtaaccactcccgatctacaccagccatacacatgcgcccgtgaaaccgcgagagtcagctctgataccacgtcctgcctctccaaggccaggcccgcttacatctggcagcttttataggtcatagactgccctcaggcccgcttacatctggcagcttttataggtcacagactgccctcacagaccaacacaagtctttcctgcacactttgtcctcactcgtgcgcacccaggaaatggtcacccatcctgaaattgctccaggacaagcacgcttaacctcagtgttctttcgagatcgatttccggaaaagaagttgcaacttgttgatatgagtattctattaatcctattaagccctaggccgggatgtcacatcctcaccccgggatgtcacatggtgccccacgaatacgtaactgcccaggatgttgatgttcagttacgcatcaaatgatataaaagcataaacttcgattatacaatacttaagtcacttagttcataacacaacataaatacaaaccattatatatatggcttataaagccttatttctacaaacagataaactgctagactccaccacaggaactgcctgagcgtaggatgacctagaaaccatagctgtcccactctaacggatcaacaggttctccacaagcatcttcctcctcatgatctgaacccatttatgagtacaaaaggtactcagcaagacatgcttatgataataaatacaataattgcaatataaaacatgcagtatcgagagctggaaggtttaaaccctaaccttaacagttatttcatatagcctaacataataaacatttgatctaaacaacactattgaacatttaatttaaacaataataacgagcataacaatataaatgttacttataaataacttgaatagaacattaaacaataaataagttaaccatattaattaatagccatttagtttaacttgtgcccataatctggaatcacccatagacacatctccattaaccgggagcacggtgtattcgaatactcaacgactctgcagcgtctgcccagctttacccacacgatacccacaactggccgggctgaaaagtaacgaggtgtaatattgctccatatatctctcccttctgcctagtaagttaaaggatgctcgggatgttgctcggagtgatccggtccgaggtgtgtgccaacctacctccgcatccacttaccattgttcgttactcgatgggcagcccagaacttcatgggccaatagggcagttctgaactctcggggcccatcgagcccacatatataaatcatataaacatgaaccatgtcattttgcttcacacacttgaaagctaatggccagtacaccgaaaggcctgcagaagttcaatcaattggagcaatatatggggccaggttcgacaaatcgattgtgtggatgggcgaaactatgtcattcttattgacacaagggggttaattattataccaattttaaataagaaataaccataaatatatccatatatccatcacgaccataaacaggtccataaaaccaaacacatgaactctatcatgtgtaccacccgctcacatgcggtgtcaacaattcttagcatatagccataaatagttccataagcatgttttcataagcaataataatatccatattaaatcaatagcatgttaaataattaacagtttgtttaagtgtttctcaaatcttgtcctaagcttatttgactctaaggctcattaaggtatttataacaacaacagaaaatataatgcaataatagcaatataattaacttaaaagaattcgtgcagtctatcgtactccaaagggcaagtacgctactaaaataactctctatctactgggattaaattgttcaagtgagggtgcatgtcttgcaaccttcgagctcgatgtagtcgtacaaatcgtctcctcctagcgcgaagatttcacttgctccaacgtcagcgttttctatttacgcaacaatcatcaccacaataaataatagaaaaacaaagataaccaaaagaaaatattatcacaaagtgcaacaatgggtgaaaaggatttaaagaaataattttagggatttttggaattttggtgaacggcgaaccctagggctaaaattagggtcgcgacaacgggtgctcggattgcaacgaaactaacacggatggattcggaataattctaggagtttggaataggtctcggatttcgatttcgaggtcaaacggatggtcaacttgataggaaaataaaaatgatttttctgatttatttttcaatagaaaaatccggtttttcttcttcttctctcgctctgtacaggaacggccggaatcccacgacgccggcgttggagatggccggttttgggcaagggagcgccggttttgcgatctacagggtgcagcaactcagttaccgtggttggcggcggcgcaggcggcggcggtgaggctggcgacggcggccatgacagcggtggttccggcgaactccggtgagcgcggcggccatggtgagcatcagtggagcaaggggagcatggtggtggtggcggctcggccttgggcggcctggagcggcggcgcgccgtgcagccggcggcggccgaacagagcggcgatgccgggaggcgacgccggcgacactccggcgtcggattggattgggaaagaaagaggaaagggagtactcagcatggagaatccatttttacattcaatttcataggatttgcgatgtatgcgacgaatttgggagctctatcaatggcccaaatttagggttttggggatttttcctccggtaatggcgatttgattcagcgggggtaggggcgaatttgaggaggtgaaagaggtttaaattgtgcttcttttgcctccggtattgtgccttctagttaaggagcgaaggagatacggaggcgggaagctgaaggtgtcgcggcggcattcgttcgtcgttcgtcctcgtgcaagcgtgtgcgtgcgtgtggcgcgcgcggggcggcacgagctcagcgcgagcgtgcacgggattggcgcgaggcagcaggagcttgctcggcttggctcagcctggcttggcctagccgtgtagaggaagaagaaagaaaagaaaaacagagaaagggaaggagagggagaagaacagagaagaaagaaaagaaaaaaaaacagaaaaggaaaacatggggaaaattaaaatagataggattggaattgatgtggaattagatgatccgatattcggaatagatttaaatcggattcaagggaattatttgagggatgatatgcactttgcgacaaaattaaacgagaaaagaacatcgaaaataaacatggaaaataatattttaaatgaactattaactcgacggttatatttttagagaatcaaagcaaactaaatcgattttaaatagttgtcaaattttagggcttttacatgtacccgcaccaaagcatctcccagataagctagccgtatattcagtataacaagaacataatgtaaagtaggtaatcatatacttagaaaatatttcaataccataaatgtatttagaagagtattctaataaaagtacaaagcttacaaaatagaagagaaaagttgctagagccatacccaaactcttccgaaggctttcggactccgatttctactctactcctattccaccagctagatactactaaactaagcttgagagaaatgagagagctattgcttgaggtggtgtgaagtgaagagagtgagctccttatatagaggtagttatgatggttgtggaaggggaattgtccaaagtgccctccaaccgtcattgggatgcaatcctggacgtccacgccaaaacctggatccaacggcgccaggattggtttggccgaacctggtggttcggcgaacctgggctggcccaatccagcccaatttcggctggtggcctcctctattgctctactccacggaattgtgaattttggcccaattcatcatgctagttctgagttcttggcccatctattcataagtctggttctcgacatcgtccgattgatttatcatctaagttgatgccgattctcctccactttattgtcattctctgcaaaagtttagtaaacctaataatagtagaaaattattactctaacatacttatgcattgcaagcataattattactctaacatacttatgcattgcaagcatcactagttctctcctattttggtaatattgatgttcgaaactgatcgataacgaccgtcaacagcgtcccagcagtcgaactaccccggtttttccccggttcttcattaaaccgtccggttcaactagtttactgccggtttgattgctcgccgatcttttagctgaaccggaccagccggcgccctggttccgatttttcccggtcgaaccgccggtctggtccggttctaataactatggttctattagcctaacacacaacaacagttcaactaaacagaaggttagatgttttccaattgttcttactttaatttgcatttcccaattctgaacctatatgcttattcacactgtctacataatttttcaggggctacatgatcatattgttaggatgaatgctaaggcggttgcaacacagtcaggtggttccgcaacagtcaacctgtaggcaattgtgccatattcccagggttctacatcagcttcaattcagatcatatctgggaaggcatctgtttcagtctcagctcaagaaccagcaaagaagaaaacatctactgggcctgctccatccaagaaggccaagactccaggatcaattctcatgctgccaccatgggaatctgacaaactttgaatcaatctgtgtgtattgctaagtattgacatgccttagctatttatcctatctgtgatgtaatgccattcatgccatatgtcatgtaatggttagaatgctgctatgccagacttgtaaggctgatgtgtgttgtgctgctatgcctgattatttgttcttttgctgaaatatctatgaaatgcctgaactgatttggcctatgtcatattgagctgaaatttgctgagttttgttgatttggcctatgtcattgagctgaaatttgctgagtttttttcaacaaaattggcacctgctatgttggtctgaaaatattgccttacaatgatgtcagattaattggttcattctacaattttatcatatgtggcctattgcacaattgatttgctcaaatttgtatcaaactaatcatttctttattacctacccattttcataatctaccatttcagagttcaaataacacacaaaatttgattcagaccatttcatcattcagctgcacaaatcctactcaaaattgcatcaccctattccatccattataccatttgttttcaacatccaactttccacaattcatccaacaaaaaccacaaacttagcacaattccattctagattccattacacaataccaaccaagttccattccataactgacaacattacattccactgcgactaaaaagatgccagattcatttcctacccatcaacatagcaaacacaacaacaaccagtcctaaatctaccaacaacatcacacatatctcaaactttaacctactattcctatccttcaacacccctaccacagcttccttctcaccaacaaccttcctcgatgtggccaactcattcctagctaaaaccagctctgattgcacacatcttccttcttcaacagcagccgaaaaatctcccttctccctcctcagcttccacacttcgtcgcgcaaatcgttcaacacttctctaacgaaactgttcgacggaccatcaacccaagcaaaataatcgcaacatccactctgcaacagtgaaccaatttaaccctagaactcagctcaacaaaatcatggaccccttgaaccctagaacttagctcaaaaaactcacccttgcattcacacatttgaagtaccggcacccgggattgtctgggatccacgaaatccacctcgccgccttgttgctgtacctgcataccaccgctggctcatactccaaagggccaacccgatacgggatgggggaggcagatgtgcgcctagaagacgccgacgagccctcactcctcgagctcgccattcaccgccactcatcgcgctagaaacttcgccgccgtcaaccgcgccgccactgtaaccccccgcgtcgtacccctctccgccgccgccacaacctactcgtagcaacaatggggaacgaacgagcgacagagataactctagaagagcccccgctatttattcccaactaccgtcgctgagtcagcgatgttgaccaagtcaagcagccacgtcagcgaaaactgcacgcaaaacagccatgggagtcagtttgctcgggatttcaaagtttaggggtcaagatatctggttttgcggtttagggtcacgatttagattcggatcacttttgagggtcacgaattgaacttattcctactagaaaatctgtgcgcctattatcacacccactatatagcctgtttatttgtttatccatgtgcctattagtttattgcatatactttcccaccatttagtacataggattccatatttaaaatatatttttgaccttcatgaggccaaacaaaaatgatcatccccttattttctctcaacttgggtgattgtatgattttgcagatattttctctgtagtaagtcgtgccatactccttgctcaatgatcaatttaagaagacatttgcttaacattctggatttctatattatgcaccccaagtccatcatggtcattttcaataaatctatgcatagtagtttgacacaacttcagatctacatcatgctagtcttgatgactgaatgttaaattataggggtttgaaattttatatttaatttaacacagaaaaatgattcatataaatgttattaacatatccatatatttgtgagcctaaaagtacctacctttgatcgagttgtgtcaaacaagacctaagtaaactctgtcgacgggggatacccgtagaccggatatagagggtattggggtccgttggtacgaggatctacgtagtacgacatcaagcaaacagaagacaaggattatactggttcaggccccttagtacttaggtagggaaaattgaaaccatgccattataattttgcaaaatttgagatatgccatcctgacccacatgtcattgactcatgtgggtcctacatgtcattgagataccgatggcatattcaaactttgcaaaattataatggcatggttccaattcaccctagtaggtaatagccctaatccagttggtatgggattatatgatggacaccacagattacaaaggaaataacagaactcgatgataccgacgagaccgtagttgagttggtccgactagatctcccgacgacttgactcctgtaggctccggctccgtaggctgtgatgggtgtgttggtggtgagattcgatgccttaggtcctgcctagggggtcccttatataccgcgggtcagttgatctccaagtaggactcggaaatatcggacccctcacgatatggtaaaaacccagcctcatccgagtaggactcgttccaaacgtagattctgcttctatcgcgggatagatttccttaatgtattcggaaactattcgtacacgcgcgggtataccgtatcggtacccattgtatatctgaggatagagggtataccttatccataaccctgacagtagcccccgacttctgcttaaatgaactcatgtagtcgatcatgactcccaatgtcggaattgttgtcgttctcatctggttgatctcggtgtaaaaaaccatagagacaaagagccatcgacaacatcgcatgaagtccaacggtcatgagtgaatttaaattgaagtctgaaaactaccgagcgcaacgaacccaaaaatttccgacggcaatctctctcctttccttggaatacgcactgtcggcagagcgcttattgaaaggaattttgggaatccatttgaagtccgtttgccataaaactcttctgccttctagcgcccttcgtcttctctgttccccgcaaagaaaaccctagcttgcttcttccctcttgtttctcggcgatcctccggcgacgatggaccttgagaagtctacctcaaccacagggagacaggaggtatagaacctgaacccatcatgtgccacatggttgtggtcgaagattacatttcttgcgattttcttcctccgccttcggaatttcttcttctcgtcttgaatttctatggcctttctttgcttcacttgaaccctaactccatcgcattccttagcatcttttctcatctttgcgatgcctacattggggtagagcccttccttgatctattccgcttttactatgagctgcgatggatggaacccaacagggtatctggatgcgttggattccgacttcaggatcgcctgaagtcgcgttacatccccttccaatgcccctcttctcgcagcaagtggcgggcgagatggttctatcttcagatcgaaaactccgatcccgtccttgttgtccctgaagaacagccagaccaaatcccagagtggactgccaaacccgccctgactccctccctccaatcttttatcgagatcgtcgatgatctccgaaatcgggggttgtcggggtatgaagtcgctgtcgacttcgtaggtaggcggattcaaccgctgtaggcccgcgcccatccggcctttgattactctgggccagaggacacgacccgggtctctcctcgggatattttttttcttgcatgtcacatcctgatttttgtttcaggatttataaatcatttaataaattattattagaatttatattaaatgttctttaatttacaagtgaagttaaatgtgggaaataaaatttcccaaatataaagcatggatggatttaatttttattaaattctccatgattaagtcaactctctgaaatattctcggatttttcagagctcaattcctaaatgatacaaagaacagttcagtaattatttgatcattaatgatctaattataattgttaagagcttttcttgtttaaaaatccttaaattataaattgttggttaaaaggaattattagaaatgatcttaaaagcctaaaagagaagatctaattttaatttgctaaatctcaatataaaattgggctagataaaattttgttaaatacttctcttgaatctttagttcctagatttttctgggatttatttgagccaaggaagtatttttaataaatggaattgcatttcatgaataatttaaatagaaaaaggttttaaaatcctccttttggctttgggccgaaagtcagcccaagtctctctttccttctccctctctcctccccggcccagtcggcccagtccgccgctctcctctctctctctgtcgctgacaggtgggtcccgcctgtcggagtcgtcgtcttcctccggccgccgccgcccgaaccctagcgccgcgccgccgtcgtctccttccaaattcggccgcgcctttccttctccggtgaaatctttagaggggaaatgatctccgggatctcctctaccttttctcttttggaatcgtcggctaatttcctttggaaataggcggattcgagtttgattcggattcgtgtttccccaatctttccttccgacgccggccgccgtgggccttcgccgccgcctccttgcccctataaaaggacccccggtgtctcctctacccgccgccaccctcgccttcgtctctcggccgtctgttttggataggatcgatctcggccgttcgttctcgtgaaccgccgccgtgcacccggtccaccgcaaaccctaggcgatgacgcaataattcccttttccttctcaaaaataattcattattgcgtcataattcaattaaaatccatataagtgttttaatcctatttaatctttaaaaattcataactaattctttgtaactcagtttaatgtggttcaagttgcaaaagttgtataaaataaagatctacatattaaaattatccataaattgaattaaatttatttaattctttttaaatgggctttaattagatttaatcttgtaaaattcataataaattcatatgaagtcagaatgaggccgttcaagtctcataattcatctaaaattatgatctacatgtttgtttactttttatgtattgtttatttggtttttattagtctttttcttcgttttgcgtgttagcttgtcgtttccgtcgttgcgaaggttcgcgagtgcgccggaagtattcaagaagattaattgaagaccgattattgcaaggcaagtcccacagatcctaaacacaatcctttgagcatgttgatcctatatttaaattctctatttatttcaactgtgcatttattttcgaatgtcactgggtggtgtgaatctattcctttgttatggcctgtttgcattgattactttattccttgataccttgggttattataacttgactagttgagctatatatattggttcagctagatattagatatgattgcttagccatgcttagaaacattagcacactattgggattacttatgactcattattatttaatgatggcttaatgatagttcacgatggtcaatcgtgattggttaattaattacttgccaactaaaacttgataatggtgggttgtgagcacatggttttgagagtcgtgctcatgacaattaaggaccggttcgcgagctactattgtgaaacattaatcgtgccaaccacaagccagcgtgggcaacggctttaccttttgtatagcatggttcattgcggagcaccagactgagaagtggtggagataagcccacgggggtcgctggggagtccatgccttgtttataagggggtgactatgatccgggaacggtgcactgtggtgggttgtgttatgcaaggggtaatgtcacagctcctttccgaggtaccgtggtggtaccgaggcacatggtgacatgttgtggggctgtgtcttgtgggtacagtggtacacctctggccagagtaaaactattcgaatagccgtgcccgcggttatgggcaggttgagcaatgtttttcgtgattagtcccacacctctcacaataattatggatgttatatctggtaataatttgcttagctcctggtttggagttagatctgtacagccgggtatggttgttcaggatggttgggcctgtgcagcatgggtgtgttgttcagtgttgattaaaatttctgattaattactccactgttttacttctcttaaatgttttgctaaaagctgcttttgcaaatgagcctatattatgccatcctttggtatccttgtgcacttgcatatttgctgtgtggcttgctgagtatgtcatatgctcaccttgcaataatcaatcaacctcagttaaagaaaaaggatccagaaggagaagacatttggcttataccccagttgagctgcctgtgggagtggagccggagcttcgctagattttattttccgctgcagttttcttcttggtgaggacttagtgcctcttaagtaagtatttattgttttagttaatttgatgaatctgtatattaaattgtcagtttgtgtacctcggctgattcctggacgaggattttatgcacaaataagttcggaaattactagtgaattttcgggcgtgacattgcatttctaatcttgttccgagtgcatctgtttctcctgacttatcgagttctcattttcgattcacaggtctagacagtgacaccgtggggtgccgcgtcagtcaggtgatgatcagcgccccctcagcagggagcgacatcccgatccccctttgcgaaaagggcccagccgaacgcgccgctgcgatcaatgtgagtgtactcgatgattcctttacatctttctccttgagatcacgtcgtgacttcacattgtgcaggctctccctttacggacgtcatcgggccactagtggaccaccaggcggcggtgtcattgaagaagggcgtcgccaaggaggcgtccgacgctgctgctgctaccacgagtggcagcaatgttccgaagaaggggaggaaattctcctccgtacttgggacccgtcggaagatgccaaactctgctgtaagcttctctatcgttccctagtgcgtagtcggaacaatttgatctcataccatttcatcttactcaggactcggacgcgtctcctccgcctcaccgaaggcaaaggttggtgactatcggcgagaagtaagtaaacgttcttgagatcttgttattttccaaattccgatcacctcgcctcatggggaagagaaaaaactttgcagggcggcatgggcaaaggcggcgcaaggcgggactgatgccgcttccagcgcgtcccctacggcgacctcgacaggagtcgtggtcgctactatggaccaggaggtggcaccgagcggccctgccgtcagcctcgtgcctacccggggtccgtccaccgatgccctcacctgggggggagctccaagcagagatggagcgcatcctctaggccggtactcgcggcgtaggtcgcgagatcgaggaggctagggcggcggcggcgtcggcaaaccagcgtgccgaccagctagtgcgcgacctggcggaggcccgtgaggacctcctaaagatgagggagctggtggccggcaacgagatgcagcggcgcggactcgagcaccggatattggagctcgagggccatatgattgacatccgcggttcgctgcgaacatcgttcaccagcctgcaccaactcgccggggagtgtggtgtcacgactaccatcccggcgcaccccgatgagttctcgctgacgtcatcgcttgtggaactggctacggtgatggaggagatcccctccaagcatgcggctaggatcggcgaggagacgtccaacggcatctacaccggggcatgccatgtccttgcgtgcatgaggctggcacatcccgatctggaccttaacaaggctttggatcagggggccaccgatgacgcgcgcaaggctacgatggaagaagtcagtgacttgggggagtttgtcctccccctttttgaagagtaggatatttgttttcccttgtactccttaaccttcatgctataaaacttattgtggatccaaactgctctcctccgaacagttgtttcccttgtttccttagcatgtgattccgagtactttgttgttgttgtagagatgttgatatcgaggatgtccagcagcgcgggcagcccgacataccggtgattgttcaggcgcttacgctcaagccgttcgtgcagtgggaggaaactagtcaaagcccatccgcggaagtgaacatggcgatgacgtcgctaggtttgtatcttgcacttcttcactccttgtgttcggattgacttgattagctgtgttctcggaggagaagaatagcttgacttagtcttttcccatagtcttttccctgtcgggcagatttcgagaacatgttggctgaccgagatcgtcgaatccaatattggaggacgaaactcgaggtggccgaactcaaaaaaaccatggtggaggtgaagaaggaccaggccgtggaagctcttcgaggtcgcaaggtgtggttcaactcgtacctcaagagctgctgcgcggtgatggtgagggtttgcaaggagctatgatcccgaggagatcccaagaagtcggcggccagttatatctcgtggttgaatggagccagtgcacaacttgaagggattggccagcacatcgacgatgccttgaaggaggagtgtcgtcgggcgagccgctacgccggaggtcatgtgctggcctgcatccgagatcaccgtccgcagctgcaactcgagttccttcgtgaggggttctcgcgttcccggaggacacccgcggagatcgacggtcttgcacagtcaatggcgctgcttgccgagaaggttttccgctccatggattggtgttggccgtcctggtagtttttgtatcctgtagaaaaatatctcaaggaagcatgtaatatactttgaagtatttatgacttgtaagaaatacttgtaaaatagaaaagggatctatctaactaagttttcttactctgggtatgttgcgtatgagtgttttctcactttgcgacttcgatcagtcacttgagctatacactctccctagccccagccttgtcatcggagaatcgttctcggaggataaggctcttagatccttgacctgccttggttgaaaaaagcattgaccctagctcccagccgtgaagttggaaaactcaatttccgattacacggcttggttaatacgcacggcctgaactcttacatgaccagatcttacatggtcatttgtctctacatgatctgacaaggccttatccgctctgggcgtccccagccgaagttcccttagattcctcagaggctttgccaggacggcgtaaagggacatgaggataggttttaactctaggtgtcgtcgtggtaacggatcgtcgggaaggaacactctgacaatattctttacctgaaatcaactttattgaaatcgtgagatgccttacaaatttggagactattgatttatacataaaatttacgtaattgatcaatgttccaggaatttgctaactcgcgaccatcgtcgtctgcaatcttgaatgcacatggccacaagacttgcgtgatcgtgtatggtccttcccacttgggtgagagcttattacgccctgcttgactttgaacccatcggaggacgtaatcgccgatcgaaagtgtgagtgctctgatgcgcttctcgtggtatcggcgaagggcctgctggtagctggctgctctgacggtaactctttctcgatgttcctcgagtagattcacatcgtcacttcgctgctcctcctgttccttgtcggagtacttctgtactcgtgtgctttgatgttgtagctccgtggggagcatagcctctgagccatacacgaggaagaagggtgtctccttattggatgttgtcggtgtggtacgcacggcccatagaacagaggggagttcttcgacccacttcttatcgtgtgacatgagtctgtcgtagacgcgggtcttgatcccttgtagtactatgccgtttgccctttcgacctgtccattgctctgagggtaagaaaccgaggcaaagcaaatcttgactcccaatccaatgcagtaatccaggaagtcggcactgataaactgggagtcgttgtctgttatgatgcggtgaggcaatccatatctgcagaatatccctttgataaacttgatggcattgtcggccttgatttcccccgtgggtgtcgcttcaatccacttggtgaacttgtcgaccatgatgaataggaacttgtagccgttgtcctcatgggaatggaccgagtatgtcgagcccccagcacgagaacgaccaagcaagagggatagtctggagtgcttgcgctggtagttgtcacgcccggaatttctatccaaaattccagacgcttacatgtgtgtgaaccctcgtccaggaatcagccgaggcacacaataacaaattgataatagagtacaattattactctaattaataagcgaataaaatgtcattacagaggtagatagttcctcttaatcaataaagatctaagtagcggaaaataaaataaacggcgcggacggctccactccacaagcagcttgaccaaggctacacctaatcctccacaccatcagcatcattgtagaactcttcctctgatgaatgattgcaaggtgagtatatgacatactcagcaagccacgcagcaaatatgcaagtgcacaggataacaaaggatggcatagtagggtttcatttgcaaaagcagcatttagcaaacatttcagaatttaataaaacagttaagtaataattaaacaatattaatccaacgttatacaacataccctgttgtataggcccaaccattctgaacaaccatcctggctgcacagttctatctccaaaccaggaatataccattccaaaccaggagctaat
